United States Patent Application Publication US 2007/0214517 A1 - sequence listing, part 16

SEQ ID NO: 20917 - DNA, 1526 bp, Arabidopsis thaliana
  misc_feature (1)..(1526): Ceres Seq. ID no. 12326423
  misc_feature: MA Experiment ID: 108434 Result: Up-regulated in Transcription
  misc_feature: MA Experiment 108434 PARAMETER Experiment Name: At_Root_Tips_cDNA_P Parameter: Tissue Value: Root Tips
  misc_feature: MA Experiment ID: 108462 Result: Down-regulated in Transcription
  misc_feature: MA Experiment 108462 PARAMETER Experiment Name: At_Germinating_Seeds_cDNA_P Parameter: Age (day) Value: 2 vs. 0
  misc_feature: MA Experiment 108462 PARAMETER Experiment Name: At_Germinating_Seeds_cDNA_P Parameter: Tissue Value: Germinating Seeds
  misc_feature: MA Experiment ID: 108463 Result: Down-regulated in Transcription
  misc_feature: MA Experiment 108463 PARAMETER Experiment Name: At_Germinating_Seeds_cDNA_P Parameter: Age (day) Value: 3 vs. 0
  misc_feature: MA Experiment 108463 PARAMETER Experiment Name: At_Germinating_Seeds_cDNA_P Parameter: Tissue Value: Germinating Seeds
  misc_feature: MA Experiment ID: 108464 Result: Down-regulated in Transcription
  misc_feature: MA Experiment 108464 PARAMETER Experiment Name: At_Germinating_Seeds_cDNA_P Parameter: Age (day) Value: 4 vs. 0
  misc_feature: MA Experiment 108464 PARAMETER Experiment Name: At_Germinating_Seeds_cDNA_P Parameter: Tissue Value: Germinating Seeds
  misc_feature: MA Experiment ID: 108595 Result: Down-regulated in Transcription
  misc_feature: MA Experiment 108595 PARAMETER Experiment Name: At_Ler-pi_Ovule_cDNA_P Parameter: Plant Line Value: null
  misc_feature: MA Experiment ID: 20000113 Result: Up-regulated in Transcription
  misc_feature: MA Experiment 20000113 PARAMETER Experiment Name: At_42deg_Heat_cDNA_P Parameter: Temperature (deg C) Value: 42 vs. 22
  misc_feature: MA Experiment 20000113 PARAMETER Experiment Name: At_42deg_Heat_cDNA_P Parameter: Timepoint (hr) Value: 8
  misc_feature: MA Experiment 20000113 PARAMETER Experiment Name: At_42deg_Heat_cDNA_P Parameter: Tissue Value: Aerial
  misc_feature: MA Experiment ID: 20000224 Result: Down-regulated in Transcription
  misc_feature: MA Experiment ID: 20000315 Result: Down-regulated in Transcription
  misc_feature: MA Experiment 20000315 PARAMETER Experiment Name: At_14day_Shoots-Roots_Sub_P Parameter: Age (day) Value: 14
  misc_feature: MA Experiment 20000315 PARAMETER Experiment Name: At_14day_Shoots-Roots_Sub_P Parameter: Organism Value: A. thaliana
  misc_feature: MA Experiment 20000315 PARAMETER Experiment Name: At_14day_Shoots-Roots_Sub_P Parameter: Plant Line Value: WS
  misc_feature: MA Experiment 20000315 PARAMETER Experiment Name: At_14day_Shoots-Roots_Sub_P Parameter: Tissue Value: Shoots vs. Whole Plant
  misc_feature: MA Experiment ID: 20001807 Result: Up-regulated in Transcription
  misc_feature: MA Experiment 20001807 PARAMETER Experiment Name: At_50mM_NH4NO3_L-to-H_Sub_P Parameter: Timepoint (hr) Value: 6
  misc_feature: MA Experiment 20001807 PARAMETER Experiment Name: At_50mM_NH4NO3_L-to-H_Sub_P Parameter: Tissue Value: Leaf
  misc_feature: MA Experiment 20001807 PARAMETER Experiment Name: At_50mM_NH4NO3_L-to-H_Sub_P Parameter: Treatment Value: 50mM NH4NO3 vs 100mM Mannitol
aaagaaggaaaaaatataaagtttcctttccctctcgttcgttggctttgccttcccgagagagaaagataagatttggttttgcattcctcttctctctcgccgctctcaatatgcttcgatttctattctcctcttcctcttgattttgtcttcttctctttgctgcggagagattaagaaacccaagggttttaagcaagagacgcggcgaggaagctatccagaactctctgaaacatccattcctttttctcatggacgtagtgttgccggaaactgccgtggtaaccggtggttcggttatcggagattatggatttaatgtggatccttttctcgttgaggcgttgcacaactctcgccatcgtctcacgattttgcggatggaacttgatgttcaaaggttgttgcagaaccctgaacagcagcagtttgagttccagcattttcctacttcgtatcttcgtcttgcagcccatcgtgttgctaaccattatgggctagctacagctgtccaagagagtggtgctgatggaaatgaaaacagaatccttgtgacgaaaactacagagagcaaatttcctgctgttcggttgtctgaaatcccggtggctaaacaatcagaaaatggtaagtttgagagcaggaaagtttccatcaagactcgaccttctaaaggatctggatatggcgctggtgatctggaaaagaatcgtggtcctcttagaagtgttgaagagaggaaagaagagtatgacaaggctcgagaacgcatattcagtggtcttactggtcttagttgtgatgactcttcatctgaaactcaggtgtatgagaggaatgcaagtcttagcagagatgacaagcaagtatctaagaatgcttacgttgaggtcaagaagaacttaagcatcagggaaagtggtccaacatctcgtgttgcaatatttagagacagagagaaagatcggtttgaccctgattatgaccgcagacaccaaaggtacattaggagccttccggtgaatcagaacttcaatctaccacccttcaacattcagcaaataccgacaccatactacgaaatgggattcactggatataaccaaattccaagtcctcctgctcctcttggcttcggaccacatcctagctcaatcatgagtccctatggcaccacaatggatgcaatgtatatgcattggcctaatgcagctatgatgtatgctcatccgtatgagcagttcaggaatggctctcttcaggcacagttcgttcaacaacccttgagcttcgactacatgcagaaccgctaggtgcttgcctctttgtcgatctttatctctgtttaccatttttttttgtagaacctaggaactgttgtaatggaaattttggagttgtaatgtcaaaattcagaatgaagagaccttttgttccttttacaattatcagattctgtctattatggaaaaccaatgaactacctgtgggtcaaatcttcatcgaaattctctgttttg

SEQ ID NO: 20918 - protein, 353 aa, Arabidopsis thaliana
  peptide (1)..(353): Ceres Seq. ID no. 12326424
  misc_feature (23)..(329): Homolog of NCBI NO: 29367411 NR Description: unknown [Oryza sativa (japonica cultivar-group)]
  misc_feature (24)..(325): Homolog of NCBI NO: 18414788 NR Description: putative protein
  misc_feature (24)..(325): Homolog of NCBI NO: 10178049 NR Description: gb|AAF19572.1~gene_id:MUG13.4~strong similarity
  misc_feature (24)..(327): Homolog of NCBI NO: 21592735 NR Description: unknown [Arabidopsis thaliana]
  misc_feature (24)..(327): Homolog of NCBI NO: 18398995 NR Description: expressed protein
  misc_feature (24)..(327): Homolog of NCBI NO: 30681485 NR Description: expressed protein [Arabidopsis thaliana]
  misc_feature (7)..(253): Homolog of NCBI NO: 7487238 NR Description: hypothetical protein At2g40960 [imported] -
  misc_feature (7)..(353): Homolog of NCBI NO: 18405560 NR Description: expressed protein
  misc_feature (7)..(353): Homolog of NCBI NO: 21592404 NR Description: unknown [Arabidopsis thaliana]
  misc_feature (1)..(353): Homolog of NCBI NO: 15228989 NR Description: putative protein
MDVVLPETAVVTGGSVIGDYGFNVDPFLVEALHNSRHRLTILRMELDVQRLLQNPEQQQFEFQHFPTSYLRLAAHRVANHYGLATAVQESGADGNENRILVTKTTESKFPAVRLSEIPVAKQSENGKFESRKVSIKTRPSKGSGYGAGDLEKNRGPLRSVEERKEEYDKARERIFSGLTGLSCDDSSSETQVYERNASLSRDDKQVSKNAYVEVKKNLSIRESGPTSRVAIFRDREKDRFDPDYDRRHQRYIRSLPVNQNFNLPPFNIQQIPTPYYEMGFTGYNQIPSPPAPLGFGPHPSSIMSPYGTTMDAMYMHWPNAAMMYAHPYEQFRNGSLQAQFVQQPLSFDYMQNR

SEQ ID NO: 20919 - protein, 310 aa, Arabidopsis thaliana
  peptide (1)..(310): Ceres Seq. ID no. 12326425
  misc_feature (1)..(286): Homolog of NCBI NO: 29367411 NR Description: unknown [Oryza sativa (japonica cultivar-group)]
  misc_feature (1)..(282): Homolog of NCBI NO: 18414788 NR Description: putative protein
  misc_feature (1)..(282): Homolog of NCBI NO: 10178049 NR Description: gb|AAF19572.1~gene_id:MUG13.4~strong similarity
  misc_feature (1)..(284): Homolog of NCBI NO: 21592735 NR Description: unknown [Arabidopsis thaliana]
  misc_feature (1)..(284): Homolog of NCBI NO: 18398995 NR Description: expressed protein
  misc_feature (1)..(284): Homolog of NCBI NO: 30681485 NR Description: expressed protein [Arabidopsis thaliana]
  misc_feature (1)..(210): Homolog of NCBI NO: 7487238 NR Description: hypothetical protein At2g40960 [imported] -
  misc_feature (1)..(310): Homolog of NCBI NO: 18405560 NR Description: expressed protein
  misc_feature (1)..(310): Homolog of NCBI NO: 21592404 NR Description: unknown [Arabidopsis thaliana]
  misc_feature (1)..(310): Homolog of NCBI NO: 15228989 NR Description: putative protein
MELDVQRLLQNPEQQQFEFQHFPTSYLRLAAHRVANHYGLATAVQESGADGNENRILVTKTTESKFPAVRLSEIPVAKQSENGKFESRKVSIKTRPSKGSGYGAGDLEKNRGPLRSVEERKEEYDKARERIFSGLTGLSCDDSSSETQVYERNASLSRDDKQVSKNAYVEVKKNLSIRESGPTSRVAIFRDREKDRFDPDYDRRHQRYIRSLPVNQNFNLPPFNIQQIPTPYYEMGFTGYNQIPSPPAPLGFGPHPSSIMSPYGTTMDAMYMHWPNAAMMYAHPYEQFRNGSLQAQFVQQPLSFDYMQNR

SEQ ID NO: 20920 - DNA, 1424 bp, Arabidopsis thaliana
  misc_feature (1)..(1424): Ceres Seq. ID no. 13580799
  misc_feature: MA Experiment ID: 108434 Result: Down-regulated in Transcription
  misc_feature: MA Experiment 108434 PARAMETER Experiment Name: At_Root_Tips_cDNA_P Parameter: Tissue Value: Root Tips
  misc_feature: MA Experiment ID: 108463 Result: Up-regulated in Transcription
  misc_feature: MA Experiment 108463 PARAMETER Experiment Name: At_Germinating_Seeds_cDNA_P Parameter: Age (day) Value: 3 vs. 0
  misc_feature: MA Experiment 108463 PARAMETER Experiment Name: At_Germinating_Seeds_cDNA_P Parameter: Tissue Value: Germinating Seeds
  misc_feature: MA Experiment ID: 108464 Result: Up-regulated in Transcription
  misc_feature: MA Experiment 108464 PARAMETER Experiment Name: At_Germinating_Seeds_cDNA_P Parameter: Age (day) Value: 4 vs. 0
  misc_feature: MA Experiment 108464 PARAMETER Experiment Name: At_Germinating_Seeds_cDNA_P Parameter: Tissue Value: Germinating Seeds
  misc_feature: MA Experiment ID: 108573 Result: Up-regulated in Transcription
  misc_feature: MA Experiment 108573 PARAMETER Experiment Name: At_Drought_cDNA_P Parameter: Timepoint (hr) Value: 6
  misc_feature: MA Experiment 108573 PARAMETER Experiment Name: At_Drought_cDNA_P Parameter: Tissue Value: Aerial
  misc_feature: MA Experiment 108573 PARAMETER Experiment Name: At_Drought_cDNA_P Parameter: Treatment Value: Drought vs. No Drought
  misc_feature: MA Experiment ID: 20000071 Result: Up-regulated in Transcription
  misc_feature: MA Experiment 20000071 PARAMETER Experiment Name: At_100uM_ABA_Mutants_cDNA_P Parameter: Plant Line Value: CS8104
  misc_feature: MA Experiment 20000071 PARAMETER Experiment Name: At_100uM_ABA_Mutants_cDNA_P Parameter: Timepoint (hr) Value: 6
  misc_feature: MA Experiment 20000071 PARAMETER Experiment Name: At_100uM_ABA_Mutants_cDNA_P Parameter: Tissue Value: Aerial
  misc_feature: MA Experiment 20000071 PARAMETER Experiment Name: At_100uM_ABA_Mutants_cDNA_P Parameter: Treatment Value: 100uM ABA vs. No Treatment
  misc_feature: MA Experiment ID: 20000111 Result: Down-regulated in Transcription
  misc_feature: MA Experiment 20000111 PARAMETER Experiment Name: At_42deg_Heat_cDNA_P Parameter: Temperature (deg C) Value: 42 vs. 22
  misc_feature: MA Experiment 20000111 PARAMETER Experiment Name: At_42deg_Heat_cDNA_P Parameter: Timepoint (hr) Value: 6
  misc_feature: MA Experiment 20000111 PARAMETER Experiment Name: At_42deg_Heat_cDNA_P Parameter: Tissue Value: Aerial
  misc_feature: MA Experiment ID: 20000180 Result: Up-regulated in Transcription
  misc_feature: MA Experiment 20000180 PARAMETER Experiment Name: At_Germinating_Seeds_P Parameter: Age (hr) Value: 24 vs. 0
  misc_feature: MA Experiment 20000180 PARAMETER Experiment Name: At_Germinating_Seeds_P Parameter: Tissue Value: Germinating Seeds
  misc_feature: MA Experiment ID: 20000495 Result: Up-regulated in Transcription
  misc_feature: MA Experiment 20000495 PARAMETER Experiment Name: At_Guard_Cells_P Parameter: Harvest Date Value: 8/2/2002
  misc_feature: MA Experiment 20000495 PARAMETER Experiment Name: At_Guard_Cells_P Parameter: Organism Value: A. thaliana
  misc_feature: MA Experiment 20000495 PARAMETER Experiment Name: At_Guard_Cells_P Parameter: Tissue Value: Guard Cells vs. Leaves
  misc_feature: MA Experiment ID: 20001247 Result: Down-regulated in Transcription
  misc_feature: MA Experiment 20001247 PARAMETER Experiment Name: At_Far-red-induction_P Parameter: Age (day) Value: 7
  misc_feature: MA Experiment 20001247 PARAMETER Experiment Name: At_Far-red-induction_P Parameter: Light Value: Far-red vs. White
  misc_feature: MA Experiment 20001247 PARAMETER Experiment Name: At_Far-red-induction_P Parameter: Organism Value: A. thaliana
  misc_feature: MA Experiment 20001247 PARAMETER Experiment Name: At_Far-red-induction_P Parameter: Plant Line Value: Columbia
  misc_feature: MA Experiment 20001247 PARAMETER Experiment Name: At_Far-red-induction_P Parameter: Timepoint (hr) Value: 1
  misc_feature: MA Experiment 20001247 PARAMETER Experiment Name: At_Far-red-induction_P Parameter: Tissue Value: Whole Plant
  misc_feature: MA Experiment ID: 20001451 Result: Down-regulated in Transcription
  misc_feature: MA Experiment 20001451 PARAMETER Experiment Name: At_Far-red-induction_P Parameter: Age (day) Value: 7
  misc_feature: MA Experiment 20001451 PARAMETER Experiment Name: At_Far-red-induction_P Parameter: Light Value: Far-red vs. White
  misc_feature: MA Experiment 20001451 PARAMETER Experiment Name: At_Far-red-induction_P Parameter: Organism Value: A. thaliana
  misc_feature: MA Experiment 20001451 PARAMETER Experiment Name: At_Far-red-induction_P Parameter: Plant Line Value: Columbia
  misc_feature: MA Experiment 20001451 PARAMETER Experiment Name: At_Far-red-induction_P Parameter: Timepoint (hr) Value: 24
  misc_feature: MA Experiment 20001451 PARAMETER Experiment Name: At_Far-red-induction_P Parameter: Tissue Value: Whole Plant
  misc_feature: MA Experiment ID: 20001560 Result: Down-regulated in Transcription
  misc_feature: MA Experiment 20001560 PARAMETER Experiment Name: At_Drought_Soil_Dry_P Parameter: Age (day) Value: 28
  misc_feature: MA Experiment 20001560 PARAMETER Experiment Name: At_Drought_Soil_Dry_P Parameter: Organism Value: A. thaliana
  misc_feature: MA Experiment 20001560 PARAMETER Experiment Name: At_Drought_Soil_Dry_P Parameter: Plant Line Value: WS
  misc_feature: MA Experiment 20001560 PARAMETER Experiment Name: At_Drought_Soil_Dry_P Parameter: Post Timepoint (hr) Value: None
  misc_feature: MA Experiment 20001560 PARAMETER Experiment Name: At_Drought_Soil_Dry_P Parameter: Post-Treatment Value: None
  misc_feature: MA Experiment 20001560 PARAMETER Experiment Name: At_Drought_Soil_Dry_P Parameter: Timepoint (day) Value: 14
  misc_feature: MA Experiment 20001560 PARAMETER Experiment Name: At_Drought_Soil_Dry_P Parameter: Treatment Value: Drought vs. No Drought
aattgataatttgttacactagttgtgaattgagtttcttggttctttcattaattttgatttggttttgtagcctacgaattcgaatcatcagcatcatcttcaacaccagcttaacgaaaatggaagtataataagtggccacggactagtactctctcaccaacttccacctctccaagcaaaccctaaccctaaccaccaccatgtcgctacctctgctggtcttccgtcaaggatgggtggatcgatggcggagagagcaaggcaggccaacattcctccactagcgggacccctaaagtgtcctcgatgcgactccagcaacactaagttctgttactacaacaactataacctcactcagcctcgtcacttctgcaaaggttgccgtcgctactggacacaagggggcgccctgagaaacgtccctgtaggtggaggctgccggaggaataacaagaagggcaaaaatggaaatttaaaatcttcttcttcttcgtccaaacagtcttcctcggtcaacgctcaaagtcctagctcaggacagctaaggacaaatcatcagttccctttttcaccaactctttacaatctcactcaactcggaggtattggtttgaacttagccgctactaatggcaacaaccaagctcaccagatcggttccagtttgatgatgagcgatctagggtttctccatggacgaaatacttcaactccgatgacgggaaacattcatgaaaacaacaacaataataacaatgaaaacaacctaatggcatccgttggatctttgagcccctttgctctcttcgatccaacgacggggctatacgctttccagaacgacggtaatatcgggaacaacgttgggatatctggttcttctacttccatggttgattctagggtttatcagacgcctccggtgaagatggaagaacaacctaatttggctaacttgtctagaccggtctccggtttgacgtctcctgggaatcaaacaaatcagtacttttggcctggttcggatttctcgggtccttctaatgatctcttgtgagatttttgtgtgttttgtcggatcattaacgtatgttacgacttacgacgtggagattgattaaaaggactaccaacggtcaggattaactgcatgcatagtctgtgctcaagacgatgatcgtggagaagtacaaggacaaactaaaaggtatcttaattagagattgtggttttacaacttaaattcgatacttatttatataatcaggtgtgtcatataatttgtttgtattgcgtgatttcatggttgatctgatttctcaagttgctatatatgcctcaatacatgtgtgtaacagtccaatttgtatactctttagactgaattttatcgaatatataatatttttcagttt

SEQ ID NO: 20921 - protein, 275 aa, Arabidopsis thaliana
  peptide (1)..(275): Ceres Seq. ID no. 13580800
  misc_feature (16)..(78): Pfam Name: Dof domain, zinc finger Pfam Description: Dof domain, zinc finger
  misc_feature (1)..(269): Homolog of NCBI NO: 7688355 NR Description: Dof zinc finger protein [Solanum tuberosum]
  misc_feature (1)..(146): Homolog of NCBI NO: 15241827 NR Description: Dof zinc finger protein [Arabidopsis thaliana]
  misc_feature (1)..(233): Homolog of NCBI NO: 15224320 NR Description: Dof zinc finger protein [Arabidopsis thaliana]
  misc_feature (1)..(137): Homolog of NCBI NO: 25352305 NR Description: probable DOF zinc finger protein
  misc_feature (1)..(273): Homolog of NCBI NO: 30684022 NR Description: Dof zinc finger protein [Arabidopsis thaliana]
  misc_feature (5)..(229): Homolog of NCBI NO: 5059394 NR Description: zinc finger protein OBP2 [Arabidopsis thaliana]
  misc_feature (1)..(275): Homolog of NCBI NO: 30680237 NR Description: Dof zinc finger protein [Arabidopsis thaliana]
  misc_feature (1)..(275): Homolog of NCBI NO: 21593773 NR Description: zinc finger protein OBP2 [Arabidopsis thaliana]
  misc_feature (1)..(275): Homolog of NCBI NO: 30680246 NR Description: Dof zinc finger protein [Arabidopsis thaliana]
  misc_feature (1)..(275): Homolog of NCBI NO: 25406987 NR Description: hypothetical protein [imported] - Arabidopsis
MGGSMAERARQANIPPLAGPLKCPRCDSSNTKFCYYNNYNLTQPRHFCKGCRRYWTQGGALRNVPVGGGCRRNNKKGKNGNLKSSSSSSKQSSSVNAQSPSSGQLRTNHQFPFSPTLYNLTQLGGIGLNLAATNGNNQAHQIGSSLMMSDLGFLHGRNTSTPMTGNIHENNNNNNNENNLMASVGSLSPFALFDPTTGLYAFQNDGNIGNNVGISGSSTSMVDSRVYQTPPVKMEEQPNLANLSRPVSGLTSPGNQTNQYFWPGSDFSGPSNDLL

SEQ ID NO: 20922 - protein, 271 aa, Arabidopsis thaliana
  peptide (1)..(271): Ceres Seq. ID no. 13580801
  misc_feature (12)..(74): Pfam Name: Dof domain, zinc finger Pfam Description: Dof domain, zinc finger
  misc_feature (1)..(265): Homolog of NCBI NO: 7688355 NR Description: Dof zinc finger protein [Solanum tuberosum]
  misc_feature (1)..(142): Homolog of NCBI NO: 15241827 NR Description: Dof zinc finger protein [Arabidopsis thaliana]
  misc_feature (1)..(229): Homolog of NCBI NO: 15224320 NR Description: Dof zinc finger protein [Arabidopsis thaliana]
  misc_feature (1)..(133): Homolog of NCBI NO: 25352305 NR Description: probable DOF zinc finger protein
  misc_feature (1)..(269): Homolog of NCBI NO: 30684022 NR Description: Dof zinc finger protein [Arabidopsis thaliana]
  misc_feature (1)..(225): Homolog of NCBI NO: 5059394 NR Description: zinc finger protein OBP2 [Arabidopsis thaliana]
  misc_feature (1)..(271): Homolog of NCBI NO: 30680237 NR Description: Dof zinc finger protein [Arabidopsis thaliana]
  misc_feature (1)..(271): Homolog of NCBI NO: 21593773 NR Description: zinc finger protein OBP2 [Arabidopsis thaliana]
  misc_feature (1)..(271): Homolog of NCBI NO: 30680246 NR Description: Dof zinc finger protein [Arabidopsis thaliana]
  misc_feature (1)..(271): Homolog of NCBI NO: 25406987 NR Description: hypothetical protein [imported] - Arabidopsis
MAERARQANIPPLAGPLKCPRCDSSNTKFCYYNNYNLTQPRHFCKGCRRYWTQGGALRNVPVGGGCRRNNKKGKNGNLKSSSSSSKQSSSVNAQSPSSGQLRTNHQFPFSPTLYNLTQLGGIGLNLAATNGNNQAHQIGSSLMMSDLGFLHGRNTSTPMTGNIHENNNNNNNENNLMASVGSLSPFALFDPTTGLYAFQNDGNIGNNVGISGSSTSMVDSRVYQTPPVKMEEQPNLANLSRPVSGLTSPGNQTNQYFWPGSDFSGPSNDLL

SEQ ID NO: 20923 - DNA, 1256 bp, Arabidopsis thaliana
  misc_feature (1)..(1256): Ceres Seq. ID no. 13486719
  misc_feature: MA Experiment ID: 108461 Result: Down-regulated in Transcription
  misc_feature: MA Experiment 108461 PARAMETER Experiment Name: At_Germinating_Seeds_cDNA_P Parameter: Age (day) Value: 1 vs. 0
  misc_feature: MA Experiment 108461 PARAMETER Experiment Name: At_Germinating_Seeds_cDNA_P Parameter: Tissue Value: Germinating Seeds
  misc_feature: MA Experiment ID: 108462 Result: Down-regulated in Transcription
  misc_feature: MA Experiment 108462 PARAMETER Experiment Name: At_Germinating_Seeds_cDNA_P Parameter: Age (day) Value: 2 vs. 0
  misc_feature: MA Experiment 108462 PARAMETER Experiment Name: At_Germinating_Seeds_cDNA_P Parameter: Tissue Value: Germinating Seeds
  misc_feature: MA Experiment ID: 108463 Result: Down-regulated in Transcription
  misc_feature: MA Experiment 108463 PARAMETER Experiment Name: At_Germinating_Seeds_cDNA_P Parameter: Age (day) Value: 3 vs. 0
  misc_feature: MA Experiment 108463 PARAMETER Experiment Name: At_Germinating_Seeds_cDNA_P Parameter: Tissue Value: Germinating Seeds
  misc_feature: MA Experiment ID: 108464 Result: Down-regulated in Transcription
  misc_feature: MA Experiment 108464 PARAMETER Experiment Name: At_Germinating_Seeds_cDNA_P Parameter: Age (day) Value: 4 vs. 0
  misc_feature: MA Experiment 108464 PARAMETER Experiment Name: At_Germinating_Seeds_cDNA_P Parameter: Tissue Value: Germinating Seeds
  misc_feature: MA Experiment ID: 108576 Result: Up-regulated in Transcription
  misc_feature: MA Experiment 108576 PARAMETER Experiment Name: At_42deg_Heat_cDNA_P Parameter: Temperature (deg C) Value: 42 vs. 22
  misc_feature: MA Experiment 108576 PARAMETER Experiment Name: At_42deg_Heat_cDNA_P Parameter: Timepoint (hr) Value: 1
  misc_feature: MA Experiment 108576 PARAMETER Experiment Name: At_42deg_Heat_cDNA_P Parameter: Tissue Value: Aerial
  misc_feature: MA Experiment ID: 108577 Result: Up-regulated in Transcription
  misc_feature: MA Experiment 108577 PARAMETER Experiment Name: At_42deg_Heat_cDNA_P Parameter: Temperature (deg C) Value: 42 vs. 22
  misc_feature: MA Experiment 108577 PARAMETER Experiment Name: At_42deg_Heat_cDNA_P Parameter: Timepoint (hr) Value: 6
  misc_feature: MA Experiment 108577 PARAMETER Experiment Name: At_42deg_Heat_cDNA_P Parameter: Tissue Value: Aerial
  misc_feature: MA Experiment ID: 20000112 Result: Up-regulated in Transcription
  misc_feature: MA Experiment 20000112 PARAMETER Experiment Name: At_42deg_Heat_cDNA_P Parameter: Temperature (deg C) Value: 42 vs. 22
  misc_feature: MA Experiment 20000112 PARAMETER Experiment Name: At_42deg_Heat_cDNA_P Parameter: Timepoint (hr) Value: 2
  misc_feature: MA Experiment 20000112 PARAMETER Experiment Name: At_42deg_Heat_cDNA_P Parameter: Tissue Value: Aerial
acactcgtcttaccaaactctctcctacacaaccaaaaccatctctttgcaacaaaacttgttgtaactcatcttcttcttcttcttctccatcacagactcataacaaatgggagaagtttcagtggtggagaacaagaaagtgatactaaagaattatgtagatggtattcctacagaaacagacatggaagtgaaactcggagaaacaattgagctaaaagcaccaaaaggatcttcttgtttcctcgtcaaaaatctatacttgtcttgtgatccttacatgagaggtcgtatgcgtgattttcacggttcctatctcccgccttttgttcctggccaacgtatcgaagggtttggtttagcaagagtgatagattctgatgatactaattataagcccggcgatatagtctctggtatcattggttgggaagaatacagtttgctacgtagttcagataacctacagttgagaaatattcaattagacgacgacattccgctttcttatcatctcggacttctcgggatggctggatttacagcatatgcagggtttaatgagatatgttgtcctaagaaaggggacagtgtttttgtctctgcagcatgtggagcagttggacaacttgttggtcagctagctaagttgcacggctgctatgttgttggtagcgccggtagtaagcaaaaggttgagatccttaaaaacgagcttggatatgatgaagcctttaactacaaggaagaggctgatcttgatactgctttgaagaggtacttcccagaggggatcgatatctacttcgataacgtgggtggatccatgcttgatgcagcactcctcaacatgaaggttcgtggaagaatcgcgctctgtggaatggtgtctttacaaagcctctcaacttcatcacaaggaatcaagaacctatacagcgctatctacaaacgtttaaggctagaagggttcttgcagagtgattaccttcatatcttcccacagtttcttgaaaatgtcaagagatattacaaagaaggcaagattgtctacatcgaagatatatctgaaggcctcgaccatcgctcccgctgcacttgttgggctgttttccgggaaaaatatcggtaaacaggttgttcgggttgctaaagagtgattgtttctaaaaagtatattgtaagtgacttaaaacagacattatatgaaataaagccgccataagtctcttatggaaaaacgttagttaatc

SEQ ID NO: 20924 - protein, 341 aa, Arabidopsis thaliana
  peptide (1)..(341): Ceres Seq. ID no. 13486720
  misc_feature (81)..(325): Pfam Name: Zinc-binding dehydrogenase Pfam Description: Zinc-binding dehydrogenase
  misc_feature (9)..(325): Homolog of NCBI NO: 21554121 NR Description: quinone oxidoreductase-like protein [Arabidopsis
  misc_feature (5)..(326): Homolog of NCBI NO: 18411352 NR Description: NADP-dependent oxidoreductase, putative
  misc_feature (9)..(325): Homolog of NCBI NO: 15237890 NR Description: allyl alcohol dehydrogenase, putative
  misc_feature (9)..(325): Homolog of NCBI NO: 15237888 NR Description: NADP-dependent oxidoreductase (P1), putative
  misc_feature (5)..(326): Homolog of NCBI NO: 15228456 NR Description: NADP-dependent oxidoreductase (P2), putative
  misc_feature (1)..(326): Homolog of NCBI NO: 34907532 NR Description: putative allyl alcohol dehydrogenase
  misc_feature (7)..(325): Homolog of NCBI NO: 6692816 NR Description: allyl alcohol dehydrogenase [Nicotiana tabacum]
  misc_feature (1)..(79): Homolog of NCBI NO: 25404554 NR Description: hypothetical protein F5I14.9 [imported] -
  misc_feature (78)..(325): Homolog of NCBI NO: 25404554 NR Description: hypothetical protein F5I14.9 [imported] -
  misc_feature (1)..(325): Homolog of NCBI NO: 15218717 NR Description: allyl alcohol dehydrogenase, putative
MGEVSVVENKKVILKNYVDGIPTETDMEVKLGETIELKAPKGSSCFLVKNLYLSCDPYMRGRMRDFHGSYLPPFVPGQRIEGFGLARVIDSDDTNYKPGDIVSGIIGWEEYSLLRSSDNLQLRNIQLDDDIPLSYHLGLLGMAGFTAYAGFNEICCPKKGDSVFVSAACGAVGQLVGQLAKLHGCYVVGSAGSKQKVEILKNELGYDEAFNYKEEADLDTALKRYFPEGIDIYFDNVGGSMLDAALLNMKVRGRIALCGMVSLQSLSTSSQGIKNLYSAIYKRLRLEGFLQSDYLHIFPQFLENVKRYYKEGKIVYIEDISEGLDHRSRCTCWAVFREKYR

SEQ ID NO: 20925 - protein, 315 aa, Arabidopsis thaliana
  peptide (1)..(315): Ceres Seq. ID no. 13486721
  misc_feature (55)..(299): Pfam Name: Zinc-binding dehydrogenase Pfam Description: Zinc-binding dehydrogenase
  misc_feature (1)..(299): Homolog of NCBI NO: 21554121 NR Description: quinone oxidoreductase-like protein [Arabidopsis
  misc_feature (1)..(300): Homolog of NCBI NO: 18411352 NR Description: NADP-dependent oxidoreductase, putative
  misc_feature (1)..(299): Homolog of NCBI NO: 15237890 NR Description: allyl alcohol dehydrogenase, putative
  misc_feature (1)..(299): Homolog of NCBI NO: 15237888 NR Description: NADP-dependent oxidoreductase (P1), putative
  misc_feature (1)..(300): Homolog of NCBI NO: 15228456 NR Description: NADP-dependent oxidoreductase (P2), putative
  misc_feature (1)..(300): Homolog of NCBI NO: 34907532 NR Description: putative allyl alcohol dehydrogenase
  misc_feature (1)..(299): Homolog of NCBI NO: 6692816 NR Description: allyl alcohol dehydrogenase [Nicotiana tabacum]
  misc_feature (1)..(53): Homolog of NCBI NO: 25404554 NR Description: hypothetical protein F5I14.9 [imported] -
  misc_feature (52)..(299): Homolog of NCBI NO: 25404554 NR Description: hypothetical protein F5I14.9 [imported] -
  misc_feature (1)..(299): Homolog of NCBI NO: 15218717 NR Description: allyl alcohol dehydrogenase, putative
MEVKLGETIELKAPKGSSCFLVKNLYLSCDPYMRGRMRDFHGSYLPPFVPGQRIEGFGLARVIDSDDTNYKPGDIVSGIIGWEEYSLLRSSDNLQLRNIQLDDDIPLSYHLGLLGMAGFTAYAGFNEICCPKKGDSVFVSAACGAVGQLVGQLAKLHGCYVVGSAGSKQKVEILKNELGYDEAFNYKEEADLDTALKRYFPEGIDIYFDNVGGSMLDAALLNMKVRGRIALCGMVSLQSLSTSSQGIKNLYSAIYKRLRLEGFLQSDYLHIFPQFLENVKRYYKEGKIVYIEDISEGLDHRSRCTCWAVFREKYR

SEQ ID NO: 20926 - protein, 283 aa, Arabidopsis thaliana
  peptide (1)..(283): Ceres Seq. ID no. 13486722
  misc_feature (23)..(267): Pfam Name: Zinc-binding dehydrogenase Pfam Description: Zinc-binding dehydrogenase
  misc_feature (1)..(267): Homolog of NCBI NO: 15218717 NR Description: allyl alcohol dehydrogenase, putative
  misc_feature (1)..(267): Homolog of NCBI NO: 21554121 NR Description: quinone oxidoreductase-like protein [Arabidopsis
  misc_feature (1)..(268): Homolog of NCBI NO: 18411352 NR Description: NADP-dependent oxidoreductase, putative
  misc_feature (1)..(267): Homolog of NCBI NO: 15237890 NR Description: allyl alcohol dehydrogenase, putative
  misc_feature (1)..(267): Homolog of NCBI NO: 15237888 NR Description: NADP-dependent oxidoreductase (P1), putative
  misc_feature (1)..(268): Homolog of NCBI NO: 15228456 NR Description: NADP-dependent oxidoreductase (P2), putative
  misc_feature (1)..(268): Homolog of NCBI NO: 34907532 NR Description: putative allyl alcohol dehydrogenase
  misc_feature (1)..(267): Homolog of NCBI NO: 6692816 NR Description: allyl alcohol dehydrogenase [Nicotiana tabacum]
  misc_feature (1)..(21): Homolog of NCBI NO: 25404554 NR Description: hypothetical protein F5I14.9 [imported] -
  misc_feature (20)..(267): Homolog of NCBI NO: 25404554 NR Description: hypothetical protein F5I14.9 [imported] -
MRGRMRDFHGSYLPPFVPGQRIEGFGLARVIDSDDTNYKPGDIVSGIIGWEEYSLLRSSDNLQLRNIQLDDDIPLSYHLGLLGMAGFTAYAGFNEICCPKKGDSVFVSAACGAVGQLVGQLAKLHGCYVVGSAGSKQKVEILKNELGYDEAFNYKEEADLDTALKRYFPEGIDIYFDNVGGSMLDAALLNMKVRGRIALCGMVSLQSLSTSSQGIKNLYSAIYKRLRLEGFLQSDYLHIFPQFLENVKRYYKEGKIVYIEDISEGLDHRSRCTCWAVFREKYR

SEQ ID NO: 20927 - DNA, 1067 bp, Arabidopsis thaliana
  misc_feature (1)..(1067): Ceres Seq. ID no. 12340120
  misc_feature: MA Experiment ID: 108434 Result: Up-regulated in Transcription
  misc_feature: MA Experiment 108434 PARAMETER Experiment Name: At_Root_Tips_cDNA_P Parameter: Tissue Value: Root Tips
  misc_feature: MA Experiment ID: 108461 Result: Up-regulated in Transcription
  misc_feature: MA Experiment 108461 PARAMETER Experiment Name: At_Germinating_Seeds_cDNA_P Parameter: Age (day) Value: 1 vs. 0
  misc_feature: MA Experiment 108461 PARAMETER Experiment Name: At_Germinating_Seeds_cDNA_P Parameter: Tissue Value: Germinating Seeds
  misc_feature: MA Experiment ID: 20000180 Result: Up-regulated in Transcription
  misc_feature: MA Experiment 20000180 PARAMETER Experiment Name: At_Germinating_Seeds_P Parameter: Age (hr) Value: 24 vs. 0
  misc_feature: MA Experiment 20000180 PARAMETER Experiment Name: At_Germinating_Seeds_P Parameter: Tissue Value: Germinating Seeds
  misc_feature: MA Experiment ID: 20000185 Result: Up-regulated in Transcription
  misc_feature: MA Experiment 20000185 PARAMETER Experiment Name: At_Roots__P Parameter: Age (day) Value: 7 vs. 21
  misc_feature: MA Experiment 20000185 PARAMETER Experiment Name: At_Roots__P Parameter: Organism Value: A. thaliana
  misc_feature: MA Experiment 20000185 PARAMETER Experiment Name: At_Roots__P Parameter: Tissue Value: Roots vs. Whole Plant
  misc_feature: MA Experiment ID: 20000234 Result: Up-regulated in Transcription
  misc_feature: MA Experiment 20000234 PARAMETER Experiment Name: At_Siliques_P Parameter: Age (day) Value: 21
  misc_feature: MA Experiment 20000234 PARAMETER Experiment Name: At_Siliques_P Parameter: Organism Value: A. thaliana
  misc_feature: MA Experiment 20000234 PARAMETER Experiment Name: At_Siliques_P Parameter: Plant Line Value: WS
  misc_feature: MA Experiment 20000234 PARAMETER Experiment Name: At_Siliques_P Parameter: Tissue Value: Less Than 5mm Siliques vs. Whole Plant
  misc_feature: MA Experiment ID: 20000286 Result: Up-regulated in Transcription
  misc_feature: MA Experiment 20000286 PARAMETER Experiment Name: At_Open_Flower_P Parameter: Age (day) Value: 21
  misc_feature: MA Experiment 20000286 PARAMETER Experiment Name: At_Open_Flower_P Parameter: Plant Line Value: WS
  misc_feature: MA Experiment 20000286 PARAMETER Experiment Name: At_Open_Flower_P Parameter: Tissue Value: Half Open vs. Whole Plant
  misc_feature: MA Experiment ID: 20000439 Result: Up-regulated in Transcription
  misc_feature: MA Experiment 20000439 PARAMETER Experiment Name: At_Roots__P Parameter: Age (day) Value: 14 vs. 21
  misc_feature: MA Experiment 20000439 PARAMETER Experiment Name: At_Roots__P Parameter: Organism Value: A. thaliana
  misc_feature: MA Experiment 20000439 PARAMETER Experiment Name: At_Roots__P Parameter: Tissue Value: Roots vs. Whole Plant
  misc_feature: MA Experiment ID: 20000794 Result: Down-regulated in Transcription
  misc_feature: MA Experiment 20000794 PARAMETER Experiment Name: At_Petals_P Parameter: Age (day) Value: 23-25 days
  misc_feature: MA Experiment 20000794 PARAMETER Experiment Name: At_Petals_P Parameter: Plant Line Value: WS
  misc_feature: MA Experiment 20000794 PARAMETER Experiment Name: At_Petals_P Parameter: Tissue Value: Petals vs. Whole plant
  misc_feature: MA Experiment ID: 20001451 Result: Down-regulated in Transcription
  misc_feature: MA Experiment 20001451 PARAMETER Experiment Name: At_Far-red-induction_P Parameter: Age (day) Value: 7
  misc_feature: MA Experiment 20001451 PARAMETER Experiment Name: At_Far-red-induction_P Parameter: Light Value: Far-red vs. White
  misc_feature: MA Experiment 20001451 PARAMETER Experiment Name: At_Far-red-induction_P Parameter: Organism Value: A. thaliana
  misc_feature: MA Experiment 20001451 PARAMETER Experiment Name: At_Far-red-induction_P Parameter: Plant Line Value: Columbia
  misc_feature: MA Experiment 20001451 PARAMETER Experiment Name: At_Far-red-induction_P Parameter: Timepoint (hr) Value: 24
  misc_feature: MA Experiment 20001451 PARAMETER Experiment Name: At_Far-red-induction_P Parameter: Tissue Value: Whole Plant
caaaaaatcgagagagacactgttctcattcattcgcaaattcgttgaccatatttgatagaatcaagcgatgatgaatcttagggttttgttcctcgctctccttctccttgcatctcctctgcttcaagttgctagatgtcaatcggatgccgaggatcattcaagtcttgttgacgatgttgtgggagaaaacactgatgatgcggttgaggaagatgaccatgatttggatatgaacttgtcctcatttccaggagttgagactgtttgtgttttccccaaaaacagtgccaaattggttccagctggagaagagactgagctccttgttggtcttaaaaatgaagggaaaactagagtaggtgtgatgggaattagggccagcgttcatcttccttatgatcataagttgttggttcagaatctaaccatgttgagacttaacaatgcatccatcccaacgtctcttcaagcaacattcccatacatctttgcagtcagccagtacttgcagcctggagcatttgatctggtgggttatatcatatacgatgtggaaggaaagccataccagagtgtcttctacaatggaaccatagaggtagttgaatctggaggtcttctcagcggcgaatctgttttccttttaacactcggaatcggtctcctcctcctcctcggtctatgggcatacagccaagttcagcgtctcaccaagaaaaccaaaaaggtttccaaggtggaagtaggaactaggtctaccgaggcatcactcgatgaatggctcgagggaactactttggccaagacatcgtctgggaaaacaaagaacaagaagaactaaagtagagctgttttgctccttccagttgttatagactcagcttcggcgttttgaaagagtttccaagtttaaagttcagtcttgaggaaatttagggttttaaacgacactttttttgttccagcattgtactctttagacaatctttacttcttgtcataaatattctcctcatgaaacaagttaacttataaatggtttagatctgtttttcgttgcg

SEQ ID NO: 20928 - protein, 258 aa, Arabidopsis thaliana
  peptide (1)..(258): Ceres Seq. ID no. 12340121
  misc_feature (10)..(258): Homolog of NCBI NO: 12846635 NR Description: unnamed protein product [Mus musculus]
  misc_feature (1)..(258): Homolog of NCBI NO: 4507237 NR Description: signal sequence receptor, alpha; TRAP alpha [Homo
  misc_feature (4)..(258): Homolog of NCBI NO: 34783867 NR Description: Unknown (protein for MGC:64448) [Xenopus laevis]
  misc_feature (10)..(258): Homolog of NCBI NO: 31982666 NR Description: signal sequence receptor, alpha
  misc_feature (10)..(258): Homolog of NCBI NO: 34875232 NR Description: similar to Ac2-238 [Rattus norvegicus]
  misc_feature (126)..(257): Homolog of NCBI NO: 15227250 NR Description: putative TRAP protein; protein id: At2g16595.1
  misc_feature (6)..(258): Homolog of NCBI NO: 547391 NR Description: alpha-subunit; putative
  misc_feature (2)..(258): Homolog of NCBI NO: 25335776 NR Description: hypothetical protein At2g21160 [imported] -
  misc_feature (1)..(258): Homolog of NCBI NO: 21555380 NR Description: putative signal sequence receptor, alpha subunit
  misc_feature (1)..(258): Homolog of NCBI NO: 18399609 NR Description: putative signal sequence receptor, alpha subunit
MMNLRVLFLALLLLASPLLQVARCQSDAEDHSSLVDDVVGENTDDAVEEDDHDLDMNLSSFPGVETVCVFPKNSAKLVPAGEETELLVGLKNEGKTRVGVMGIRASVHLPYDHKLLVQNLTMLRLNNASIPTSLQATFPYIFAVSQYLQPGAFDLVGYIIYDVEGKPYQSVFYNGTIEVVESGGLLSGESVFLLTLGIGLLLLLGLWAYSQVQRLTKKTKKVSKVEVGTRSTEASLDEWLEGTTLAKTSSGKTKNKKN

SEQ ID NO: 20929 - protein, 257 aa, Arabidopsis thaliana
  peptide (1)..(257): Ceres Seq. ID no. 12340122
  misc_feature (9)..(257): Homolog of NCBI NO: 12846635 NR Description: unnamed protein product [Mus musculus]
  misc_feature (1)..(257): Homolog of NCBI NO: 4507237 NR Description: signal sequence receptor, alpha; TRAP alpha [Homo
  misc_feature (3)..(257): Homolog of NCBI NO: 34783867 NR Description: Unknown (protein for MGC:64448) [Xenopus laevis]
  misc_feature (9)..(257): Homolog of NCBI NO: 31982666 NR Description: signal sequence receptor, alpha
  misc_feature (9)..(257): Homolog of NCBI NO: 34875232 NR Description: similar to Ac2-238 [Rattus norvegicus]
  misc_feature (125)..(256): Homolog of NCBI NO: 15227250 NR Description: putative TRAP protein; protein id: At2g16595.1
  misc_feature (5)..(257): Homolog of NCBI NO: 547391 NR Description: alpha-subunit; putative
  misc_feature (1)..(257): Homolog of NCBI NO: 25335776 NR Description: hypothetical protein At2g21160 [imported] -
  misc_feature (1)..(257): Homolog of NCBI NO: 21555380 NR Description: putative signal sequence receptor, alpha subunit
  misc_feature (1)..(257): Homolog of NCBI NO: 18399609 NR Description: putative signal sequence receptor, alpha subunit
MNLRVLFLALLLLASPLLQVARCQSDAEDHSSLVDDVVGENTDDAVEEDDHDLDMNLSSFPGVETVCVFPKNSAKLVPAGEETELLVGLKNEGKTRVGVMGIRASVHLPYDHKLLVQNLTMLRLNNASIPTSLQATFPYIFAVSQYLQPGAFDLVGYIIYDVEGKPYQSVFYNGTIEVVESGGLLSGESVFLLTLGIGLLLLLGLWAYSQVQRLTKKTKKVSKVEVGTRSTEASLDEWLEGTTLAKTSSGKTKNKKN

SEQ ID NO: 20930 - protein, 203 aa, Arabidopsis thaliana
  peptide (1)..(203): Ceres Seq. ID no. 12340123
  misc_feature (1)..(203): Homolog of NCBI NO: 12846635 NR Description: unnamed protein product [Mus musculus]
  misc_feature (1)..(203): Homolog of NCBI NO: 4507237 NR Description: signal sequence receptor, alpha; TRAP alpha [Homo
  misc_feature (1)..(203): Homolog of NCBI NO: 34783867 NR Description: Unknown (protein for MGC:64448) [Xenopus laevis]
  misc_feature (1)..(203): Homolog of NCBI NO: 31982666 NR Description: signal sequence receptor, alpha
  misc_feature (1)..(203): Homolog of NCBI NO: 34875232 NR Description: similar to Ac2-238 [Rattus norvegicus]
  misc_feature (71)..(202): Homolog of NCBI NO: 15227250 NR Description: putative TRAP protein; protein id: At2g16595.1
  misc_feature (1)..(203): Homolog of NCBI NO: 547391 NR Description: alpha-subunit; putative
  misc_feature (1)..(203): Homolog of NCBI NO: 25335776 NR Description: hypothetical protein At2g21160 [imported] -
  misc_feature (1)..(203): Homolog of NCBI NO: 21555380 NR Description: putative signal sequence receptor, alpha subunit
  misc_feature (1)..(203): Homolog of NCBI NO: 18399609 NR Description: putative signal sequence receptor, alpha subunit
MNLSSFPGVETVCVFPKNSAKLVPAGEETELLVGLKNEGKTRVGVMGIRASVHLPYDHKLLVQNLTMLRLNNASIPTSLQATFPYIFAVSQYLQPGAFDLVGYIIYDVEGKPYQSVFYNGTIEVVESGGLLSGESVFLLTLGIGLLLLLGLWAYSQVQRLTKKTKKVSKVEVGTRSTEASLDEWLEGTTLAKTSSGKTKNKKN

SEQ ID NO: 20931 - DNA, 1206 bp, Arabidopsis thaliana
  misc_feature (1)..(1206): Ceres Seq. ID no. 13492134
  misc_feature: MA Experiment ID: 108461 Result: Down-regulated in Transcription
  misc_feature: MA Experiment 108461 PARAMETER Experiment Name: At_Germinating_Seeds_cDNA_P Parameter: Age (day) Value: 1 vs. 0
  misc_feature: MA Experiment 108461 PARAMETER Experiment Name: At_Germinating_Seeds_cDNA_P Parameter: Tissue Value: Germinating Seeds
  misc_feature: MA Experiment ID: 20000111 Result: Down-regulated in Transcription
  misc_feature: MA Experiment 20000111 PARAMETER Experiment Name: At_42deg_Heat_cDNA_P Parameter: Temperature (deg C) Value: 42 vs. 22
  misc_feature: MA Experiment 20000111 PARAMETER Experiment Name: At_42deg_Heat_cDNA_P Parameter: Timepoint (hr) Value: 6
  misc_feature: MA Experiment 20000111 PARAMETER Experiment Name: At_42deg_Heat_cDNA_P Parameter: Tissue Value: Aerial
  misc_feature: MA Experiment ID: 20000144 Result: Down-regulated in Transcription
  misc_feature: MA Experiment 20000144 PARAMETER Experiment Name: At_42deg_Heat_cDNA_P Parameter: Temperature (deg C) Value: 42 vs. 22
  misc_feature: MA Experiment 20000144 PARAMETER Experiment Name: At_42deg_Heat_cDNA_P Parameter: Timepoint (hr) Value: 1
  misc_feature: MA Experiment 20000144 PARAMETER Experiment Name: At_42deg_Heat_cDNA_P Parameter: Tissue Value: Aerial
  misc_feature: MA Experiment ID: 20001248 Result: Up-regulated in Transcription
  misc_feature: MA Experiment 20001248 PARAMETER Experiment Name: At_Far-red-induction_P Parameter: Age (day) Value: 7
  misc_feature: MA Experiment 20001248 PARAMETER Experiment Name: At_Far-red-induction_P Parameter: Light Value: Far-red vs. White
  misc_feature: MA Experiment 20001248 PARAMETER Experiment Name: At_Far-red-induction_P Parameter: Organism Value: A. thaliana
  misc_feature: MA Experiment 20001248 PARAMETER Experiment Name: At_Far-red-induction_P Parameter: Plant Line Value: Columbia
  misc_feature: MA Experiment 20001248 PARAMETER Experiment Name: At_Far-red-induction_P Parameter: Timepoint (hr) Value: 4
  misc_feature: MA Experiment 20001248 PARAMETER Experiment Name: At_Far-red-induction_P Parameter: Tissue Value: Whole Plant
  misc_feature: MA Experiment ID: 20001450 Result: Up-regulated in Transcription
  misc_feature: MA Experiment 20001450 PARAMETER Experiment Name: At_Far-red-induction_P Parameter: Age (day) Value: 7
  misc_feature: MA Experiment 20001450 PARAMETER Experiment Name: At_Far-red-induction_P Parameter: Light Value: Far-red vs. White
  misc_feature: MA Experiment 20001450 PARAMETER Experiment Name: At_Far-red-induction_P Parameter: Organism Value: A. thaliana
  misc_feature: MA Experiment 20001450 PARAMETER Experiment Name: At_Far-red-induction_P Parameter: Plant Line Value: Columbia
  misc_feature: MA Experiment 20001450 PARAMETER Experiment Name: At_Far-red-induction_P Parameter: Timepoint (hr) Value: 8
  misc_feature: MA Experiment 20001450 PARAMETER Experiment Name: At_Far-red-induction_P Parameter: Tissue Value: Whole Plant
aaataaaacaataaacagtcgaaattctccggcgaagatgagaaccggaaaaggaaatcaagaggaagaagattacggagaagaagactttaactctaaacgtgaaggtccttcttccaacactactgttcatagcaacagagattcaaaggaaaatgataaagctagtgcgatacgttctaaacattcggtcactgagcaacgtagaagaagcaaaatcaatgaaagatttcagatattgagagaactaattcccaacagtgaacaaaaacgtgacactgcttcattccttttagaggtgatagattatgttcagtatttacaagagaaggtgcaaaagtatgaaggatcgtatccaggttggagtcaggaaccaacaaagttgacgccatggaggaataatcattggcgagttcaaagtttggggaaccacccagtagctataaataatggatctggtccagggataccttttcctggaaagtttgaagacaacactgtgacttcgacacctgcaattattgcagaaccgcaaatcccgattgaatctgacaaagcaagagctataaccggcatatcgattgaaagtcaacctgagttagacgacaaaggattaccaccactacaaccaattcttccaatggtacaaggcgaacaagctaatgaatgtcctgcaactagtgatgggctaggccaaagtaatgacctggttattgaaggtggaaccattagcatctctagtgcctactcgcatgagttattgagctcattaacacaagcactccagaatgcaggcattgatctgtcgcaagcaaagctttctgtgcagatcgatcttgggaagcgagccaatcaaggtctaactcatgaagagccatcaagtaagaatccattatcatatgatacgcaaggaagggattcaagcgttgaggaagaatctgaacattctcacaagcggatgaaaacactgtgacatttctctctcaggctccacggcgctggaatatataaatgtattgacagattccttgtatcgtgtacattgttcggcttctaggggttcctatagtactcgttaagataaactttggttagtagattctgcgtttttttgtggttctgagtttgtatcatcttctgcatcattcatgtaacctatcaaatatgatctcttgtggtttcaagttattgcatcatttttttccg

SEQ ID NO: 20932 - protein, 323 aa, Arabidopsis thaliana
  peptide (1)..(323): Ceres Seq. ID no. 13492135
  misc_feature (58)..(108): Pfam Name: Helix-loop-helix DNA-binding domain Pfam Description: Helix-loop-helix DNA-binding domain
  misc_feature (61)..(170): Homolog of NCBI NO: 527653 NR Description: myc-like regulatory R gene product
  misc_feature (61)..(182): Homolog of NCBI NO: 527655 NR Description: myc-like regulatory R gene product
  misc_feature (253)..(321): Homolog of NCBI NO: 15241563 NR Description: bHLH protein family [Arabidopsis thaliana]
  misc_feature (43)..(200): Homolog of NCBI NO: 15241563 NR Description: bHLH protein family [Arabidopsis thaliana]
  misc_feature (43)..(321): Homolog of NCBI NO: 9758063 NR Description: DNA-binding protein-like [Arabidopsis thaliana]
  misc_feature (4)..(322): Homolog of NCBI NO: 11358566 NR Description: myc-like protein - Arabidopsis thaliana
  misc_feature (4)..(322): Homolog of NCBI NO: 30682248 NR Description: bHLH protein family [Arabidopsis thaliana]
  misc_feature (105)..(323): Homolog of NCBI NO: 19310568 NR Description: putative DNA-binding protein [Arabidopsis
  misc_feature (13)..(323): Homolog of NCBI NO: 21555388 NR Description: putative DNA-binding protein [Arabidopsis
  misc_feature (13)..(323): Homolog of NCBI NO: 15221582 NR Description: bHLH protein family [Arabidopsis thaliana]
NKTINSRNSPAKMRTGKGNQEEEDYGEEDFNSKREGPSSNTTVHSNRDSKENDKASAIRSKHSVTEQRRRSKINERFQILRELIPNSEQKRDTASFLLEVIDYVQYLQEKVQKYEGSYPGWSQEPTKLTPWRNNHWRVQSLGNHPVAINNGSGPGIPFPGKFEDNTVTSTPAIIAEPQIPIESDKARAITGISIESQPELDDKGLPPLQPILPMVQGEQANECPATSDGLGQSNDLVIEGGTISISSAYSHELLSSLTQALQNAGIDLSQAKLSVQIDLGKRANQGLTHEEPSSKNPLSYDTQGRDSSVEEESEHSHKRMKTL

SEQ ID NO: 20933 - protein, 311 aa, Arabidopsis thaliana
  peptide (1)..(311): Ceres Seq. ID no. 13492136
  misc_feature (46)..(96): Pfam Name: Helix-loop-helix DNA-binding domain Pfam Description: Helix-loop-helix DNA-binding domain
  misc_feature (49)..(158): Homolog of NCBI NO: 527653 NR Description: myc-like regulatory R gene product
  misc_feature (49)..(170): Homolog of NCBI NO: 527655 NR Description: myc-like regulatory R gene product
  misc_feature (241)..(309): Homolog of NCBI NO: 15241563 NR Description: bHLH protein family [Arabidopsis thaliana]
  misc_feature (31)..(188): Homolog of NCBI NO: 15241563 NR Description: bHLH protein family [Arabidopsis thaliana]
  misc_feature (31)..(309): Homolog of NCBI NO: 9758063 NR Description: DNA-binding protein-like [Arabidopsis thaliana]
  misc_feature (1)..(310): Homolog of NCBI NO: 11358566 NR Description: myc-like protein - Arabidopsis thaliana
  misc_feature (1)..(310): Homolog of NCBI NO: 30682248 NR Description: bHLH protein family [Arabidopsis thaliana]
  misc_feature (93)..(311): Homolog of NCBI NO: 19310568 NR Description: putative DNA-binding protein [Arabidopsis
  misc_feature (1)..(311): Homolog of NCBI NO: 21555388 NR Description: putative DNA-binding protein [Arabidopsis
  misc_feature (1)..(311): Homolog of NCBI NO: 15221582 NR Description: bHLH protein family [Arabidopsis thaliana]
MRTGKGNQEEEDYGEEDFNSKREGPSSNTTVHSNRDSKENDKASAIRSKHSVTEQRRRSKINERFQILRELIPNSEQKRDTASFLLEVIDYVQYLQEKVQKYEGSYPGWSQEPTKLTPWRNNHWRVQSLGNHPVAINNGSGPGIPFPGKFEDNTVTSTPAIIAEPQIPIESDKARAITGISIESQPELDDKGLPPLQPILPMVQGEQANECPATSDGLGQSNDLVIEGGTISISSAYSHELLSSLTQALQNAGIDLSQAKLSVQIDLGKRANQGLTHEEPSSKNPLSYDTQGRDSSVEEESEHSHKRMKTL

SEQ ID NO: 20934 - DNA, 1188 bp, Arabidopsis thaliana
  misc_feature (1)..(1188): Ceres Seq. ID no. 12370501
  misc_feature: MA Experiment ID: 108434 Result: Up-regulated in Transcription
  misc_feature: MA Experiment 108434 PARAMETER Experiment Name: At_Root_Tips_cDNA_P Parameter: Tissue Value: Root Tips
  misc_feature: MA Experiment ID: 108461 Result: Up-regulated in Transcription
  misc_feature: MA Experiment 108461 PARAMETER Experiment Name: At_Germinating_Seeds_cDNA_P Parameter: Age (day) Value: 1 vs. 0
  misc_feature: MA Experiment 108461 PARAMETER Experiment Name: At_Germinating_Seeds_cDNA_P Parameter: Tissue Value: Germinating Seeds
  misc_feature: MA Experiment ID: 108462 Result: Up-regulated in Transcription
  misc_feature: MA Experiment 108462 PARAMETER Experiment Name: At_Germinating_Seeds_cDNA_P Parameter: Age (day) Value: 2 vs. 0
  misc_feature: MA Experiment 108462 PARAMETER Experiment Name: At_Germinating_Seeds_cDNA_P Parameter: Tissue Value: Germinating Seeds
  misc_feature: MA Experiment ID: 108464 Result: Up-regulated in Transcription
  misc_feature: MA Experiment 108464 PARAMETER Experiment Name: At_Germinating_Seeds_cDNA_P Parameter: Age (day) Value: 4 vs. 0
  misc_feature: MA Experiment 108464 PARAMETER Experiment Name: At_Germinating_Seeds_cDNA_P Parameter: Tissue Value: Germinating Seeds
  misc_feature: MA Experiment ID: 20000173 Result: Up-regulated in Transcription
  misc_feature: MA Experiment 20000173 PARAMETER Experiment Name: At_42deg_Heat_P Parameter: Age (day) Value: 14
  misc_feature: MA Experiment 20000173 PARAMETER Experiment Name: At_42deg_Heat_P Parameter: Organism Value: A. thaliana
  misc_feature: MA Experiment 20000173 PARAMETER Experiment Name: At_42deg_Heat_P Parameter: Plant Line Value: WS
  misc_feature: MA Experiment 20000173 PARAMETER Experiment Name: At_42deg_Heat_P Parameter: Temperature (deg C) Value: 42 vs. 22
  misc_feature: MA Experiment 20000173 PARAMETER Experiment Name: At_42deg_Heat_P Parameter: Timepoint (hr) Value: 6
  misc_feature: MA Experiment 20000173 PARAMETER Experiment Name: At_42deg_Heat_P Parameter: Tissue Value: Aerial
  misc_feature: MA Experiment ID: 20000180 Result: Up-regulated in Transcription
  misc_feature: MA Experiment 20000180 PARAMETER Experiment Name: At_Germinating_Seeds_P Parameter: Age (hr) Value: 24 vs. 0
  misc_feature: MA Experiment 20000180 PARAMETER Experiment Name: At_Germinating_Seeds_P Parameter: Tissue Value: Germinating Seeds
  misc_feature: MA Experiment ID: 20000224 Result: Up-regulated in Transcription
  misc_feature: MA Experiment ID: 20000234 Result: Up-regulated in Transcription
  misc_feature: MA Experiment 20000234 PARAMETER Experiment Name: At_Siliques_P Parameter: Age (day) Value: 21
  misc_feature: MA Experiment 20000234 PARAMETER Experiment Name: At_Siliques_P Parameter: Organism Value: A. thaliana
  misc_feature: MA Experiment 20000234 PARAMETER Experiment Name: At_Siliques_P Parameter: Plant Line Value: WS
  misc_feature: MA Experiment 20000234 PARAMETER Experiment Name: At_Siliques_P Parameter: Tissue Value: Less Than 5mm Siliques vs. Whole Plant
  misc_feature: MA Experiment ID: 20000265 Result: Up-regulated in Transcription
  misc_feature: MA Experiment 20000265 PARAMETER Experiment Name: At_Open_Flower_P Parameter: Age (day) Value: 21
  misc_feature: MA Experiment 20000265 PARAMETER Experiment Name: At_Open_Flower_P Parameter: Plant Line Value: WS
  misc_feature: MA Experiment 20000265 PARAMETER Experiment Name: At_Open_Flower_P Parameter: Tissue Value: Closed Flower vs. Whole Plant
  misc_feature: MA Experiment ID: 20000286 Result: Up-regulated in Transcription
  misc_feature: MA Experiment 20000286 PARAMETER Experiment Name: At_Open_Flower_P Parameter: Age (day) Value: 21
  misc_feature: MA Experiment 20000286 PARAMETER Experiment Name: At_Open_Flower_P Parameter: Plant Line Value: WS
  misc_feature: MA Experiment 20000286 PARAMETER Experiment Name: At_Open_Flower_P Parameter: Tissue Value: Half Open vs. Whole Plant
  misc_feature: MA Experiment ID: 20000437 Result: Down-regulated in Transcription
  misc_feature: MA Experiment 20000437 PARAMETER Experiment Name: At_Drought_P Parameter: Age (day) Value: 8
  misc_feature: MA Experiment 20000437 PARAMETER Experiment Name: At_Drought_P Parameter: Organism Value: A. thaliana
  misc_feature: MA Experiment 20000437 PARAMETER Experiment Name: At_Drought_P Parameter: Plant Line Value: WS
  misc_feature: MA Experiment 20000437 PARAMETER Experiment Name: At_Drought_P Parameter: Timepoint (hr) Value: 24
  misc_feature: MA Experiment 20000437 PARAMETER Experiment Name: At_Drought_P Parameter: Tissue Value: Whole Plant
  misc_feature: MA Experiment 20000437 PARAMETER Experiment Name: At_Drought_P Parameter: Treatment Value: Drought vs. No Drought
  misc_feature: MA Experiment ID: 20000495 Result: Up-regulated in Transcription
  misc_feature: MA Experiment 20000495 PARAMETER Experiment Name: At_Guard_Cells_P Parameter: Harvest Date Value: 8/2/2002
  misc_feature: MA Experiment 20000495 PARAMETER Experiment Name: At_Guard_Cells_P Parameter: Organism Value: A. thaliana
  misc_feature: MA Experiment 20000495 PARAMETER Experiment Name: At_Guard_Cells_P Parameter: Tissue Value: Guard Cells vs. Leaves
  misc_feature: MA Experiment ID: 20000794 Result: Down-regulated in Transcription
  misc_feature: MA Experiment 20000794 PARAMETER Experiment Name: At_Petals_P Parameter: Age (day) Value: 23-25 days
  misc_feature: MA Experiment 20000794 PARAMETER Experiment Name: At_Petals_P Parameter: Plant Line Value: WS
  misc_feature: MA Experiment 20000794 PARAMETER Experiment Name: At_Petals_P Parameter: Tissue Value: Petals vs. Whole plant
  misc_feature: MA Experiment ID: 20001555 Result: Down-regulated in Transcription
  misc_feature: MA Experiment 20001555 PARAMETER Experiment Name: At_Drought_Soil_Dry_P Parameter: Age (day) Value: 24
  misc_feature: MA Experiment 20001555 PARAMETER Experiment Name: At_Drought_Soil_Dry_P Parameter: Organism Value: A. thaliana
  misc_feature: MA Experiment 20001555 PARAMETER Experiment Name: At_Drought_Soil_Dry_P Parameter: Plant Line Value: WS
  misc_feature: MA Experiment 20001555 PARAMETER Experiment Name: At_Drought_Soil_Dry_P Parameter: Post Timepoint (hr) Value: None
  misc_feature: MA Experiment 20001555 PARAMETER Experiment Name: At_Drought_Soil_Dry_P Parameter: Post-Treatment Value: None
  misc_feature: MA Experiment 20001555 PARAMETER Experiment Name: At_Drought_Soil_Dry_P Parameter: Timepoint (day) Value: 10
  misc_feature: MA Experiment 20001555 PARAMETER Experiment Name: At_Drought_Soil_Dry_P Parameter: Treatment Value: Drought vs. No Drought
  misc_feature: MA Experiment ID: 20001556 Result: Down-regulated in Transcription
  misc_feature: MA Experiment 20001556 PARAMETER Experiment Name: At_Drought_Soil_Dry_P Parameter: Age (day) Value: 26
  misc_feature: MA Experiment 20001556 PARAMETER Experiment Name: At_Drought_Soil_Dry_P Parameter: Organism Value: A. thaliana
  misc_feature: MA Experiment 20001556 PARAMETER Experiment Name: At_Drought_Soil_Dry_P Parameter: Plant Line Value: WS
  misc_feature: MA Experiment 20001556 PARAMETER Experiment Name: At_Drought_Soil_Dry_P Parameter: Post Timepoint (hr) Value: None
  misc_feature: MA Experiment 20001556 PARAMETER Experiment Name: At_Drought_Soil_Dry_P Parameter: Post-Treatment Value: None
  misc_feature: MA Experiment 20001556 PARAMETER Experiment Name: At_Drought_Soil_Dry_P Parameter: Timepoint (day) Value: 12
  misc_feature: MA Experiment 20001556 PARAMETER Experiment Name: At_Drought_Soil_Dry_P Parameter: Treatment Value: Drought vs. No Drought
  misc_feature: MA Experiment ID: 20001558 Result: Down-regulated in Transcription
  misc_feature: MA Experiment 20001558 PARAMETER Experiment Name: At_Drought_Soil_Dry_P Parameter: Age (day) Value: 27
  misc_feature: MA Experiment 20001558 PARAMETER Experiment Name: At_Drought_Soil_Dry_P Parameter: Organism Value: A. thaliana
  misc_feature: MA Experiment 20001558 PARAMETER Experiment Name: At_Drought_Soil_Dry_P Parameter: Plant Line Value: WS
  misc_feature: MA Experiment 20001558 PARAMETER Experiment Name: At_Drought_Soil_Dry_P Parameter: Post Timepoint (hr) Value: 6
  misc_feature: MA Experiment 20001558 PARAMETER Experiment Name: At_Drought_Soil_Dry_P Parameter: Post-Treatment Value: Re-Water vs. No Drought
  misc_feature: MA Experiment 20001558 PARAMETER Experiment Name: At_Drought_Soil_Dry_P Parameter: Timepoint (day) Value: 13
  misc_feature: MA Experiment 20001558 PARAMETER Experiment Name: At_Drought_Soil_Dry_P Parameter: Treatment Value: Drought vs. No Drought
  misc_feature: MA Experiment ID: 20001560 Result: Up-regulated in Transcription
  misc_feature: MA Experiment 20001560 PARAMETER Experiment Name: At_Drought_Soil_Dry_P Parameter: Age (day) Value: 28
  misc_feature: MA Experiment 20001560 PARAMETER Experiment Name: At_Drought_Soil_Dry_P Parameter: Organism Value: A. thaliana
  misc_feature: MA Experiment 20001560 PARAMETER Experiment Name: At_Drought_Soil_Dry_P Parameter: Plant Line Value: WS
  misc_feature: MA Experiment 20001560 PARAMETER Experiment Name: At_Drought_Soil_Dry_P Parameter: Post Timepoint (hr) Value: None
  misc_feature: MA Experiment 20001560 PARAMETER Experiment Name: At_Drought_Soil_Dry_P Parameter: Post-Treatment Value: None
  misc_feature: MA Experiment 20001560 PARAMETER Experiment Name: At_Drought_Soil_Dry_P Parameter: Timepoint (day) Value: 14
  misc_feature: MA Experiment 20001560 PARAMETER Experiment Name: At_Drought_Soil_Dry_P Parameter: Treatment Value: Drought vs. No Drought
  misc_feature: MA Experiment ID: 20001906 Result: Up-regulated in Transcription
  misc_feature: MA Experiment 20001906 PARAMETER Experiment Name: At_Drought_Reproduction_P Parameter: Age (day) Value: 35
  misc_feature: MA Experiment 20001906 PARAMETER Experiment Name: At_Drought_Reproduction_P Parameter: Organism Value: A. thaliana
  misc_feature: MA Experiment 20001906 PARAMETER Experiment Name: At_Drought_Reproduction_P Parameter: Plant Line Value: WS
  misc_feature: MA Experiment 20001906 PARAMETER Experiment Name: At_Drought_Reproduction_P Parameter: Timepoint (day) Value: 5
  misc_feature: MA Experiment 20001906 PARAMETER Experiment Name: At_Drought_Reproduction_P Parameter: Tissue Value: Siliques
  misc_feature: MA Experiment 20001906 PARAMETER Experiment Name: At_Drought_Reproduction_P Parameter: Treatment Value: Drought vs. No Drought
  misc_feature: MA Experiment ID: 20001908 Result: Up-regulated in Transcription
  misc_feature: MA Experiment 20001908 PARAMETER Experiment Name: At_Drought_Reproduction_P Parameter: Age (day) Value: 40
  misc_feature: MA Experiment 20001908 PARAMETER Experiment Name: At_Drought_Reproduction_P Parameter: Organism Value: A. thaliana
  misc_feature: MA Experiment 20001908 PARAMETER Experiment Name: At_Drought_Reproduction_P Parameter: Plant Line Value: WS
  misc_feature: MA Experiment 20001908 PARAMETER Experiment Name: At_Drought_Reproduction_P Parameter: Timepoint (day) Value: 10
  misc_feature: MA Experiment 20001908 PARAMETER Experiment Name: At_Drought_Reproduction_P Parameter: Tissue Value: Siliques
  misc_feature: MA Experiment 20001908 PARAMETER Experiment Name: At_Drought_Reproduction_P Parameter: Treatment Value: Drought vs. No Drought
  misc_feature: MA Experiment ID: 20001911 Result: Down-regulated in Transcription
  misc_feature: MA Experiment 20001911 PARAMETER Experiment Name: At_Drought_Reproduction_P Parameter: Age (day) Value: 40
  misc_feature: MA Experiment 20001911 PARAMETER Experiment Name: At_Drought_Reproduction_P Parameter: Organism Value: A. thaliana
  misc_feature: MA Experiment 20001911 PARAMETER Experiment Name: At_Drought_Reproduction_P Parameter: Plant Line Value: WS
  misc_feature: MA Experiment 20001911 PARAMETER Experiment Name: At_Drought_Reproduction_P Parameter: Timepoint (day) Value: 10
  misc_feature: MA Experiment 20001911 PARAMETER Experiment Name: At_Drought_Reproduction_P Parameter: Tissue Value: Flowers
  misc_feature: MA Experiment 20001911 PARAMETER Experiment Name: At_Drought_Reproduction_P Parameter: Treatment Value: Drought vs. No Drought
acaaatcgctaatcaaattctatagtaagctttacttcacactactctctcactttctgggcagaaactttgtggatctagaagaacacactaatcagaagagtgaaaaagatgaacgacttgatgacgaaatcgtttatgagttacgttgacttgaaaaaagcagcgatgaaggatatggaagcaggacctgactttgatcttgagatggcttctacgaaagcagacaagatggatgagaatctgtcatctttcttagaagaagcagagtatgtgaaagcagagatgggtttgattagtgagacgctggctcggatcgaacagtaccatgaagagagtaaaggtgttcacaaggcagagtctgtgaagtctcttcgtaacaagatctctaacgagattgtgtctggtttgaggaaggcgaaatcgattaagtcgaagctggaagagatggataaagccaacaaggagattaaaaggctctctgggactccggtttataggagcagaaccgctgtgactaatgggctgaggaagaaacttaaggaagtgatgatggagtttcaggggctgaggcaaaagatgatgagtgagtacaaggagactgttgagagaaggtacttcactgtcactggagaacatgctaatgatgagatgattgagaagatcatcactgataacgctggaggtgaagagtttctcacgcgagcaattcaggaacatggtaaaggaaaggtcttggaaactgtggttgagattcaagacaggtatgatgcagcaaaggagattgagaagagtctgttggagcttcaccaagtgtttcttgatatggctgtgatggttgaatcgcaaggtgaacagatggacgagatcgagcatcatgtgattaatgcgagccattacgtggctgatggagctaatgagctgaagactgcaaagagtcatcagagaaacagcagaaaatggatgtgcattggtatcattgtgctgcttttgatcattctcattgttgtcatccccatcattaccagtttcagctcttcttgagatactggctatgttcactccttttgttttgtttcgctcttctttgtaccaatggatgtcttaatccttttgtgttcttcaaggatgtcttaatcctttcgtgtcttgtatccaatttcaatgaaatggtgaatgtttacaaag

SEQ ID NO: 20935 - protein, 310 aa, Arabidopsis thaliana
  peptide (1)..(310): Ceres Seq. ID no. 12370502
  misc_feature (217)..(279): Pfam Name: SNARE domain Pfam Description: SNARE domain
  misc_feature (1)..(304): Homolog of NCBI NO: 15220328 NR Description: syntaxin SYP125; protein id: At1g11250.1
  misc_feature (1)..(304): Homolog of NCBI NO: 15236285 NR Description: syntaxin SYP123
  misc_feature (1)..(303): Homolog of NCBI NO: 4206787 NR Description: syntaxin-related protein Nt-syr1 [Nicotiana
  misc_feature (1)..(304): Homolog of NCBI NO: 15219900 NR Description: syntaxin SYP124; protein id: At1g61290.1
  misc_feature (1)..(310): Homolog of NCBI NO: 15229865 NR Description: syntaxin SYP121
  misc_feature (1)..(310): Homolog of NCBI NO: 29788865 NR Description: putative cytokinesis-specific syntaxin-related
  misc_feature (1)..(310): Homolog of NCBI NO: 28974542 NR Description: knolle [Antirrhinum majus]
  misc_feature (1)..(310): Homolog of NCBI NO: 5912543 NR Description: Knolle [Capsicum annuum]
  misc_feature (10)..(267): Homolog of NCBI NO: 25311687 NR Description: protein F22O13.4 [imported] - Arabidopsis
  misc_feature (1)..(310): Homolog of NCBI NO: 15223261 NR Description: syntaxin SYP111 (KNOLLE)
MNDLMTKSFMSYVDLKKAAMKDMEAGPDFDLEMASTKADKMDENLSSFLEEAEYVKAEMGLISETLARIEQYHEESKGVHKAESVKSLRNKISNEIVSGLRKAKSIKSKLEEMDKANKEIKRLSGTPVYRSRTAVTNGLRKKLKEVMMEFQGLRQKMMSEYKETVERRYFTVTGEHANDEMIEKIITDNAGGEEFLTRAIQEHGKGKVLETVVEIQDRYDAAKEIEKSLLELHQVFLDMAVMVESQGEQMDEIEHHVINASHYVADGANELKTAKSHQRNSRKWMCIGIIVLLLIILIVVIPIITSFSSS

SEQ ID NO: 20936 - protein, 306 aa, Arabidopsis thaliana
  peptide (1)..(306): Ceres Seq. ID no. 12370503
  misc_feature (213)..(275): Pfam Name: SNARE domain Pfam Description: SNARE domain
  misc_feature (1)..(300): Homolog of NCBI NO: 15220328 NR Description: syntaxin SYP125; protein id: At1g11250.1
  misc_feature (1)..(300): Homolog of NCBI NO: 15236285 NR Description: syntaxin SYP123
  misc_feature (1)..(299): Homolog of NCBI NO: 4206787 NR Description: syntaxin-related protein Nt-syr1 [Nicotiana
  misc_feature (1)..(300): Homolog of NCBI NO: 15219900 NR Description: syntaxin SYP124; protein id: At1g61290.1
  misc_feature (1)..(306): Homolog of NCBI NO: 15229865 NR Description: syntaxin SYP121
  misc_feature (1)..(306): Homolog of NCBI NO: 29788865 NR Description: putative cytokinesis-specific syntaxin-related
  misc_feature (1)..(306): Homolog of NCBI NO: 28974542 NR Description: knolle [Antirrhinum majus]
  misc_feature (1)..(306): Homolog of NCBI NO: 5912543 NR Description: Knolle [Capsicum annuum]
  misc_feature (6)..(263): Homolog of NCBI NO: 25311687 NR Description: protein F22O13.4 [imported] - Arabidopsis
  misc_feature (1)..(306): Homolog of NCBI NO: 15223261 NR Description: syntaxin SYP111 (KNOLLE)
MTKSFMSYVDLKKAAMKDMEAGPDFDLEMASTKADKMDENLSSFLEEAEYVKAEMGLISETLARIEQYHEESKGVHKAESVKSLRNKISNEIVSGLRKAKSIKSKLEEMDKANKEIKRLSGTPVYRSRTAVTNGLRKKLKEVMMEFQGLRQKMMSEYKETVERRYFTVTGEHANDEMIEKIITDNAGGEEFLTRAIQEHGKGKVLETVVEIQDRYDAAKEIEKSLLELHQVFLDMAVMVESQGEQMDEIEHHVINASHYVADGANELKTAKSHQRNSRKWMCIGIIVLLLIILIVVIPIITSFSSS

SEQ ID NO: 20937 - protein, 301 aa, Arabidopsis thaliana
  peptide (1)..(301): Ceres Seq. ID no. 12370504
  misc_feature (208)..(270): Pfam Name: SNARE domain Pfam Description: SNARE domain
  misc_feature (1)..(295): Homolog of NCBI NO: 15236285 NR Description: syntaxin SYP123
  misc_feature (1)..(294): Homolog of NCBI NO: 4206787 NR Description: syntaxin-related protein Nt-syr1 [Nicotiana
  misc_feature (1)..(295): Homolog of NCBI NO: 15219900 NR Description: syntaxin SYP124; protein id: At1g61290.1
  misc_feature (1)..(301): Homolog of NCBI NO: 15229865 NR Description: syntaxin SYP121
  misc_feature (1)..(301): Homolog of NCBI NO: 29788865 NR Description: putative cytokinesis-specific syntaxin-related
  misc_feature (1)..(295): Homolog of NCBI NO: 15220328 NR Description: syntaxin SYP125; protein id: At1g11250.1
  misc_feature (1)..(301): Homolog of NCBI NO: 28974542 NR Description: knolle [Antirrhinum majus]
  misc_feature (1)..(301): Homolog of NCBI NO: 5912543 NR Description: Knolle [Capsicum annuum]
  misc_feature (1)..(258): Homolog of NCBI NO: 25311687 NR Description: protein F22O13.4 [imported] - Arabidopsis
  misc_feature (1)..(301): Homolog of NCBI NO: 15223261 NR Description: syntaxin SYP111 (KNOLLE)
MSYVDLKKAAMKDMEAGPDFDLEMASTKADKMDENLSSFLEEAEYVKAEMGLISETLARIEQYHEESKGVHKAESVKSLRNKISNEIVSGLRKAKSIKSKLEEMDKANKEIKRLSGTPVYRSRTAVTNGLRKKLKEVMMEFQGLRQKMMSEYKETVERRYFTVTGEHANDEMIEKIITDNAGGEEFLTRAIQEHGKGKVLETVVEIQDRYDAAKEIEKSLLELHQVFLDMAVMVESQGEQMDEIEHHVINASHYVADGANELKTAKSHQRNSRKWMCIGIIVLLLIILIVVIPIITSFSSS

SEQ ID NO: 20938 - DNA, 1042 bp, Arabidopsis thaliana
  misc_feature (1)..(1042): Ceres Seq. ID no. 12328103
  misc_feature: MA Experiment ID: 108461 Result: Down-regulated in Transcription
  misc_feature: MA Experiment 108461 PARAMETER Experiment Name: At_Germinating_Seeds_cDNA_P Parameter: Age (day) Value: 1 vs. 0
  misc_feature: MA Experiment 108461 PARAMETER Experiment Name: At_Germinating_Seeds_cDNA_P Parameter: Tissue Value: Germinating Seeds
  misc_feature: MA Experiment ID: 108462 Result: Down-regulated in Transcription
  misc_feature: MA Experiment 108462 PARAMETER Experiment Name: At_Germinating_Seeds_cDNA_P Parameter: Age (day) Value: 2 vs. 0
  misc_feature: MA Experiment 108462 PARAMETER Experiment Name: At_Germinating_Seeds_cDNA_P Parameter: Tissue Value: Germinating Seeds
  misc_feature: MA Experiment ID: 108463 Result: Down-regulated in Transcription
  misc_feature: MA Experiment 108463 PARAMETER Experiment Name: At_Germinating_Seeds_cDNA_P Parameter: Age (day) Value: 3 vs. 0
  misc_feature: MA Experiment 108463 PARAMETER Experiment Name: At_Germinating_Seeds_cDNA_P Parameter: Tissue Value: Germinating Seeds
  misc_feature: MA Experiment ID: 108464 Result: Down-regulated in Transcription
  misc_feature: MA Experiment 108464 PARAMETER Experiment Name: At_Germinating_Seeds_cDNA_P Parameter: Age (day) Value: 4 vs. 0
  misc_feature: MA Experiment 108464 PARAMETER Experiment Name: At_Germinating_Seeds_cDNA_P Parameter: Tissue Value: Germinating Seeds
  misc_feature: MA Experiment ID: 108561 Result: Down-regulated in Transcription
  misc_feature: MA Experiment 108561 PARAMETER Experiment Name: At_100uM_ABA_cDNA_P Parameter: Timepoint (hr) Value: 6
  misc_feature: MA Experiment 108561 PARAMETER Experiment Name: At_100uM_ABA_cDNA_P Parameter: Tissue Value: Aerial
  misc_feature: MA Experiment 108561 PARAMETER Experiment Name: At_100uM_ABA_cDNA_P Parameter: Treatment Value: 100uM ABA vs. No Treatment
  misc_feature: MA Experiment ID: 108579 Result: Up-regulated in Transcription
  misc_feature: MA Experiment 108579 PARAMETER Experiment Name: At_4deg_Cold_cDNA_P Parameter: Temperature (deg C) Value: 4 vs. 22
  misc_feature: MA Experiment 108579 PARAMETER Experiment Name: At_4deg_Cold_cDNA_P Parameter: Timepoint (hr) Value: 6
  misc_feature: MA Experiment 108579 PARAMETER Experiment Name: At_4deg_Cold_cDNA_P Parameter: Tissue Value: Aerial
  misc_feature: MA Experiment ID: 108594 Result: Up-regulated in Transcription
  misc_feature: MA Experiment 108594 PARAMETER Experiment Name: At_Ler-rhl_Root_cDNA_P Parameter: Plant Line Value: null
  misc_feature: MA Experiment ID: 108608 Result: Down-regulated in Transcription
  misc_feature: MA Experiment 108608 PARAMETER Experiment Name: At_100uM_ABA_cDNA_P Parameter: Timepoint (hr) Value: 1
  misc_feature: MA Experiment 108608 PARAMETER Experiment Name: At_100uM_ABA_cDNA_P Parameter: Tissue Value: Aerial
  misc_feature: MA Experiment 108608 PARAMETER Experiment Name: At_100uM_ABA_cDNA_P Parameter: Treatment Value: 100uM ABA vs. No Treatment
  misc_feature: MA Experiment ID: 20000166 Result: Down-regulated in Transcription
  misc_feature: MA Experiment 20000166 PARAMETER Experiment Name: At_100uM_ABA_P Parameter: Age (day) Value: 14
  misc_feature: MA Experiment 20000166 PARAMETER Experiment Name: At_100uM_ABA_P Parameter: Organism Value: A. thaliana
  misc_feature: MA Experiment 20000166 PARAMETER Experiment Name: At_100uM_ABA_P Parameter: Plant Line Value: WS
  misc_feature: MA Experiment 20000166 PARAMETER Experiment Name: At_100uM_ABA_P Parameter: Timepoint (hr) Value: 1
  misc_feature: MA Experiment 20000166 PARAMETER Experiment Name: At_100uM_ABA_P Parameter: Tissue Value: Aerial
  misc_feature: MA Experiment 20000166 PARAMETER Experiment Name: At_100uM_ABA_P Parameter: Treatment Value: 100uM ABA vs. No Treatment
  misc_feature: MA Experiment ID: 20000171 Result: Down-regulated in Transcription
  misc_feature: MA Experiment 20000171 PARAMETER Experiment Name: At_42deg_Heat_P Parameter: Age (day) Value: 14
  misc_feature: MA Experiment 20000171 PARAMETER Experiment Name: At_42deg_Heat_P Parameter: Organism Value: A. thaliana
  misc_feature: MA Experiment 20000171 PARAMETER Experiment Name: At_42deg_Heat_P Parameter: Plant Line Value: WS
  misc_feature: MA Experiment 20000171 PARAMETER Experiment Name: At_42deg_Heat_P Parameter: Temperature (deg C) Value: 42 vs. 22
  misc_feature: MA Experiment 20000171 PARAMETER Experiment Name: At_42deg_Heat_P Parameter: Timepoint (hr) Value: 1
  misc_feature: MA Experiment 20000171 PARAMETER Experiment Name: At_42deg_Heat_P Parameter: Tissue Value: Aerial
  misc_feature: MA Experiment ID: 20000180 Result: Down-regulated in Transcription
  misc_feature: MA Experiment 20000180 PARAMETER Experiment Name: At_Germinating_Seeds_P Parameter: Age (hr) Value: 24 vs. 0
  misc_feature: MA Experiment 20000180 PARAMETER Experiment Name: At_Germinating_Seeds_P Parameter: Tissue Value: Germinating Seeds
  misc_feature: MA Experiment ID: 20000182 Result: Down-regulated in Transcription
  misc_feature: MA Experiment 20000182 PARAMETER Experiment Name: At_2mM_SA_P Parameter: Age (day) Value: 14
  misc_feature: MA Experiment 20000182 PARAMETER Experiment Name: At_2mM_SA_P Parameter: Organism Value: A. thaliana
  misc_feature: MA Experiment 20000182 PARAMETER Experiment Name: At_2mM_SA_P Parameter: Plant Line Value: WS
  misc_feature: MA Experiment 20000182 PARAMETER Experiment Name: At_2mM_SA_P Parameter: Timepoint (hr) Value: 6
  misc_feature: MA Experiment 20000182 PARAMETER Experiment Name: At_2mM_SA_P Parameter: Tissue Value: Aerial
  misc_feature: MA Experiment 20000182 PARAMETER Experiment Name: At_2mM_SA_P Parameter: Treatment Value: 2mM SA vs. No Treatment
  misc_feature: MA Experiment ID: 20000184 Result: Up-regulated in Transcription
  misc_feature: MA Experiment 20000184 PARAMETER Experiment Name: At_Shoots__P Parameter: Age (day) Value: 7
  misc_feature: MA Experiment 20000184 PARAMETER Experiment Name: At_Shoots__P Parameter: Tissue Value: Shoots vs. Whole Plant
  misc_feature: MA Experiment ID: 20000213 Result: Up-regulated in Transcription
  misc_feature: MA Experiment 20000213 PARAMETER Experiment Name: At_4deg_Cold_P Parameter: Timepoint (hr) Value: 2
  misc_feature: MA Experiment ID: 20000224 Result: Down-regulated in Transcription
  misc_feature: MA Experiment ID: 20000265 Result: Down-regulated in Transcription
  misc_feature: MA Experiment 20000265 PARAMETER Experiment Name: At_Open_Flower_P Parameter: Age (day) Value: 21
  misc_feature: MA Experiment 20000265 PARAMETER Experiment Name: At_Open_Flower_P Parameter: Plant Line Value: WS
  misc_feature: MA Experiment 20000265 PARAMETER Experiment Name: At_Open_Flower_P Parameter: Tissue Value: Closed Flower vs. Whole Plant
  misc_feature: MA Experiment ID: 20000438 Result: Down-regulated in Transcription
  misc_feature: MA Experiment 20000438 PARAMETER Experiment Name: At_Shoots__P Parameter: Age (day) Value: 14
  misc_feature: MA Experiment 20000438 PARAMETER Experiment Name: At_Shoots__P Parameter: Tissue Value: Shoots vs. Whole Plant
  misc_feature: MA Experiment ID: 20000444 Result: Up-regulated in Transcription
  misc_feature: MA Experiment 20000444 PARAMETER Experiment Name: At_100uM_NAA__P Parameter: Age (day) Value: 14
  misc_feature: MA Experiment 20000444 PARAMETER Experiment Name: At_100uM_NAA__P Parameter: Organism Value: A. thaliana
  misc_feature: MA Experiment 20000444 PARAMETER Experiment Name: At_100uM_NAA__P Parameter: Plant Line Value: WS
  misc_feature: MA Experiment 20000444 PARAMETER Experiment Name: At_100uM_NAA__P Parameter: Timepoint (hr) Value: 1
  misc_feature: MA Experiment 20000444 PARAMETER Experiment Name: At_100uM_NAA__P Parameter: Tissue Value: Aerial
  misc_feature: MA Experiment 20000444 PARAMETER Experiment Name: At_100uM_NAA__P Parameter: Treatment Value: 100uM NAA vs. No Treatment
  misc_feature: MA Experiment ID: 20000451 Result: Down-regulated in Transcription
  misc_feature: MA Experiment 20000451 PARAMETER Experiment Name: At_CS6879_Shoots-Roots_P Parameter: Age (day) Value: 14
  misc_feature: MA Experiment 20000451 PARAMETER Experiment Name: At_CS6879_Shoots-Roots_P Parameter: Organism Value: A. thaliana
  misc_feature: MA Experiment 20000451 PARAMETER Experiment Name: At_CS6879_Shoots-Roots_P Parameter: Plant Line Value: CS6879 vs. WS
  misc_feature: MA Experiment 20000451 PARAMETER Experiment Name: At_CS6879_Shoots-Roots_P Parameter: Tissue Value: Roots
  misc_feature: MA Experiment ID: 20000452 Result: Up-regulated in Transcription
  misc_feature: MA Experiment 20000452 PARAMETER Experiment Name: At_CS6879_Shoots-Roots_P Parameter: Age (day) Value: 14
  misc_feature: MA Experiment 20000452 PARAMETER Experiment Name: At_CS6879_Shoots-Roots_P Parameter: Organism Value: A. thaliana
  misc_feature: MA Experiment 20000452 PARAMETER Experiment Name: At_CS6879_Shoots-Roots_P Parameter: Plant Line Value: CS6879 vs. WS
  misc_feature: MA Experiment 20000452 PARAMETER Experiment Name: At_CS6879_Shoots-Roots_P Parameter: Tissue Value: Shoots
  misc_feature: MA Experiment ID: 20000455 Result: Down-regulated in Transcription
  misc_feature: MA Experiment 20000455 PARAMETER Experiment Name: At_100uM_ABA_P Parameter: Age (day) Value: 16
  misc_feature: MA Experiment 20000455 PARAMETER Experiment Name: At_100uM_ABA_P Parameter: Organism Value: A. thaliana
  misc_feature: MA Experiment 20000455 PARAMETER Experiment Name: At_100uM_ABA_P Parameter: Plant Line Value: WS
  misc_feature: MA Experiment 20000455 PARAMETER Experiment Name: At_100uM_ABA_P Parameter: Timepoint (hr) Value: 48
  misc_feature: MA Experiment 20000455 PARAMETER Experiment Name: At_100uM_ABA_P Parameter: Tissue Value: Aerial
  misc_feature: MA Experiment 20000455 PARAMETER Experiment Name: At_100uM_ABA_P Parameter: Treatment Value: 100uM ABA vs. No Treatment
  misc_feature: MA Experiment ID: 20000460 Result: Up-regulated in Transcription
  misc_feature: MA Experiment 20000460 PARAMETER Experiment Name: At_10percent_PEG_P Parameter: Age (day) Value: 12
  misc_feature: MA Experiment 20000460 PARAMETER Experiment Name: At_10percent_PEG_P Parameter: Organism Value: A. thaliana
  misc_feature: MA Experiment 20000460 PARAMETER Experiment Name: At_10percent_PEG_P Parameter: Plant Line Value: WS
  misc_feature: MA Experiment 20000460 PARAMETER Experiment Name: At_10percent_PEG_P Parameter: Timepoint (day) Value: 12
  misc_feature: MA Experiment 20000460 PARAMETER Experiment Name: At_10percent_PEG_P Parameter: Tissue Value: Whole Plant
  misc_feature: MA Experiment 20000460 PARAMETER Experiment Name: At_10percent_PEG_P Parameter: Treatment Value: 10percent PEG vs. No Treatment
  misc_feature: MA Experiment ID: 20000495 Result: Down-regulated in Transcription
  misc_feature: MA Experiment 20000495 PARAMETER Experiment Name: At_Guard_Cells_P Parameter: Harvest Date Value: 8/2/2002
  misc_feature: MA Experiment 20000495 PARAMETER Experiment Name: At_Guard_Cells_P Parameter: Organism Value: A. thaliana
  misc_feature: MA Experiment 20000495 PARAMETER Experiment Name: At_Guard_Cells_P Parameter: Tissue Value: Guard Cells vs. Leaves
  misc_feature: MA Experiment ID: 20000573 Result: Up-regulated in Transcription
  misc_feature: MA Experiment 20000573 PARAMETER Experiment Name: At_100uM_ABA_Mutants__P Parameter: Organism Value: A. thaliana
  misc_feature: MA Experiment 20000573 PARAMETER Experiment Name: At_100uM_ABA_Mutants__P Parameter: Plant Line Value: CS22 vs. Ler wt
  misc_feature: MA Experiment 20000573 PARAMETER Experiment Name: At_100uM_ABA_Mutants__P Parameter: Timepoint (hr) Value: N/A
  misc_feature: MA Experiment 20000573 PARAMETER Experiment Name: At_100uM_ABA_Mutants__P Parameter: Tissue Value: Whole Plant
  misc_feature: MA Experiment 20000573 PARAMETER Experiment Name: At_100uM_ABA_Mutants__P Parameter: Treatment Value: None
  misc_feature: MA Experiment ID: 20000574 Result: Up-regulated in Transcription
  misc_feature: MA Experiment 20000574 PARAMETER Experiment Name: At_100uM_ABA_Mutants__P Parameter: Organism Value: A. thaliana
  misc_feature: MA Experiment 20000574 PARAMETER Experiment Name: At_100uM_ABA_Mutants__P Parameter: Plant Line Value: CS23 vs. Ler wt
  misc_feature: MA Experiment 20000574 PARAMETER Experiment Name: At_100uM_ABA_Mutants__P Parameter: Timepoint (hr) Value: N/A
  misc_feature: MA Experiment 20000574 PARAMETER Experiment Name: At_100uM_ABA_Mutants__P Parameter: Tissue Value: Whole Plant
  misc_feature: MA Experiment 20000574 PARAMETER Experiment Name: At_100uM_ABA_Mutants__P Parameter: Treatment Value: None
  misc_feature: MA Experiment ID: 20000794 Result: Up-regulated in Transcription
  misc_feature: MA Experiment 20000794 PARAMETER Experiment Name: At_Petals_P Parameter: Age (day) Value: 23-25 days
  misc_feature: MA Experiment 20000794 PARAMETER Experiment Name: At_Petals_P Parameter: Plant Line Value: WS
  misc_feature: MA Experiment 20000794 PARAMETER Experiment Name: At_Petals_P Parameter: Tissue Value: Petals vs. Whole plant
  misc_feature: MA Experiment ID: 20001247 Result: Up-regulated in Transcription
  misc_feature: MA Experiment 20001247 PARAMETER Experiment Name: At_Far-red-induction_P Parameter: Age (day) Value: 7
  misc_feature: MA Experiment 20001247 PARAMETER Experiment Name: At_Far-red-induction_P Parameter: Light Value: Far-red vs. White
  misc_feature: MA Experiment 20001247 PARAMETER Experiment Name: At_Far-red-induction_P Parameter: Organism Value: A. thaliana
  misc_feature: MA Experiment 20001247 PARAMETER Experiment Name: At_Far-red-induction_P Parameter: Plant Line Value: Columbia
  misc_feature: MA Experiment 20001247 PARAMETER Experiment Name: At_Far-red-induction_P Parameter: Timepoint (hr) Value: 1
  misc_feature: MA Experiment 20001247 PARAMETER Experiment Name: At_Far-red-induction_P Parameter: Tissue Value: Whole Plant
  misc_feature: MA Experiment ID: 20001248 Result: Up-regulated in Transcription
  misc_feature: MA Experiment 20001248 PARAMETER Experiment Name: At_Far-red-induction_P Parameter: Age (day) Value: 7
  misc_feature: MA Experiment 20001248 PARAMETER Experiment Name: At_Far-red-induction_P Parameter: Light Value: Far-red vs. White
  misc_feature: MA Experiment 20001248 PARAMETER Experiment Name: At_Far-red-induction_P Parameter: Organism Value: A. thaliana
  misc_feature: MA Experiment 20001248 PARAMETER Experiment Name: At_Far-red-induction_P Parameter: Plant Line Value: Columbia
  misc_feature: MA Experiment 20001248 PARAMETER Experiment Name: At_Far-red-induction_P Parameter: Timepoint (hr) Value: 4
  misc_feature: MA Experiment 20001248 PARAMETER Experiment Name: At_Far-red-induction_P Parameter: Tissue Value: Whole Plant
  misc_feature: MA Experiment ID: 20001450 Result: Up-regulated in Transcription
  misc_feature: MA Experiment 20001450 PARAMETER Experiment Name: At_Far-red-induction_P Parameter: Age (day) Value: 7
  misc_feature: MA Experiment 20001450 PARAMETER Experiment Name: At_Far-red-induction_P Parameter: Light Value: Far-red vs. White
  misc_feature: MA Experiment 20001450 PARAMETER Experiment Name: At_Far-red-induction_P Parameter: Organism Value: A. thaliana
  misc_feature: MA Experiment 20001450 PARAMETER Experiment Name: At_Far-red-induction_P Parameter: Plant Line Value: Columbia
  misc_feature: MA Experiment 20001450 PARAMETER Experiment Name: At_Far-red-induction_P Parameter: Timepoint (hr) Value: 8
  misc_feature: MA Experiment 20001450 PARAMETER Experiment Name: At_Far-red-induction_P Parameter: Tissue Value: Whole Plant
  misc_feature: MA Experiment ID: 20001451 Result: Up-regulated in Transcription
  misc_feature: MA Experiment 20001451 PARAMETER Experiment Name: At_Far-red-induction_P Parameter: Age (day) Value: 7
  misc_feature: MA Experiment 20001451 PARAMETER Experiment Name: At_Far-red-induction_P Parameter: Light Value: Far-red vs. White
  misc_feature: MA Experiment 20001451 PARAMETER Experiment Name: At_Far-red-induction_P Parameter: Organism Value: A. thaliana
  misc_feature: MA Experiment 20001451 PARAMETER Experiment Name: At_Far-red-induction_P Parameter: Plant Line Value: Columbia
  misc_feature: MA Experiment 20001451 PARAMETER Experiment Name: At_Far-red-induction_P Parameter: Timepoint (hr) Value: 24
  misc_feature: MA Experiment 20001451 PARAMETER Experiment Name: At_Far-red-induction_P Parameter: Tissue Value: Whole Plant
  misc_feature: MA Experiment ID: 20001554 Result: Down-regulated in Transcription
  misc_feature: MA Experiment 20001554 PARAMETER Experiment Name: At_Drought_Soil_Dry_P Parameter: Age (day) Value: 21
  misc_feature: MA Experiment 20001554 PARAMETER Experiment Name: At_Drought_Soil_Dry_P Parameter: Organism Value: A. thaliana
  misc_feature: MA Experiment 20001554 PARAMETER Experiment Name: At_Drought_Soil_Dry_P Parameter: Plant Line Value: WS
  misc_feature: MA Experiment 20001554 PARAMETER Experiment Name: At_Drought_Soil_Dry_P Parameter: Post Timepoint (hr) Value: None
  misc_feature: MA Experiment 20001554 PARAMETER Experiment Name: At_Drought_Soil_Dry_P Parameter: Post-Treatment Value: None
  misc_feature: MA Experiment 20001554 PARAMETER Experiment Name: At_Drought_Soil_Dry_P Parameter: Timepoint (day) Value: 7
  misc_feature: MA Experiment 20001554 PARAMETER Experiment Name: At_Drought_Soil_Dry_P Parameter: Treatment Value: Drought vs. No Drought
  misc_feature: MA Experiment ID: 20001556 Result: Down-regulated in Transcription
  misc_feature: MA Experiment 20001556 PARAMETER Experiment Name: At_Drought_Soil_Dry_P Parameter: Age (day) Value: 26
  misc_feature: MA Experiment 20001556 PARAMETER Experiment Name: At_Drought_Soil_Dry_P Parameter: Organism Value: A. thaliana
  misc_feature: MA Experiment 20001556 PARAMETER Experiment Name: At_Drought_Soil_Dry_P Parameter: Plant Line Value: WS
  misc_feature: MA Experiment 20001556 PARAMETER Experiment Name: At_Drought_Soil_Dry_P Parameter: Post Timepoint (hr) Value: None
  misc_feature: MA Experiment 20001556 PARAMETER Experiment Name: At_Drought_Soil_Dry_P Parameter: Post-Treatment Value: None
  misc_feature: MA Experiment 20001556 PARAMETER Experiment Name: At_Drought_Soil_Dry_P Parameter: Timepoint (day) Value: 12
  misc_feature: MA Experiment 20001556 PARAMETER Experiment Name: At_Drought_Soil_Dry_P Parameter: Treatment Value: Drought vs. No Drought
  misc_feature: MA Experiment ID: 20001557 Result: Up-regulated in Transcription
  misc_feature: MA Experiment 20001557 PARAMETER Experiment Name: At_Drought_Soil_Dry_P Parameter: Age (day) Value: 27
  misc_feature: MA Experiment 20001557 PARAMETER Experiment Name: At_Drought_Soil_Dry_P Parameter: Organism Value: A. thaliana
  misc_feature: MA Experiment 20001557 PARAMETER Experiment Name: At_Drought_Soil_Dry_P Parameter: Plant Line Value: WS
  misc_feature: MA Experiment 20001557 PARAMETER Experiment Name: At_Drought_Soil_Dry_P Parameter: Post Timepoint (hr) Value: 3
  misc_feature: MA Experiment 20001557 PARAMETER Experiment Name: At_Drought_Soil_Dry_P Parameter: Post-Treatment Value: Re-Water vs. No Drought
  misc_feature: MA Experiment 20001557 PARAMETER Experiment Name: At_Drought_Soil_Dry_P Parameter: Timepoint (day) Value: 13
  misc_feature: MA Experiment 20001557 PARAMETER Experiment Name: At_Drought_Soil_Dry_P Parameter: Treatment Value: Drought vs. No Drought
  misc_feature: MA Experiment ID: 20001558 Result: Up-regulated in Transcription
  misc_feature: MA Experiment 20001558 PARAMETER Experiment Name: At_Drought_Soil_Dry_P Parameter: Age (day) Value: 27
  misc_feature: MA Experiment 20001558 PARAMETER Experiment Name: At_Drought_Soil_Dry_P Parameter: Organism Value: A. thaliana
  misc_feature: MA Experiment 20001558 PARAMETER Experiment Name: At_Drought_Soil_Dry_P Parameter: Plant Line Value: WS
  misc_feature: MA Experiment 20001558 PARAMETER Experiment Name: At_Drought_Soil_Dry_P Parameter: Post Timepoint (hr) Value: 6
  misc_feature: MA Experiment 20001558 PARAMETER Experiment Name: At_Drought_Soil_Dry_P Parameter: Post-Treatment Value: Re-Water vs. No Drought
  misc_feature: MA Experiment 20001558 PARAMETER Experiment Name: At_Drought_Soil_Dry_P Parameter: Timepoint (day) Value: 13
  misc_feature: MA Experiment 20001558 PARAMETER Experiment Name: At_Drought_Soil_Dry_P Parameter: Treatment Value: Drought vs. No Drought
  misc_feature: MA Experiment ID: 20001560 Result: Up-regulated in Transcription
  misc_feature: MA Experiment 20001560 PARAMETER Experiment Name: At_Drought_Soil_Dry_P Parameter: Age (day) Value: 28
  misc_feature: MA Experiment 20001560 PARAMETER Experiment Name: At_Drought_Soil_Dry_P Parameter: Organism Value: A. thaliana
  misc_feature: MA Experiment 20001560 PARAMETER Experiment Name: At_Drought_Soil_Dry_P Parameter: Plant Line Value: WS
  misc_feature: MA Experiment 20001560 PARAMETER Experiment Name: At_Drought_Soil_Dry_P Parameter: Post Timepoint (hr) Value: None
  misc_feature: MA Experiment 20001560 PARAMETER Experiment Name: At_Drought_Soil_Dry_P Parameter: Post-Treatment Value: None
  misc_feature: MA Experiment 20001560 PARAMETER Experiment Name: At_Drought_Soil_Dry_P Parameter: Timepoint (day) Value: 14
  misc_feature: MA Experiment 20001560 PARAMETER Experiment Name: At_Drought_Soil_Dry_P Parameter: Treatment Value: Drought vs. No Drought
  misc_feature: MA Experiment ID: 20001770 Result: Up-regulated in Transcription
  misc_feature: MA Experiment 20001770 PARAMETER Experiment Name: At_Far-red-enriched-adult_P Parameter: Age (day) Value: 28
  misc_feature: MA Experiment 20001770 PARAMETER Experiment Name: At_Far-red-enriched-adult_P Parameter: Light Value: Far-red enriched vs. White
  misc_feature: MA Experiment 20001770 PARAMETER Experiment Name: At_Far-red-enriched-adult_P Parameter: Organism Value: A. thaliana
  misc_feature: MA Experiment 20001770 PARAMETER Experiment Name: At_Far-red-enriched-adult_P Parameter: Plant Line Value: Columbia
  misc_feature: MA Experiment 20001770 PARAMETER Experiment Name: At_Far-red-enriched-adult_P Parameter: Timepoint (hr) Value: 8
  misc_feature: MA Experiment 20001770 PARAMETER Experiment Name: At_Far-red-enriched-adult_P Parameter: Tissue Value: Aerial
aaaaacacaacatgaagattatgtgggaaacagcagttgtgttctgtctctgttcattgtctttggtttctgcacacagcaggaaattcacaacaccaaacgtgacacgcctcacagatcaattcagtaagatcgccattgaaaatggcttctccagacgtttcggagctcacaatattcaggtcaatggctccctcgctaagctcactctcgacaaatcctccggagctgggttggtgtcaaagaacaactatcactatggtttcttcagtgcaagactcaagcttcccgctggatttgcctctggtgttgtggttgctttctatttatcaaacgcagagacttatccgaaaagccacgacgagatagacatagaattgttgggtagaagtaggagagatgattggacgatccaaacgaatgtatatgcaaatggaagtactagaacgggaagggaagagaagttttatttttggttcgatccaacgcaagcctttcacgactataccctcatttggaactcccaccatactgtatttttggtagacaacattccggttaggcagtttccaaaccggggagccttcacaagcgcgtacccgtctaaaccgatgtctctatacgtcaccgtttgggacggttcagagtgggccactaaaggtggtaagtaccccgtcaactacaagtacgcccctttcgtggtttccgttgctgacgtggagttaagtggctgttccgttaacaacggatcctctaccgggtccgggccatgtaccaagtcgggcgggtcgatttcgagtctggaccctgttgatggtcaggattttgccacgttgtcgaagaatcagatcaatgccatggattgggctaggagaaagctgatgttctattcttattgcagtgataagccaagatacaaagtcatgcctgctgagtgcaactgattttttttttgttaaaacacacattgttactttctattgttttatgatataattttacgtaggatattagaggtttaaagtatgtttcaaacttcgcc

SEQ ID NO: 20939 - protein, 313 aa, Arabidopsis thaliana
  peptide (1)..(313): Ceres Seq. ID no. 12328104
  misc_feature (46)..(229): Pfam Name: Glycosyl hydrolases family 16 Pfam Description: Glycosyl hydrolases family 16
  misc_feature (44)..(312): Homolog of NCBI NO: 2129774 NR Description: xyloglucan endo-1,4-beta-D-glucanase (EC 3.2.1.-)
  misc_feature (33)..(312): Homolog of NCBI NO: 32470643 NR Description: putative xyloglucan endotransglycosylase-related
  misc_feature (34)..(312): Homolog of NCBI NO: 6681351 NR Description: ETAG-A3 [Lycopersicon esculentum]
  misc_feature (13)..(312): Homolog of NCBI NO: 13560781 NR Description: endoxyloglucan transferase [Daucus carota]
  misc_feature (45)..(312): Homolog of NCBI NO: 21553969 NR Description: putative xyloglucan-specific glucanase
  misc_feature (44)..(312): Homolog of NCBI NO: 15223878 NR Description: xyloglucan endotransglycosylase (XTR2)
  misc_feature (45)..(312): Homolog of NCBI NO: 15226364 NR Description: xyloglucan endotransglycosylase (EXGT-A3)
  misc_feature (45)..(312): Homolog of NCBI NO: 5533313 NR Description: endoxyloglucan transferase [Arabidopsis thaliana]
  misc_feature (7)..(313): Homolog of NCBI NO: 21555405 NR Description: putative endoxyloglucan transferase [Arabidopsis
  misc_feature (4)..(313): Homolog of NCBI NO: 15218558 NR Description: xyloglucan endotransglycosylase, putative
KHNMKIMWETAVVFCLCSLSLVSAHSRKFTTPNVTRLTDQFSKIAIENGFSRRFGAHNIQVNGSLAKLTLDKSSGAGLVSKNNYHYGFFSARLKLPAGFASGVVVAFYLSNAETYPKSHDEIDIELLGRSRRDDWTIQTNVYANGSTRTGREEKFYFWFDPTQAFHDYTLIWNSHHTVFLVDNIPVRQFPNRGAFTSAYPSKPMSLYVTVWDGSEWATKGGKYPVNYKYAPFVVSVADVELSGCSVNNGSSTGSGPCTKSGGSISSLDPVDGQDFATLSKNQINAMDWARRKLMFYSYCSDKPRYKVMPAECN

SEQ ID NO: 20940 - protein, 310 aa, Arabidopsis thaliana
  peptide (1)..(310): Ceres Seq. ID no. 12328105
  misc_feature (43)..(226): Pfam Name: Glycosyl hydrolases family 16 Pfam Description: Glycosyl hydrolases family 16
  misc_feature (41)..(309): Homolog of NCBI NO: 2129774 NR Description: xyloglucan endo-1,4-beta-D-glucanase (EC 3.2.1.-)
  misc_feature (30)..(309): Homolog of NCBI NO: 32470643 NR Description: putative xyloglucan endotransglycosylase-related
  misc_feature (31)..(309): Homolog of NCBI NO: 6681351 NR Description: ETAG-A3 [Lycopersicon esculentum]
  misc_feature (10)..(309): Homolog of NCBI NO: 13560781 NR Description: endoxyloglucan transferase [Daucus carota]
  misc_feature (42)..(309): Homolog of NCBI NO: 21553969 NR Description: putative xyloglucan-specific glucanase
  misc_feature (41)..(309): Homolog of NCBI NO: 15223878 NR Description: xyloglucan endotransglycosylase (XTR2)
  misc_feature (42)..(309): Homolog of NCBI NO: 15226364 NR Description: xyloglucan endotransglycosylase (EXGT-A3)
  misc_feature (42)..(309): Homolog of NCBI NO: 5533313 NR Description: endoxyloglucan transferase [Arabidopsis thaliana]
  misc_feature (4)..(310): Homolog of NCBI NO: 21555405 NR Description: putative endoxyloglucan transferase [Arabidopsis
  misc_feature (1)..(310): Homolog of NCBI NO: 15218558 NR Description: xyloglucan endotransglycosylase, putative
MKIMWETAVVFCLCSLSLVSAHSRKFTTPNVTRLTDQFSKIAIENGFSRRFGAHNIQVNGSLAKLTLDKSSGAGLVSKNNYHYGFFSARLKLPAGFASGVVVAFYLSNAETYPKSHDEIDIELLGRSRRDDWTIQTNVYANGSTRTGREEKFYFWFDPTQAFHDYTLIWNSHHTVFLVDNIPVRQFPNRGAFTSAYPSKPMSLYVTVWDGSEWATKGGKYPVNYKYAPFVVSVADVELSGCSVNNGSSTGSGPCTKSGGSISSLDPVDGQDFATLSKNQINAMDWARRKLMFYSYCSDKPRYKVMPAECN

SEQ ID NO: 20941 - protein, 307 aa, Arabidopsis thaliana
  peptide (1)..(307): Ceres Seq. ID no. 12328106
  misc_feature (40)..(223): Pfam Name: Glycosyl hydrolases family 16 Pfam Description: Glycosyl hydrolases family 16
  misc_feature (38)..(306): Homolog of NCBI NO: 2129774 NR Description: xyloglucan endo-1,4-beta-D-glucanase (EC 3.2.1.-)
  misc_feature (27)..(306): Homolog of NCBI NO: 32470643 NR Description: putative xyloglucan endotransglycosylase-related
  misc_feature (28)..(306): Homolog of NCBI NO: 6681351 NR Description: ETAG-A3 [Lycopersicon esculentum]
  misc_feature (7)..(306): Homolog of NCBI NO: 13560781 NR Description: endoxyloglucan transferase [Daucus carota]
  misc_feature (39)..(306): Homolog of NCBI NO: 21553969 NR Description: putative xyloglucan-specific glucanase
  misc_feature (38)..(306): Homolog of NCBI NO: 15223878 NR Description: xyloglucan endotransglycosylase (XTR2)
  misc_feature (39)..(306): Homolog of NCBI NO: 15226364 NR Description: xyloglucan endotransglycosylase (EXGT-A3)
  misc_feature (39)..(306): Homolog of NCBI NO: 5533313 NR Description: endoxyloglucan transferase [Arabidopsis thaliana]
  misc_feature (1)..(307): Homolog of NCBI NO: 21555405 NR Description: putative endoxyloglucan transferase [Arabidopsis
  misc_feature (1)..(307): Homolog of NCBI NO: 15218558 NR Description: xyloglucan endotransglycosylase, putative
MWETAVVFCLCSLSLVSAHSRKFTTPNVTRLTDQFSKIAIENGFSRRFGAHNIQVNGSLAKLTLDKSSGAGLVSKNNYHYGFFSARLKLPAGFASGVVVAFYLSNAETYPKSHDEIDIELLGRSRRDDWTIQTNVYANGSTRTGREEKFYFWFDPTQAFHDYTLIWNSHHTVFLVDNIPVRQFPNRGAFTSAYPSKPMSLYVTVWDGSEWATKGGKYPVNYKYAPFVVSVADVELSGCSVNNGSSTGSGPCTKSGGSISSLDPVDGQDFATLSKNQINAMDWARRKLMFYSYCSDKPRYKVMPAECN

SEQ ID NO: 20942 - DNA, 642 bp, Arabidopsis thaliana
  misc_feature (1)..(642): Ceres Seq. ID no. 12322267
  misc_feature: MA Experiment ID: 108461 Result: Up-regulated in Transcription
  misc_feature: MA Experiment 108461 PARAMETER Experiment Name: At_Germinating_Seeds_cDNA_P Parameter: Age (day) Value: 1 vs. 0
  misc_feature: MA Experiment 108461 PARAMETER Experiment Name: At_Germinating_Seeds_cDNA_P Parameter: Tissue Value: Germinating Seeds
  misc_feature: MA Experiment ID: 108462 Result: Up-regulated in Transcription
  misc_feature: MA Experiment 108462 PARAMETER Experiment Name: At_Germinating_Seeds_cDNA_P Parameter: Age (day) Value: 2 vs. 0
  misc_feature: MA Experiment 108462 PARAMETER Experiment Name: At_Germinating_Seeds_cDNA_P Parameter: Tissue Value: Germinating Seeds
  misc_feature: MA Experiment ID: 108463 Result: Up-regulated in Transcription
  misc_feature: MA Experiment 108463 PARAMETER Experiment Name: At_Germinating_Seeds_cDNA_P Parameter: Age (day) Value: 3 vs. 0
  misc_feature: MA Experiment 108463 PARAMETER Experiment Name: At_Germinating_Seeds_cDNA_P Parameter: Tissue Value: Germinating Seeds
  misc_feature: MA Experiment ID: 108464 Result: Up-regulated in Transcription
  misc_feature: MA Experiment 108464 PARAMETER Experiment Name: At_Germinating_Seeds_cDNA_P Parameter: Age (day) Value: 4 vs. 0
  misc_feature: MA Experiment 108464 PARAMETER Experiment Name: At_Germinating_Seeds_cDNA_P Parameter: Tissue Value: Germinating Seeds
  misc_feature: MA Experiment ID: 108595 Result: Down-regulated in Transcription
  misc_feature: MA Experiment 108595 PARAMETER Experiment Name: At_Ler-pi_Ovule_cDNA_P Parameter: Plant Line Value: null
  misc_feature: MA Experiment ID: 20000070 Result: Down-regulated in Transcription
  misc_feature: MA Experiment 20000070 PARAMETER Experiment Name: At_100uM_ABA_Mutants_cDNA_P Parameter: Plant Line Value: CS24
  misc_feature: MA Experiment 20000070 PARAMETER Experiment Name: At_100uM_ABA_Mutants_cDNA_P Parameter: Timepoint (hr) Value: 6
  misc_feature: MA Experiment 20000070 PARAMETER Experiment Name: At_100uM_ABA_Mutants_cDNA_P Parameter: Tissue Value: Aerial
  misc_feature: MA Experiment 20000070 PARAMETER Experiment Name: At_100uM_ABA_Mutants_cDNA_P Parameter: Treatment Value: 100uM ABA vs. No Treatment
  misc_feature: MA Experiment ID: 20000088 Result: Down-regulated in Transcription
  misc_feature: MA Experiment 20000088 PARAMETER Experiment Name: At_100uM_ABA_Mutants_cDNA_P Parameter: Plant Line Value: Landsberg
  misc_feature: MA Experiment 20000088 PARAMETER Experiment Name: At_100uM_ABA_Mutants_cDNA_P Parameter: Timepoint (hr) Value: 6
  misc_feature: MA Experiment 20000088 PARAMETER Experiment Name: At_100uM_ABA_Mutants_cDNA_P Parameter: Tissue Value: Aerial
  misc_feature: MA Experiment 20000088 PARAMETER Experiment Name: At_100uM_ABA_Mutants_cDNA_P Parameter: Treatment Value: 100uM ABA vs. No Treatment
  misc_feature: MA Experiment ID: 20000180 Result: Up-regulated in Transcription
  misc_feature: MA Experiment 20000180 PARAMETER Experiment Name: At_Germinating_Seeds_P Parameter: Age (hr) Value: 24 vs. 0
  misc_feature: MA Experiment 20000180 PARAMETER Experiment Name: At_Germinating_Seeds_P Parameter: Tissue Value: Germinating Seeds
  misc_feature: MA Experiment ID: 20000184 Result: Up-regulated in Transcription
  misc_feature: MA Experiment 20000184 PARAMETER Experiment Name: At_Shoots__P Parameter: Age (day) Value: 7
  misc_feature: MA Experiment 20000184 PARAMETER Experiment Name: At_Shoots__P Parameter: Tissue Value: Shoots vs. Whole Plant
  misc_feature: MA Experiment ID: 20000185 Result: Down-regulated in Transcription
  misc_feature: MA Experiment 20000185 PARAMETER Experiment Name: At_Roots__P Parameter: Age (day) Value: 7 vs. 21
  misc_feature: MA Experiment 20000185 PARAMETER Experiment Name: At_Roots__P Parameter: Organism Value: A. thaliana
  misc_feature: MA Experiment 20000185 PARAMETER Experiment Name: At_Roots__P Parameter: Tissue Value: Roots vs. Whole Plant
  misc_feature: MA Experiment ID: 20000224 Result: Down-regulated in Transcription
  misc_feature: MA Experiment ID: 20000227 Result: Down-regulated in Transcription
  misc_feature: MA Experiment 20000227 PARAMETER Experiment Name: At_Root-Tips-vs-Tops_P Parameter: Tissue Value: Root Tips vs. Root Tops
  misc_feature: MA Experiment ID: 20000235 Result: Up-regulated in Transcription
  misc_feature: MA Experiment 20000235 PARAMETER Experiment Name: At_Siliques_P Parameter: Age (day) Value: 21
  misc_feature: MA Experiment 20000235 PARAMETER Experiment Name: At_Siliques_P Parameter: Organism Value: A. thaliana
  misc_feature: MA Experiment 20000235 PARAMETER Experiment Name: At_Siliques_P Parameter: Plant Line Value: WS
  misc_feature: MA Experiment 20000235 PARAMETER Experiment Name: At_Siliques_P Parameter: Tissue Value: 5-10mm Siliques vs. Whole Plant
  misc_feature: MA Experiment ID: 20000437 Result: Down-regulated in Transcription
  misc_feature: MA Experiment 20000437 PARAMETER Experiment Name: At_Drought_P Parameter: Age (day) Value: 8
  misc_feature: MA Experiment 20000437 PARAMETER Experiment Name: At_Drought_P Parameter: Organism Value: A. thaliana
  misc_feature: MA Experiment 20000437 PARAMETER Experiment Name: At_Drought_P Parameter: Plant Line Value: WS
  misc_feature: MA Experiment 20000437 PARAMETER Experiment Name: At_Drought_P Parameter: Timepoint (hr) Value: 24
  misc_feature: MA Experiment 20000437 PARAMETER Experiment Name: At_Drought_P Parameter: Tissue Value: Whole Plant
  misc_feature: MA Experiment 20000437 PARAMETER Experiment Name: At_Drought_P Parameter: Treatment Value: Drought vs. No Drought
  misc_feature: MA Experiment ID: 20000438 Result: Up-regulated in Transcription
  misc_feature: MA Experiment 20000438 PARAMETER Experiment Name: At_Shoots__P Parameter: Age (day) Value: 14
  misc_feature: MA Experiment 20000438 PARAMETER Experiment Name: At_Shoots__P Parameter: Tissue Value: Shoots vs. Whole Plant
  misc_feature: MA Experiment ID: 20000439 Result: Down-regulated in Transcription
  misc_feature: MA Experiment 20000439 PARAMETER Experiment Name: At_Roots__P Parameter: Age (day) Value: 14 vs. 21
  misc_feature: MA Experiment 20000439 PARAMETER Experiment Name: At_Roots__P Parameter: Organism Value: A. thaliana
  misc_feature: MA Experiment 20000439 PARAMETER Experiment Name: At_Roots__P Parameter: Tissue Value: Roots vs. Whole Plant
  misc_feature: MA Experiment ID: 20001451 Result: Up-regulated in Transcription
  misc_feature: MA Experiment 20001451 PARAMETER Experiment Name: At_Far-red-induction_P Parameter: Age (day) Value: 7
  misc_feature: MA Experiment 20001451 PARAMETER Experiment Name: At_Far-red-induction_P Parameter: Light Value: Far-red vs. White
  misc_feature: MA Experiment 20001451 PARAMETER Experiment Name: At_Far-red-induction_P Parameter: Organism Value: A. thaliana
  misc_feature: MA Experiment 20001451 PARAMETER Experiment Name: At_Far-red-induction_P Parameter: Plant Line Value: Columbia
  misc_feature: MA Experiment 20001451 PARAMETER Experiment Name: At_Far-red-induction_P Parameter: Timepoint (hr) Value: 24
  misc_feature: MA Experiment 20001451 PARAMETER Experiment Name: At_Far-red-induction_P Parameter: Tissue Value: Whole Plant
  misc_feature: MA Experiment ID: 20001560 Result: Up-regulated in Transcription
  misc_feature: MA Experiment 20001560 PARAMETER Experiment Name: At_Drought_Soil_Dry_P Parameter: Age (day) Value: 28
  misc_feature: MA Experiment 20001560 PARAMETER Experiment Name: At_Drought_Soil_Dry_P Parameter: Organism Value: A. thaliana
  misc_feature: MA Experiment 20001560 PARAMETER Experiment Name: At_Drought_Soil_Dry_P Parameter: Plant Line Value: WS
  misc_feature: MA Experiment 20001560 PARAMETER Experiment Name: At_Drought_Soil_Dry_P Parameter: Post Timepoint (hr) Value: None
  misc_feature: MA Experiment 20001560 PARAMETER Experiment Name: At_Drought_Soil_Dry_P Parameter: Post-Treatment Value: None
  misc_feature: MA Experiment 20001560 PARAMETER Experiment Name: At_Drought_Soil_Dry_P Parameter: Timepoint (day) Value: 14
  misc_feature: MA Experiment 20001560 PARAMETER Experiment Name: At_Drought_Soil_Dry_P Parameter: Treatment Value: Drought vs. No Drought
ctcttctctcttctcctctgatcccaccacacttttgaactttcactcaatggcgatgcagcttcctccgacgacactttacgccggaagatcctccgtggtcttacctccgacgactccaaccctccagagatcatctttcttgccttattactcgatgaggctactcggaaacaagaagtctctttccaaatcctctgctcctagattctccatgcgtgtctcctctaagcaagcctatatttgccgtgattgcgggtatatttacaatgatagaactccatttgacaagttacctgataactatttctgtccagtgtgtgctgctcctaaacggcggtttagagcttacatgcctgatgtgagcaagaatgtcaacgacaaagatgtgagaaaggctagaaaagctgagctccaaagagacgaagccgtcgggaaggctctacctataggaattgcagttggggttttagctctcgcagctctttacttctatgtcaatagcacctcatgaatgcagtatcaagagagactacactctgcttttggaatcatttttttgttctgtataaacattcatcttcgacttgttgaccactactgtaatgaagtaaagtattgagctttctatgtaccaaaact

SEQ ID NO: 20943 - protein, 170 aa, Arabidopsis thaliana
  peptide (1)..(170): Ceres Seq. ID no. 12322268
  misc_feature (77)..(114): Pfam Name: Rubredoxin Pfam Description: Rubredoxin
  misc_feature (60)..(125): Homolog of NCBI NO: 34905300 NR Description: P0577B11.21 [Oryza sativa (japonica
  misc_feature (60)..(125): Homolog of NCBI NO: 18418200 NR Description: expressed protein
  misc_feature (17)..(170): Homolog of NCBI NO: 18423226 NR Description: expressed protein
SSLFSSDPTTLLNFHSMAMQLPPTTLYAGRSSVVLPPTTPTLQRSSFLPYYSMRLLGNKKSLSKSSAPRFSMRVSSKQAYICRDCGYIYNDRTPFDKLPDNYFCPVCAAPKRRFRAYMPDVSKNVNDKDVRKARKAELQRDEAVGKALPIGIAVGVLALAALYFYVNSTS

SEQ ID NO: 20944 - protein, 154 aa, Arabidopsis thaliana
  peptide (1)..(154): Ceres Seq. ID no. 12322269
  misc_feature (61)..(98): Pfam Name: Rubredoxin Pfam Description: Rubredoxin
  misc_feature (44)..(109): Homolog of NCBI NO: 34905300 NR Description: P0577B11.21 [Oryza sativa (japonica
  misc_feature (44)..(109): Homolog of NCBI NO: 18418200 NR Description: expressed protein
  misc_feature (1)..(154): Homolog of NCBI NO: 18423226 NR Description: expressed protein
MAMQLPPTTLYAGRSSVVLPPTTPTLQRSSFLPYYSMRLLGNKKSLSKSSAPRFSMRVSSKQAYICRDCGYIYNDRTPFDKLPDNYFCPVCAAPKRRFRAYMPDVSKNVNDKDVRKARKAELQRDEAVGKALPIGIAVGVLALAALYFYVNSTS

SEQ ID NO: 20945 - protein, 152 aa, Arabidopsis thaliana
  peptide (1)..(152): Ceres Seq. ID no. 12322270
  misc_feature (59)..(96): Pfam Name: Rubredoxin Pfam Description: Rubredoxin
  misc_feature (42)..(107): Homolog of NCBI NO: 34905300 NR Description: P0577B11.21 [Oryza sativa (japonica
  misc_feature (42)..(107): Homolog of NCBI NO: 18418200 NR Description: expressed protein
  misc_feature (1)..(152): Homolog of NCBI NO: 18423226 NR Description: expressed protein
MQLPPTTLYAGRSSVVLPPTTPTLQRSSFLPYYSMRLLGNKKSLSKSSAPRFSMRVSSKQAYICRDCGYIYNDRTPFDKLPDNYFCPVCAAPKRRFRAYMPDVSKNVNDKDVRKARKAELQRDEAVGKALPIGIAVGVLALAALYFYVNSTS

SEQ ID NO: 20946 - DNA, 1798 bp, Arabidopsis thaliana
  misc_feature (1)..(1798): Ceres Seq. ID no. 12334515
  misc_feature: MA Experiment ID: 108434 Result: Down-regulated in Transcription
  misc_feature: MA Experiment 108434 PARAMETER Experiment Name: At_Root_Tips_cDNA_P Parameter: Tissue Value: Root Tips
  misc_feature: MA Experiment ID: 108464 Result: Up-regulated in Transcription
  misc_feature: MA Experiment 108464 PARAMETER Experiment Name: At_Germinating_Seeds_cDNA_P Parameter: Age (day) Value: 4 vs. 0
  misc_feature: MA Experiment 108464 PARAMETER Experiment Name: At_Germinating_Seeds_cDNA_P Parameter: Tissue Value: Germinating Seeds
  misc_feature: MA Experiment ID: 108574 Result: Up-regulated in Transcription
  misc_feature: MA Experiment 108574 PARAMETER Experiment Name: At_Wounding__cDNA_P Parameter: Timepoint (hr) Value: 1
  misc_feature: MA Experiment 108574 PARAMETER Experiment Name: At_Wounding__cDNA_P Parameter: Tissue Value: Aerial
  misc_feature: MA Experiment 108574 PARAMETER Experiment Name: At_Wounding__cDNA_P Parameter: Treatment Value: Wounding vs. No Wounding
  misc_feature: MA Experiment ID: 108579 Result: Up-regulated in Transcription
  misc_feature: MA Experiment 108579 PARAMETER Experiment Name: At_4deg_Cold_cDNA_P Parameter: Temperature (deg C) Value: 4 vs. 22
  misc_feature: MA Experiment 108579 PARAMETER Experiment Name: At_4deg_Cold_cDNA_P Parameter: Timepoint (hr) Value: 6
  misc_feature: MA Experiment 108579 PARAMETER Experiment Name: At_4deg_Cold_cDNA_P Parameter: Tissue Value: Aerial
  misc_feature: MA Experiment ID: 108585 Result: Up-regulated in Transcription
  misc_feature: MA Experiment 108585 PARAMETER Experiment Name: At_5mM_NaNP_cDNA_P Parameter: Timepoint (hr) Value: 6
  misc_feature: MA Experiment 108585 PARAMETER Experiment Name: At_5mM_NaNP_cDNA_P Parameter: Tissue Value: Aerial
  misc_feature: MA Experiment 108585 PARAMETER Experiment Name: At_5mM_NaNP_cDNA_P Parameter: Treatment Value: null
  misc_feature: MA Experiment ID: 108594 Result: Down-regulated in Transcription
  misc_feature: MA Experiment 108594 PARAMETER Experiment Name: At_Ler-rhl_Root_cDNA_P Parameter: Plant Line Value: null
  misc_feature: MA Experiment ID: 108668 Result: Up-regulated in Transcription
  misc_feature: MA Experiment 108668 PARAMETER Experiment Name: At_2mM_SA_cDNA_P Parameter: Plant Line Value: WS
  misc_feature: MA Experiment 108668 PARAMETER Experiment Name: At_2mM_SA_cDNA_P Parameter: Timepoint (hr) Value: 6
  misc_feature: MA Experiment 108668 PARAMETER Experiment Name: At_2mM_SA_cDNA_P Parameter: Treatment Value: 2mM SA vs. No Treatment
  misc_feature: MA Experiment ID: 20000069 Result: Up-regulated in Transcription
  misc_feature: MA Experiment 20000069 PARAMETER Experiment Name: At_100uM_ABA_Mutants_cDNA_P Parameter: Plant Line Value: CS23
  misc_feature: MA Experiment 20000069 PARAMETER Experiment Name: At_100uM_ABA_Mutants_cDNA_P Parameter: Timepoint (hr) Value: 6
  misc_feature: MA Experiment 20000069 PARAMETER Experiment Name: At_100uM_ABA_Mutants_cDNA_P Parameter: Tissue Value: Aerial
  misc_feature: MA Experiment 20000069 PARAMETER Experiment Name: At_100uM_ABA_Mutants_cDNA_P Parameter: Treatment Value: 100uM ABA vs. No Treatment
  misc_feature: MA Experiment ID: 20000070 Result: Up-regulated in Transcription
  misc_feature: MA Experiment 20000070 PARAMETER Experiment Name: At_100uM_ABA_Mutants_cDNA_P Parameter: Plant Line Value: CS24
  misc_feature: MA Experiment 20000070 PARAMETER Experiment Name: At_100uM_ABA_Mutants_cDNA_P Parameter: Timepoint (hr) Value: 6
  misc_feature: MA Experiment 20000070 PARAMETER Experiment Name: At_100uM_ABA_Mutants_cDNA_P Parameter: Tissue Value: Aerial
  misc_feature: MA Experiment 20000070 PARAMETER Experiment Name: At_100uM_ABA_Mutants_cDNA_P Parameter: Treatment Value: 100uM ABA vs. No Treatment
  misc_feature: MA Experiment ID: 20000071 Result: Up-regulated in Transcription
  misc_feature: MA Experiment 20000071 PARAMETER Experiment Name: At_100uM_ABA_Mutants_cDNA_P Parameter: Plant Line Value: CS8104
  misc_feature: MA Experiment 20000071 PARAMETER Experiment Name: At_100uM_ABA_Mutants_cDNA_P Parameter: Timepoint (hr) Value: 6
  misc_feature: MA Experiment 20000071 PARAMETER Experiment Name: At_100uM_ABA_Mutants_cDNA_P Parameter: Tissue Value: Aerial
  misc_feature: MA Experiment 20000071 PARAMETER Experiment Name: At_100uM_ABA_Mutants_cDNA_P Parameter: Treatment Value: 100uM ABA vs. No Treatment
  misc_feature: MA Experiment ID: 20000182 Result: Up-regulated in Transcription
  misc_feature: MA Experiment 20000182 PARAMETER Experiment Name: At_2mM_SA_P Parameter: Age (day) Value: 14
  misc_feature: MA Experiment 20000182 PARAMETER Experiment Name: At_2mM_SA_P Parameter: Organism Value: A. thaliana
  misc_feature: MA Experiment 20000182 PARAMETER Experiment Name: At_2mM_SA_P Parameter: Plant Line Value: WS
  misc_feature: MA Experiment 20000182 PARAMETER Experiment Name: At_2mM_SA_P Parameter: Timepoint (hr) Value: 6
  misc_feature: MA Experiment 20000182 PARAMETER Experiment Name: At_2mM_SA_P Parameter: Tissue Value: Aerial
  misc_feature: MA Experiment 20000182 PARAMETER Experiment Name: At_2mM_SA_P Parameter: Treatment Value: 2mM SA vs. No Treatment
  misc_feature: MA Experiment ID: 20000224 Result: Up-regulated in Transcription
  misc_feature: MA Experiment ID: 20000234 Result: Down-regulated in Transcription
  misc_feature: MA Experiment 20000234 PARAMETER Experiment Name: At_Siliques_P Parameter: Age (day) Value: 21
  misc_feature: MA Experiment 20000234 PARAMETER Experiment Name: At_Siliques_P Parameter: Organism Value: A. thaliana
  misc_feature: MA Experiment 20000234 PARAMETER Experiment Name: At_Siliques_P Parameter: Plant Line Value: WS
  misc_feature: MA Experiment 20000234 PARAMETER Experiment Name: At_Siliques_P Parameter: Tissue Value: Less Than 5mm Siliques vs. Whole Plant
  misc_feature: MA Experiment ID: 20000235 Result: Down-regulated in Transcription
  misc_feature: MA Experiment 20000235 PARAMETER Experiment Name: At_Siliques_P Parameter: Age (day) Value: 21
  misc_feature: MA Experiment 20000235 PARAMETER Experiment Name: At_Siliques_P Parameter: Organism Value: A. thaliana
  misc_feature: MA Experiment 20000235 PARAMETER Experiment Name: At_Siliques_P Parameter: Plant Line Value: WS
  misc_feature: MA Experiment 20000235 PARAMETER Experiment Name: At_Siliques_P Parameter: Tissue Value: 5-10mm Siliques vs. Whole Plant
  misc_feature: MA Experiment ID: 20000264 Result: Down-regulated in Transcription
  misc_feature: MA Experiment 20000264 PARAMETER Experiment Name: At_Open_Flower_P Parameter: Age (day) Value: 21
  misc_feature: MA Experiment 20000264 PARAMETER Experiment Name: At_Open_Flower_P Parameter: Plant Line Value: WS
  misc_feature: MA Experiment 20000264 PARAMETER Experiment Name: At_Open_Flower_P Parameter: Tissue Value: Open Flower vs. Whole Plant
  misc_feature: MA Experiment ID: 20000495 Result: Down-regulated in Transcription
  misc_feature: MA Experiment 20000495 PARAMETER Experiment Name: At_Guard_Cells_P Parameter: Harvest Date Value: 8/2/2002
  misc_feature: MA Experiment 20000495 PARAMETER Experiment Name: At_Guard_Cells_P Parameter: Organism Value: A. thaliana
  misc_feature: MA Experiment 20000495 PARAMETER Experiment Name: At_Guard_Cells_P Parameter: Tissue Value: Guard Cells vs. Leaves
  misc_feature: MA Experiment ID: 20001247 Result: Up-regulated in Transcription
  misc_feature: MA Experiment 20001247 PARAMETER Experiment Name: At_Far-red-induction_P Parameter: Age (day) Value: 7
  misc_feature: MA Experiment 20001247 PARAMETER Experiment Name: At_Far-red-induction_P Parameter: Light Value: Far-red vs. White
  misc_feature: MA Experiment 20001247 PARAMETER Experiment Name: At_Far-red-induction_P Parameter: Organism Value: A. thaliana
  misc_feature: MA Experiment 20001247 PARAMETER Experiment Name: At_Far-red-induction_P Parameter: Plant Line Value: Columbia
  misc_feature: MA Experiment 20001247 PARAMETER Experiment Name: At_Far-red-induction_P Parameter: Timepoint (hr) Value: 1
  misc_feature: MA Experiment 20001247 PARAMETER Experiment Name: At_Far-red-induction_P Parameter: Tissue Value: Whole Plant
  misc_feature: MA Experiment ID: 20001557 Result: Up-regulated in Transcription
  misc_feature: MA Experiment 20001557 PARAMETER Experiment Name: At_Drought_Soil_Dry_P Parameter: Age (day) Value: 27
  misc_feature: MA Experiment 20001557 PARAMETER Experiment Name: At_Drought_Soil_Dry_P Parameter: Organism Value: A. thaliana
  misc_feature: MA Experiment 20001557 PARAMETER Experiment Name: At_Drought_Soil_Dry_P Parameter: Plant Line Value: WS
  misc_feature: MA Experiment 20001557 PARAMETER Experiment Name: At_Drought_Soil_Dry_P Parameter: Post Timepoint (hr) Value: 3
  misc_feature: MA Experiment 20001557 PARAMETER Experiment Name: At_Drought_Soil_Dry_P Parameter: Post-Treatment Value: Re-Water vs. No Drought
  misc_feature: MA Experiment 20001557 PARAMETER Experiment Name: At_Drought_Soil_Dry_P Parameter: Timepoint (day) Value: 13
  misc_feature: MA Experiment 20001557 PARAMETER Experiment Name: At_Drought_Soil_Dry_P Parameter: Treatment Value: Drought vs. No Drought
  misc_feature: MA Experiment ID: 20001905 Result: Up-regulated in Transcription
  misc_feature: MA Experiment 20001905 PARAMETER Experiment Name: At_Drought_Reproduction_P Parameter: Age (day) Value: 40
  misc_feature: MA Experiment 20001905 PARAMETER Experiment Name: At_Drought_Reproduction_P Parameter: Organism Value: A. thaliana
  misc_feature: MA Experiment 20001905 PARAMETER Experiment Name: At_Drought_Reproduction_P Parameter: Plant Line Value: WS
  misc_feature: MA Experiment 20001905 PARAMETER Experiment Name: At_Drought_Reproduction_P Parameter: Timepoint (day) Value: 10
  misc_feature: MA Experiment 20001905 PARAMETER Experiment Name: At_Drought_Reproduction_P Parameter: Tissue Value: Rosettes
  misc_feature: MA Experiment 20001905 PARAMETER Experiment Name: At_Drought_Reproduction_P Parameter: Treatment Value: Drought vs. No Drought
aaatcagtttctcaacgaatctttctaaacaagacaaaggatcaagaacactacttgttctttgtctgagacttcaaacacaagaaaccaaaaatagaaaaagatatgagagagctttttatgtatctatttcttcttttcttagttctatgtgtcaaatctgtttattctactccgacaagagaacaattccaaaattgcttgtccacaaaacaattcaattctaccctcaaaaaccctataaatctcaccactcatacactagattcccgagttcacaccgacttttccgagtcttcatctccaaattctagtttcctcaacttgaatttcacaagcttgaagccgattctcatcgttaagccaaaatccgaatccgaaataaaacaatcgattttatgcagcaggaaacttggagtgcaagtaagaacaatgagtggtggtcatgactacgaaggtctatcttacctctcactatcacttttcataatcgtcgacctcgttaacctcagatcaatcagcatcaacctcacagacgagaccgcttggatccaatcgggcgcaacactcggcgaagtctactacaagatcgccaaaaccagcaagatccatgcctttgccgcagggatatgtccaagtgttggtgttggtggacatattagcggaggaggattcggtacaataatgaggaaatacggtttagcgtctgataacgttgtggacgcacgtttgatggatgtaaatgggaaaactcttgaccggaaaacgatgggagaggatttgttttgggcgcttagaggcggtggagctgcgagttttggcgttgtcttgtcgtggaaggttaagcttgctagggttcctgaaaaggtaacttgtttcataagtcaacatccgatgggacctagcatgaacaagcttgttcatagatggcaatccataggatcagagctagacgaagatttattcatcagagtcattattgacaacagtctagaagggaatcaaagaaaagtgaaatcaacatttcaaactctatttcttggtggaatcgatagactgattcctctgatgaaccagaagtttccggaactcggcttacgatctcaagactgttcggaaatgagctggatcgaatcgataatgttcttcaactggagatcaggacagccgttagagattttgctcaacagagacctaagattcgaggatcagtatttcaaagcaaagtcagattatgttcaaaaacccgttcctgaaaacgttttcgaagaagtaaccaagagatttctcgagcaagatactccactgatgatctttgagccattgggtgggaaaatcagcaagatttcagaaacagaatctccatatccacacagaagaggtaatctgtataatatacagtacatggtgaaatggaaagtgaatgaagtcgaggagatgaacaaacatgtcaggtggatgagatcgttacacgattacatgactccgtatgtttctaaatcgccgagaggagcttatttgaattacagagatcttgatttgggctcgaccaaagggattaacacgagtttcgaagatgcaaggaaatggggtgagacttatttcaaaggtaatttcaagagattaggtttggttaaagggaagattgatccaacaaatttcttcaggaacgaacagagtattcctcctctgttttgagtcctcaatacaaaaccagatataaaagatgtcatttcattttttcaattataatagataatgtaactttctgctacaattgtaaaagtgagatgtaccc

SEQ ID NO: 20947 - protein, 530 aa, Arabidopsis thaliana
  peptide (1)..(530): Ceres Seq. ID no. 12334516
  misc_feature (81)..(236): Pfam Name: FAD binding domain Pfam Description: FAD binding domain
  misc_feature (26)..(528): Homolog of NCBI NO: 15233411 NR Description: FAD-linked oxidoreductase family; protein id:
  misc_feature (7)..(529): Homolog of NCBI NO: 18652398 NR Description: carbohydrate oxidase [Lactuca sativa]
  misc_feature (7)..(529): Homolog of NCBI NO: 13161397 NR Description: CPRD2 [Vigna unguiculata]
  misc_feature (8)..(527): Homolog of NCBI NO: 15226830 NR Description: FAD-linked oxidoreductase family; protein id:
  misc_feature (5)..(527): Homolog of NCBI NO: 15220954 NR Description: FAD-linked oxidoreductase family
  misc_feature (4)..(529): Homolog of NCBI NO: 15241494 NR Description: FAD-linked oxidoreductase family
  misc_feature (3)..(529): Homolog of NCBI NO: 15241474 NR Description: FAD-linked oxidoreductase family; protein id:
  misc_feature (1)..(453): Homolog of NCBI NO: 24417282 NR Description: unknown [Arabidopsis thaliana]
  misc_feature (1)..(530): Homolog of NCBI NO: 15233424 NR Description: FAD-linked oxidoreductase family
  misc_feature (1)..(530): Homolog of NCBI NO: 14194127 NR Description: AT4g20860/T13K14_20 [Arabidopsis thaliana]
MRELFMYLFLLFLVLCVKSVYSTPTREQFQNCLSTKQFNSTLKNPINLTTHTLDSRVHTDFSESSSPNSSFLNLNFTSLKPILIVKPKSESEIKQSILCSRKLGVQVRTMSGGHDYEGLSYLSLSLFIIVDLVNLRSISINLTDETAWIQSGATLGEVYYKIAKTSKIHAFAAGICPSVGVGGHISGGGFGTIMRKYGLASDNVVDARLMDVNGKTLDRKTMGEDLFWALRGGGAASFGVVLSWKVKLARVPEKVTCFISQHPMGPSMNKLVHRWQSIGSELDEDLFIRVIIDNSLEGNQRKVKSTFQTLFLGGIDRLIPLMNQKFPELGLRSQDCSEMSWIESIMFFNWRSGQPLEILLNRDLRFEDQYFKAKSDYVQKPVPENVFEEVTKRFLEQDTPLMIFEPLGGKISKISETESPYPHRRGNLYNIQYMVKWKVNEVEEMNKHVRWMRSLHDYMTPYVSKSPRGAYLNYRDLDLGSTKGINTSFEDARKWGETYFKGNFKRLGLVKGKIDPTNFFRNEQSIPPLF

SEQ ID NO: 20948 - protein, 525 aa, Arabidopsis thaliana
  peptide (1)..(525): Ceres Seq. ID no. 12334517
  misc_feature (76)..(231): Pfam Name: FAD binding domain Pfam Description: FAD binding domain
  misc_feature (21)..(523): Homolog of NCBI NO: 15233411 NR Description: FAD-linked oxidoreductase family; protein id:
  misc_feature (2)..(524): Homolog of NCBI NO: 18652398 NR Description: carbohydrate oxidase [Lactuca sativa]
  misc_feature (2)..(524): Homolog of NCBI NO: 13161397 NR Description: CPRD2 [Vigna unguiculata]
  misc_feature (3)..(522): Homolog of NCBI NO: 15226830 NR Description: FAD-linked oxidoreductase family; protein id:
  misc_feature (1)..(522): Homolog of NCBI NO: 15220954 NR Description: FAD-linked oxidoreductase family
  misc_feature (1)..(524): Homolog of NCBI NO: 15241494 NR Description: FAD-linked oxidoreductase family
  misc_feature (1)..(524): Homolog of NCBI NO: 15241474 NR Description: FAD-linked oxidoreductase family; protein id:
  misc_feature (1)..(448): Homolog of NCBI NO: 24417282 NR Description: unknown [Arabidopsis thaliana]
  misc_feature (1)..(525): Homolog of NCBI NO: 15233424 NR Description: FAD-linked oxidoreductase family
  misc_feature (1)..(525): Homolog of NCBI NO: 14194127 NR Description: AT4g20860/T13K14_20 [Arabidopsis thaliana]
MYLFLLFLVLCVKSVYSTPTREQFQNCLSTKQFNSTLKNPINLTTHTLDSRVHTDFSESSSPNSSFLNLNFTSLKPILIVKPKSESEIKQSILCSRKLGVQVRTMSGGHDYEGLSYLSLSLFIIVDLVNLRSISINLTDETAWIQSGATLGEVYYKIAKTSKIHAFAAGICPSVGVGGHISGGGFGTIMRKYGLASDNVVDARLMDVNGKTLDRKTMGEDLFWALRGGGAASFGVVLSWKVKLARVPEKVTCFISQHPMGPSMNKLVHRWQSIGSELDEDLFIRVIIDNSLEGNQRKVKSTFQTLFLGGIDRLIPLMNQKFPELGLRSQDCSEMSWIESIMFFNWRSGQPLEILLNRDLRFEDQYFKAKSDYVQKPVPENVFEEVTKRFLEQDTPLMIFEPLGGKISKISETESPYPHRRGNLYNIQYMVKWKVNEVEEMNKHVRWMRSLHDYMTPYVSKSPRGAYLNYRDLDLGSTKGINTSFEDARKWGETYFKGNFKRLGLVKGKIDPTNFFRNEQSIPPLF

SEQ ID NO: 20949 - protein, 421 aa, Arabidopsis thaliana
  peptide (1)..(421): Ceres Seq. ID no. 12334518
  misc_feature (1)..(127): Pfam Name: FAD binding domain Pfam Description: FAD binding domain
  misc_feature (1)..(419): Homolog of NCBI NO: 15233411 NR Description: FAD-linked oxidoreductase family; protein id:
  misc_feature (1)..(420): Homolog of NCBI NO: 18652398 NR Description: carbohydrate oxidase [Lactuca sativa]
  misc_feature (1)..(420): Homolog of NCBI NO: 13161397 NR Description: CPRD2 [Vigna unguiculata]
  misc_feature (1)..(418): Homolog of NCBI NO: 15226830 NR Description: FAD-linked oxidoreductase family; protein id:
  misc_feature (1)..(418): Homolog of NCBI NO: 15220954 NR Description: FAD-linked oxidoreductase family
  misc_feature (1)..(420): Homolog of NCBI NO: 15241494 NR Description: FAD-linked oxidoreductase family
  misc_feature (1)..(420): Homolog of NCBI NO: 15241474 NR Description: FAD-linked oxidoreductase family; protein id:
  misc_feature (1)..(344): Homolog of NCBI NO: 24417282 NR Description: unknown [Arabidopsis thaliana]
  misc_feature (1)..(421): Homolog of NCBI NO: 15233424 NR Description: FAD-linked oxidoreductase family
  misc_feature (1)..(421): Homolog of NCBI NO: 14194127 NR Description: AT4g20860/T13K14_20 [Arabidopsis thaliana]
MSGGHDYEGLSYLSLSLFIIVDLVNLRSISINLTDETAWIQSGATLGEVYYKIAKTSKIHAFAAGICPSVGVGGHISGGGFGTIMRKYGLASDNVVDARLMDVNGKTLDRKTMGEDLFWALRGGGAASFGVVLSWKVKLARVPEKVTCFISQHPMGPSMNKLVHRWQSIGSELDEDLFIRVIIDNSLEGNQRKVKSTFQTLFLGGIDRLIPLMNQKFPELGLRSQDCSEMSWIESIMFFNWRSGQPLEILLNRDLRFEDQYFKAKSDYVQKPVPENVFEEVTKRFLEQDTPLMIFEPLGGKISKISETESPYPHRRGNLYNIQYMVKWKVNEVEEMNKHVRWMRSLHDYMTPYVSKSPRGAYLNYRDLDLGSTKGINTSFEDARKWGETYFKGNFKRLGLVKGKIDPTNFFRNEQSIPPLF

SEQ ID NO: 20950 - DNA, 1243 bp, Arabidopsis thaliana
  misc_feature (1)..(1243): Ceres Seq. ID no. 12394450
  misc_feature: MA Experiment ID: 108434 Result: Down-regulated in Transcription
  misc_feature: MA Experiment 108434 PARAMETER Experiment Name: At_Root_Tips_cDNA_P Parameter: Tissue Value: Root Tips
  misc_feature: MA Experiment ID: 108461 Result: Up-regulated in Transcription
  misc_feature: MA Experiment 108461 PARAMETER Experiment Name: At_Germinating_Seeds_cDNA_P Parameter: Age (day) Value: 1 vs. 0
  misc_feature: MA Experiment 108461 PARAMETER Experiment Name: At_Germinating_Seeds_cDNA_P Parameter: Tissue Value: Germinating Seeds
  misc_feature: MA Experiment ID: 108462 Result: Up-regulated in Transcription
  misc_feature: MA Experiment 108462 PARAMETER Experiment Name: At_Germinating_Seeds_cDNA_P Parameter: Age (day) Value: 2 vs. 0
  misc_feature: MA Experiment 108462 PARAMETER Experiment Name: At_Germinating_Seeds_cDNA_P Parameter: Tissue Value: Germinating Seeds
  misc_feature: MA Experiment ID: 108463 Result: Up-regulated in Transcription
  misc_feature: MA Experiment 108463 PARAMETER Experiment Name: At_Germinating_Seeds_cDNA_P Parameter: Age (day) Value: 3 vs. 0
  misc_feature: MA Experiment 108463 PARAMETER Experiment Name: At_Germinating_Seeds_cDNA_P Parameter: Tissue Value: Germinating Seeds
  misc_feature: MA Experiment ID: 108464 Result: Up-regulated in Transcription
  misc_feature: MA Experiment 108464 PARAMETER Experiment Name: At_Germinating_Seeds_cDNA_P Parameter: Age (day) Value: 4 vs. 0
  misc_feature: MA Experiment 108464 PARAMETER Experiment Name: At_Germinating_Seeds_cDNA_P Parameter: Tissue Value: Germinating Seeds
  misc_feature: MA Experiment ID: 108474 Result: Down-regulated in Transcription
  misc_feature: MA Experiment 108474 PARAMETER Experiment Name: At_Drought_Flowers_cDNA_P Parameter: Timepoint (hr) Value: null
  misc_feature: MA Experiment 108474 PARAMETER Experiment Name: At_Drought_Flowers_cDNA_P Parameter: Treatment Value: Drought vs. No Drought
  misc_feature: MA Experiment ID: 108594 Result: Down-regulated in Transcription
  misc_feature: MA Experiment 108594 PARAMETER Experiment Name: At_Ler-rhl_Root_cDNA_P Parameter: Plant Line Value: null
  misc_feature: MA Experiment ID: 108609 Result: Up-regulated in Transcription
  misc_feature: MA Experiment 108609 PARAMETER Experiment Name: At_100uM_ABA_cDNA_P Parameter: Timepoint (hr) Value: 24
  misc_feature: MA Experiment 108609 PARAMETER Experiment Name: At_100uM_ABA_cDNA_P Parameter: Tissue Value: Aerial
  misc_feature: MA Experiment 108609 PARAMETER Experiment Name: At_100uM_ABA_cDNA_P Parameter: Treatment Value: 100uM ABA vs. No Treatment
  misc_feature: MA Experiment ID: 20000071 Result: Up-regulated in Transcription
  misc_feature: MA Experiment 20000071 PARAMETER Experiment Name: At_100uM_ABA_Mutants_cDNA_P Parameter: Plant Line Value: CS8104
  misc_feature: MA Experiment 20000071 PARAMETER Experiment Name: At_100uM_ABA_Mutants_cDNA_P Parameter: Timepoint (hr) Value: 6
  misc_feature: MA Experiment 20000071 PARAMETER Experiment Name: At_100uM_ABA_Mutants_cDNA_P Parameter: Tissue Value: Aerial
  misc_feature: MA Experiment 20000071 PARAMETER Experiment Name: At_100uM_ABA_Mutants_cDNA_P Parameter: Treatment Value: 100uM ABA vs. No Treatment
  misc_feature: MA Experiment ID: 20000087 Result: Up-regulated in Transcription
  misc_feature: MA Experiment 20000087 PARAMETER Experiment Name: At_100uM_ABA_Mutants_cDNA_P Parameter: Plant Line Value: WS
  misc_feature: MA Experiment 20000087 PARAMETER Experiment Name: At_100uM_ABA_Mutants_cDNA_P Parameter: Timepoint (hr) Value: 6
  misc_feature: MA Experiment 20000087 PARAMETER Experiment Name: At_100uM_ABA_Mutants_cDNA_P Parameter: Tissue Value: Aerial
  misc_feature: MA Experiment 20000087 PARAMETER Experiment Name: At_100uM_ABA_Mutants_cDNA_P Parameter: Treatment Value: 100uM ABA vs. No Treatment
  misc_feature: MA Experiment ID: 20000184 Result: Up-regulated in Transcription
  misc_feature: MA Experiment 20000184 PARAMETER Experiment Name: At_Shoots__P Parameter: Age (day) Value: 7
  misc_feature: MA Experiment 20000184 PARAMETER Experiment Name: At_Shoots__P Parameter: Tissue Value: Shoots vs. Whole Plant
  misc_feature: MA Experiment ID: 20000185 Result: Up-regulated in Transcription
  misc_feature: MA Experiment 20000185 PARAMETER Experiment Name: At_Roots__P Parameter: Age (day) Value: 7 vs. 21
  misc_feature: MA Experiment 20000185 PARAMETER Experiment Name: At_Roots__P Parameter: Organism Value: A. thaliana
  misc_feature: MA Experiment 20000185 PARAMETER Experiment Name: At_Roots__P Parameter: Tissue Value: Roots vs. Whole Plant
  misc_feature: MA Experiment ID: 20000234 Result: Up-regulated in Transcription
  misc_feature: MA Experiment 20000234 PARAMETER Experiment Name: At_Siliques_P Parameter: Age (day) Value: 21
  misc_feature: MA Experiment 20000234 PARAMETER Experiment Name: At_Siliques_P Parameter: Organism Value: A. thaliana
  misc_feature: MA Experiment 20000234 PARAMETER Experiment Name: At_Siliques_P Parameter: Plant Line Value: WS
  misc_feature: MA Experiment 20000234 PARAMETER Experiment Name: At_Siliques_P Parameter: Tissue Value: Less Than 5mm Siliques vs. Whole Plant
  misc_feature: MA Experiment ID: 20000235 Result: Up-regulated in Transcription
  misc_feature: MA Experiment 20000235 PARAMETER Experiment Name: At_Siliques_P Parameter: Age (day) Value: 21
  misc_feature: MA Experiment 20000235 PARAMETER Experiment Name: At_Siliques_P Parameter: Organism Value: A. thaliana
  misc_feature: MA Experiment 20000235 PARAMETER Experiment Name: At_Siliques_P Parameter: Plant Line Value: WS
  misc_feature: MA Experiment 20000235 PARAMETER Experiment Name: At_Siliques_P Parameter: Tissue Value: 5-10mm Siliques vs. Whole Plant
  misc_feature: MA Experiment ID: 20000286 Result: Up-regulated in Transcription
  misc_feature: MA Experiment 20000286 PARAMETER Experiment Name: At_Open_Flower_P Parameter: Age (day) Value: 21
  misc_feature: MA Experiment 20000286 PARAMETER Experiment Name: At_Open_Flower_P Parameter: Plant Line Value: WS
  misc_feature: MA Experiment 20000286 PARAMETER Experiment Name: At_Open_Flower_P Parameter: Tissue Value: Half Open vs. Whole Plant
  misc_feature: MA Experiment ID: 20000436 Result: Up-regulated in Transcription
  misc_feature: MA Experiment 20000436 PARAMETER Experiment Name: At_Drought_P Parameter: Age (day) Value: 7
  misc_feature: MA Experiment 20000436 PARAMETER Experiment Name: At_Drought_P Parameter: Organism Value: A. thaliana
  misc_feature: MA Experiment 20000436 PARAMETER Experiment Name: At_Drought_P Parameter: Plant Line Value: WS
  misc_feature: MA Experiment 20000436 PARAMETER Experiment Name: At_Drought_P Parameter: Timepoint (hr) Value: 12
  misc_feature: MA Experiment 20000436 PARAMETER Experiment Name: At_Drought_P Parameter: Tissue Value: Whole Plant
  misc_feature: MA Experiment 20000436 PARAMETER Experiment Name: At_Drought_P Parameter: Treatment Value: Drought vs. No Drought
  misc_feature: MA Experiment ID: 20000439 Result: Up-regulated in Transcription
  misc_feature: MA Experiment 20000439 PARAMETER Experiment Name: At_Roots__P Parameter: Age (day) Value: 14 vs. 21
  misc_feature: MA Experiment 20000439 PARAMETER Experiment Name: At_Roots__P Parameter: Organism Value: A. thaliana
  misc_feature: MA Experiment 20000439 PARAMETER Experiment Name: At_Roots__P Parameter: Tissue Value: Roots vs. Whole Plant
  misc_feature: MA Experiment ID: 20000453 Result: Up-regulated in Transcription
  misc_feature: MA Experiment 20000453 PARAMETER Experiment Name: At_100uM_ABA_P Parameter: Age (day) Value: 15
  misc_feature: MA Experiment 20000453 PARAMETER Experiment Name: At_100uM_ABA_P Parameter: Organism Value: A. thaliana
  misc_feature: MA Experiment 20000453 PARAMETER Experiment Name: At_100uM_ABA_P Parameter: Plant Line Value: WS
  misc_feature: MA Experiment 20000453 PARAMETER Experiment Name: At_100uM_ABA_P Parameter: Timepoint (hr) Value: 24
  misc_feature: MA Experiment 20000453 PARAMETER Experiment Name: At_100uM_ABA_P Parameter: Tissue Value: Aerial
  misc_feature: MA Experiment 20000453 PARAMETER Experiment Name: At_100uM_ABA_P Parameter: Treatment Value: 100uM ABA vs. No Treatment
  misc_feature: MA Experiment ID: 20000794 Result: Down-regulated in Transcription
  misc_feature: MA Experiment 20000794 PARAMETER Experiment Name: At_Petals_P Parameter: Age (day) Value: 23-25 days
  misc_feature: MA Experiment 20000794 PARAMETER Experiment Name: At_Petals_P Parameter: Plant Line Value: WS
  misc_feature: MA Experiment 20000794 PARAMETER Experiment Name: At_Petals_P Parameter: Tissue Value: Petals vs. Whole plant
  misc_feature: MA Experiment ID: 20001248 Result: Down-regulated in Transcription
  misc_feature: MA Experiment 20001248 PARAMETER Experiment Name: At_Far-red-induction_P Parameter: Age (day) Value: 7
  misc_feature: MA Experiment 20001248 PARAMETER Experiment Name: At_Far-red-induction_P Parameter: Light Value: Far-red vs. White
  misc_feature: MA Experiment 20001248 PARAMETER Experiment Name: At_Far-red-induction_P Parameter: Organism Value: A. thaliana
  misc_feature: MA Experiment 20001248 PARAMETER Experiment Name: At_Far-red-induction_P Parameter: Plant Line Value: Columbia
  misc_feature: MA Experiment 20001248 PARAMETER Experiment Name: At_Far-red-induction_P Parameter: Timepoint (hr) Value: 4
  misc_feature: MA Experiment 20001248 PARAMETER Experiment Name: At_Far-red-induction_P Parameter: Tissue Value: Whole Plant
  misc_feature: MA Experiment ID: 20001450 Result: Down-regulated in Transcription
  misc_feature: MA Experiment 20001450 PARAMETER Experiment Name: At_Far-red-induction_P Parameter: Age (day) Value: 7
  misc_feature: MA Experiment 20001450 PARAMETER Experiment Name: At_Far-red-induction_P Parameter: Light Value: Far-red vs. White
  misc_feature: MA Experiment 20001450 PARAMETER Experiment Name: At_Far-red-induction_P Parameter: Organism Value: A. thaliana
  misc_feature: MA Experiment 20001450 PARAMETER Experiment Name: At_Far-red-induction_P Parameter: Plant Line Value: Columbia
  misc_feature: MA Experiment 20001450 PARAMETER Experiment Name: At_Far-red-induction_P Parameter: Timepoint (hr) Value: 8
  misc_feature: MA Experiment 20001450 PARAMETER Experiment Name: At_Far-red-induction_P Parameter: Tissue Value: Whole Plant
  misc_feature: MA Experiment ID: 20001557 Result: Down-regulated in Transcription
  misc_feature: MA Experiment 20001557 PARAMETER Experiment Name: At_Drought_Soil_Dry_P Parameter: Age (day) Value: 27
  misc_feature: MA Experiment 20001557 PARAMETER Experiment Name: At_Drought_Soil_Dry_P Parameter: Organism Value: A. thaliana
  misc_feature: MA Experiment 20001557 PARAMETER Experiment Name: At_Drought_Soil_Dry_P Parameter: Plant Line Value: WS
  misc_feature: MA Experiment 20001557 PARAMETER Experiment Name: At_Drought_Soil_Dry_P Parameter: Post Timepoint (hr) Value: 3
  misc_feature: MA Experiment 20001557 PARAMETER Experiment Name: At_Drought_Soil_Dry_P Parameter: Post-Treatment Value: Re-Water vs. No Drought
  misc_feature: MA Experiment 20001557 PARAMETER Experiment Name: At_Drought_Soil_Dry_P Parameter: Timepoint (day) Value: 13
  misc_feature: MA Experiment 20001557 PARAMETER Experiment Name: At_Drought_Soil_Dry_P Parameter: Treatment Value: Drought vs. No Drought
  misc_feature: MA Experiment ID: 20001558 Result: Down-regulated in Transcription
  misc_feature: MA Experiment 20001558 PARAMETER Experiment Name: At_Drought_Soil_Dry_P Parameter: Age (day) Value: 27
  misc_feature: MA Experiment 20001558 PARAMETER Experiment Name: At_Drought_Soil_Dry_P Parameter: Organism Value: A. thaliana
  misc_feature: MA Experiment 20001558 PARAMETER Experiment Name: At_Drought_Soil_Dry_P Parameter: Plant Line Value: WS
  misc_feature: MA Experiment 20001558 PARAMETER Experiment Name: At_Drought_Soil_Dry_P Parameter: Post Timepoint (hr) Value: 6
  misc_feature: MA Experiment 20001558 PARAMETER Experiment Name: At_Drought_Soil_Dry_P Parameter: Post-Treatment Value: Re-Water vs. No Drought
  misc_feature: MA Experiment 20001558 PARAMETER Experiment Name: At_Drought_Soil_Dry_P Parameter: Timepoint (day) Value: 13
  misc_feature: MA Experiment 20001558 PARAMETER Experiment Name: At_Drought_Soil_Dry_P Parameter: Treatment Value: Drought vs. No Drought
attcatcaaatcctcaaacaacttcaagaacaaagagtgcttttcgaggcccaaaacacattaccataaaatggcattctcgaagggactcatttttgcgatgatatttgcggttttagcgatagttaagccctcagaagctgctcttgatgctcattactatgatcaatcgtgccctgctgctgaaaaaatcatacttgaaactgttaggaatgctactttgtatgatcccaaagtgcctgctcgtctcctaagaatgttcttccacgattgcttcatcaggggatgtgatgcgtccattctactagattcgacacggtcaaaccaagctgagaaggatggtcctccaaacatctcagtacggtcattttacgtgatcgaagatgctaagagaaagctcgaaaaggcttgtcctcgtaccgtgtcttgtgccgatgtaatcgccattgccgccagagatgtggtcaccctgtccggtggtccttattggagcgtactgaaagggcgaaaagacgggacaatttcacgagccaacgagactagaaatctcccaccaccaacgttcaatgtttctcaactgatacaaagctttgcagcaagaggcttgtcggtgaaagacatggttacgctctcaggtggccacaccatagggttctctcactgttcttctttcgagtcccgtcttcaaaacttcagcaaattccatgacatagatccttcgatgaactatgcgttcgcgcaaaccttgaaaaagaaatgcccgagaacatctaaccgaggcaagaacgcagggacagtcttggactctacttcctcggttttcgacaatgtttactacaagcaaattttgtccgggaaaggagtgtttgggtctgatcaggcacttctaggcgattcccggactaagtggatcgttgagacgtttgctcaagaccaaaaagctttcttcagagagtttgcagcttccatggtaaaacttggaaactttggagtcaaagagactggacaagttagagttaacactcgcttcgtcaactaaaagcatattcctaacaagcaaccaaatgagagttttcttttcttcaaatttgatttcatttatacttgatattataataatgtagaccggccaatatatggatcggttttaaaacctcctaattctccatgagttgcagagtatgctttaaaagtaaatttgttctgcttcattgaactgatctataaattcatcagcattttc

SEQ ID NO: 20951 - protein, 345 aa, Arabidopsis thaliana
  peptide (1)..(345): Ceres Seq. ID no. 12394451
  misc_feature (65)..(311): Pfam Name: Peroxidase Pfam Description: Peroxidase
  misc_feature (65)..(311): Pfam Name: Peroxidase Pfam Description: Peroxidase
  misc_feature (142)..(345): Homolog of NCBI NO: 1890319 NR Description: peroxidase ATP27a [Arabidopsis thaliana]
  misc_feature (64)..(345): Homolog of NCBI NO: 2956707 NR Description: peroxidase [Spinacia oleracea]
  misc_feature (142)..(345): Homolog of NCBI NO: 1890319 NR Description: peroxidase ATP27a [Arabidopsis thaliana]
  misc_feature (47)..(345): Homolog of NCBI NO: 7484677 NR Description: peroxidase (EC 1.11.1.7) prx11 precursor - spinach
  misc_feature (24)..(345): Homolog of NCBI NO: 15242213 NR Description: peroxidase, putative
  misc_feature (64)..(345): Homolog of NCBI NO: 2956707 NR Description: peroxidase [Spinacia oleracea]
  misc_feature (47)..(345): Homolog of NCBI NO: 7484677 NR Description: peroxidase (EC 1.11.1.7) prx11 precursor - spinach
  misc_feature (24)..(345): Homolog of NCBI NO: 15242213 NR Description: peroxidase, putative
FIKSSNNFKNKECFSRPKTHYHKMAFSKGLIFAMIFAVLAIVKPSEAALDAHYYDQSCPAAEKIILETVRNATLYDPKVPARLLRMFFHDCFIRGCDASILLDSTRSNQAEKDGPPNISVRSFYVIEDAKRKLEKACPRTVSCADVIAIAARDVVTLSGGPYWSVLKGRKDGTISRANETRNLPPPTFNVSQLIQSFAARGLSVKDMVTLSGGHTIGFSHCSSFESRLQNFSKFHDIDPSMNYAFAQTLKKKCPRTSNRGKNAGTVLDSTSSVFDNVYYKQILSGKGVFGSDQALLGDSRTKWIVETFAQDQKAFFREFAASMVKLGNFGVKETGQVRVNTRFVN

SEQ ID NO: 20952 - protein, 322 aa, Arabidopsis thaliana
  peptide (1)..(322): Ceres Seq. ID no. 12394452
  misc_feature (42)..(288): Pfam Name: Peroxidase Pfam Description: Peroxidase
  misc_feature (42)..(288): Pfam Name: Peroxidase Pfam Description: Peroxidase
  misc_feature (119)..(322): Homolog of NCBI NO: 1890319 NR Description: peroxidase ATP27a [Arabidopsis thaliana]
  misc_feature (41)..(322): Homolog of NCBI NO: 2956707 NR Description: peroxidase [Spinacia oleracea]
  misc_feature (119)..(322): Homolog of NCBI NO: 1890319 NR Description: peroxidase ATP27a [Arabidopsis thaliana]
  misc_feature (24)..(322): Homolog of NCBI NO: 7484677 NR Description: peroxidase (EC 1.11.1.7) prx11 precursor - spinach
  misc_feature (1)..(322): Homolog of NCBI NO: 15242213 NR Description: peroxidase, putative
  misc_feature (41)..(322): Homolog of NCBI NO: 2956707 NR Description: peroxidase [Spinacia oleracea]
  misc_feature (24)..(322): Homolog of NCBI NO: 7484677 NR Description: peroxidase (EC 1.11.1.7) prx11 precursor - spinach
  misc_feature (1)..(322): Homolog of NCBI NO: 15242213 NR Description: peroxidase, putative
MAFSKGLIFAMIFAVLAIVKPSEAALDAHYYDQSCPAAEKIILETVRNATLYDPKVPARLLRMFFHDCFIRGCDASILLDSTRSNQAEKDGPPNISVRSFYVIEDAKRKLEKACPRTVSCADVIAIAARDVVTLSGGPYWSVLKGRKDGTISRANETRNLPPPTFNVSQLIQSFAARGLSVKDMVTLSGGHTIGFSHCSSFESRLQNFSKFHDIDPSMNYAFAQTLKKKCPRTSNRGKNAGTVLDSTSSVFDNVYYKQILSGKGVFGSDQALLGDSRTKWIVETFAQDQKAFFREFAASMVKLGNFGVKETGQVRVNTRFVN

SEQ ID NO: 20953 - protein, 312 aa, Arabidopsis thaliana
  peptide (1)..(312): Ceres Seq. ID no. 12394453
  misc_feature (32)..(278): Pfam Name: Peroxidase Pfam Description: Peroxidase
  misc_feature (32)..(278): Pfam Name: Peroxidase Pfam Description: Peroxidase
  misc_feature (109)..(312): Homolog of NCBI NO: 1890319 NR Description: peroxidase ATP27a [Arabidopsis thaliana]
  misc_feature (31)..(312): Homolog of NCBI NO: 2956707 NR Description: peroxidase [Spinacia oleracea]
  misc_feature (31)..(312): Homolog of NCBI NO: 2956707 NR Description: peroxidase [Spinacia oleracea]
  misc_feature (1)..(312): Homolog of NCBI NO: 15242213 NR Description: peroxidase, putative
  misc_feature (14)..(312): Homolog of NCBI NO: 7484677 NR Description: peroxidase (EC 1.11.1.7) prx11 precursor - spinach
  misc_feature (109)..(312): Homolog of NCBI NO: 1890319 NR Description: peroxidase ATP27a [Arabidopsis thaliana]
  misc_feature (14)..(312): Homolog of NCBI NO: 7484677 NR Description: peroxidase (EC 1.11.1.7) prx11 precursor - spinach
  misc_feature (1)..(312): Homolog of NCBI NO: 15242213 NR Description: peroxidase, putative
MIFAVLAIVKPSEAALDAHYYDQSCPAAEKIILETVRNATLYDPKVPARLLRMFFHDCFIRGCDASILLDSTRSNQAEKDGPPNISVRSFYVIEDAKRKLEKACPRTVSCADVIAIAARDVVTLSGGPYWSVLKGRKDGTISRANETRNLPPPTFNVSQLIQSFAARGLSVKDMVTLSGGHTIGFSHCSSFESRLQNFSKFHDIDPSMNYAFAQTLKKKCPRTSNRGKNAGTVLDSTSSVFDNVYYKQILSGKGVFGSDQALLGDSRTKWIVETFAQDQKAFFREFAASMVKLGNFGVKETGQVRVNTRFVN

SEQ ID NO: 20954 - DNA, 1405 bp, Arabidopsis thaliana
  misc_feature (1)..(1405): Ceres Seq. ID no. 13490498
  misc_feature: MA Experiment ID: 108569 Result: Up-regulated in Transcription
  misc_feature: MA Experiment 108569 PARAMETER Experiment Name: At_0.001%_MeJA__cDNA_P Parameter: Timepoint (hr) Value: 6
  misc_feature: MA Experiment 108569 PARAMETER Experiment Name: At_0.001%_MeJA__cDNA_P Parameter: Tissue Value: Aerial
  misc_feature: MA Experiment 108569 PARAMETER Experiment Name: At_0.001%_MeJA__cDNA_P Parameter: Treatment Value: 0.001% MeJA vs. No Treatment
  misc_feature: MA Experiment ID: 108573 Result: Up-regulated in Transcription
  misc_feature: MA Experiment 108573 PARAMETER Experiment Name: At_Drought_cDNA_P Parameter: Timepoint (hr) Value: 6
  misc_feature: MA Experiment 108573 PARAMETER Experiment Name: At_Drought_cDNA_P Parameter: Tissue Value: Aerial
  misc_feature: MA Experiment 108573 PARAMETER Experiment Name: At_Drought_cDNA_P Parameter: Treatment Value: Drought vs. No Drought
  misc_feature: MA Experiment ID: 108595 Result: Down-regulated in Transcription
  misc_feature: MA Experiment 108595 PARAMETER Experiment Name: At_Ler-pi_Ovule_cDNA_P Parameter: Plant Line Value: null
  misc_feature: MA Experiment ID: 20000113 Result: Up-regulated in Transcription
  misc_feature: MA Experiment 20000113 PARAMETER Experiment Name: At_42deg_Heat_cDNA_P Parameter: Temperature (deg C) Value: 42 vs. 22
  misc_feature: MA Experiment 20000113 PARAMETER Experiment Name: At_42deg_Heat_cDNA_P Parameter: Timepoint (hr) Value: 8
  misc_feature: MA Experiment 20000113 PARAMETER Experiment Name: At_42deg_Heat_cDNA_P Parameter: Tissue Value: Aerial
  misc_feature: MA Experiment ID: 20000235 Result: Down-regulated in Transcription
  misc_feature: MA Experiment 20000235 PARAMETER Experiment Name: At_Siliques_P Parameter: Age (day) Value: 21
  misc_feature: MA Experiment 20000235 PARAMETER Experiment Name: At_Siliques_P Parameter: Organism Value: A. thaliana
  misc_feature: MA Experiment 20000235 PARAMETER Experiment Name: At_Siliques_P Parameter: Plant Line Value: WS
  misc_feature: MA Experiment 20000235 PARAMETER Experiment Name: At_Siliques_P Parameter: Tissue Value: 5-10mm Siliques vs. Whole Plant
  misc_feature: MA Experiment ID: 20000574 Result: Down-regulated in Transcription
  misc_feature: MA Experiment 20000574 PARAMETER Experiment Name: At_100uM_ABA_Mutants__P Parameter: Organism Value: A. thaliana
  misc_feature: MA Experiment 20000574 PARAMETER Experiment Name: At_100uM_ABA_Mutants__P Parameter: Plant Line Value: CS23 vs. Ler wt
  misc_feature: MA Experiment 20000574 PARAMETER Experiment Name: At_100uM_ABA_Mutants__P Parameter: Timepoint (hr) Value: N/A
  misc_feature: MA Experiment 20000574 PARAMETER Experiment Name: At_100uM_ABA_Mutants__P Parameter: Tissue Value: Whole Plant
  misc_feature: MA Experiment 20000574 PARAMETER Experiment Name: At_100uM_ABA_Mutants__P Parameter: Treatment Value: None
tggcagatattcaaacaactcaatcctcattccctttgtttcgcctctctggatttcgaagagctgagagattagggtttctcgattttcgagattagagtctaatccccaccaccagcatagctgatatcctggaggagagaatgacggattcgggtctaatgatgccggcggagattgctggaattctaaccacggcgattacgagttggtgggatgatgttaatgagtcaactcagtggcaagatgggatctttttcgctctttgtggtgcttatgctcttgtttccgccgttgctcttgttcaactgataaggatccaaatgagagtgcctgagtatggttggactactcagaaggtgtttcatcttatgaactttgtcgtcaatggagttcgtgcggttctgtttggatttcacatgcaagtatttcttgttcatcccaaggctctttgctgggtactattggatcttcctggccttctctttttctcggcatacacgctgcttgtgctgttctgggcagagatatatcaccaggctagaagcttacctacagataagctgcggataacctatatttctgtcaacgtggctgtatatttggctcagattggtatctgggcatacatctgggtacatgataacagcactgtggagttagttggaaagatatttatcgcagttgtgtctttcatcgccgcattaggcttcttgctgtatggaggaagattgtttttcatgctaagaaggttccctatcgagtcaaaaggaagaaggaagaaactccacgaggttggatctgtgacagctatatgcttcacctgcttcctcataagatgcgttgtggtggctgtatcagcttttgacaaggatttaacacttgatgttcttgatcatccggttctgaacttaatctactatatggtggtagaagtacttccatcggcactagtcctcttcattctccgaaagctacctccaaagagagtatcagctcaataccatccgatccagtagaaacctttgtcactgaaccatctcacacggtgagtatgatgctgtttaagagaagagtaaagattaaaaaaaaaattggggcaaaaaatgaaaggtgaagaagaaatcggtgtggaatctgcgtgagtttttggaatgcacgttcatataaatgattttacagcttttagttgttgtagcccgccgtgacttttggtttggtagtttatgtctgttaaaattataaattgctcttctgctactttgaaaaatctggtcagtagtacaagaggtttaacatttgttgcgtcgatggttgattgttatgttatgtttggtaaaaaataaacgaatgctcttctccagtttcctttatgcttttgtcaactgttacatcttcttctcct

SEQ ID NO: 20955 - protein, 291 aa, Arabidopsis thaliana
  peptide (1)..(291): Ceres Seq. ID no. 13490499
  misc_feature (22)..(291): Homolog of NCBI NO: 18394129 NR Description: THH1 protein [Arabidopsis thaliana]
  misc_feature (1)..(291): Homolog of NCBI NO: 7262697 NR Description: Contains similarity to an unknown protein from
  misc_feature (54)..(277): Homolog of NCBI NO: 14091866 NR Description: Putative transmembrane protein [Oryza sativa]
  misc_feature (21)..(291): Homolog of NCBI NO: 21537264 NR Description: unknown [Arabidopsis thaliana]
  misc_feature (1)..(290): Homolog of NCBI NO: 37536460 NR Description: putative transmembrane protein
  misc_feature (21)..(291): Homolog of NCBI NO: 18395323 NR Description: TOM3 protein [Arabidopsis thaliana]
  misc_feature (1)..(157): Homolog of NCBI NO: 7485647 NR Description: hypothetical protein F17L22.250 - Arabidopsis
  misc_feature (9)..(290): Homolog of NCBI NO: 34394174 NR Description: putative transmembrane protein(TOM3)
  misc_feature (2)..(291): Homolog of NCBI NO: 34896982 NR Description: unknown protein [Oryza sativa]
  misc_feature (1)..(291): Homolog of NCBI NO: 18415765 NR Description: TOM1 protein [Arabidopsis thaliana]
MTDSGLMMPAEIAGILTTAITSWWDDVNESTQWQDGIFFALCGAYALVSAVALVQLIRIQMRVPEYGWTTQKVFHLMNFVVNGVRAVLFGFHMQVFLVHPKALCWVLLDLPGLLFFSAYTLLVLFWAEIYHQARSLPTDKLRITYISVNVAVYLAQIGIWAYIWVHDNSTVELVGKIFIAVVSFIAALGFLLYGGRLFFMLRRFPIESKGRRKKLHEVGSVTAICFTCFLIRCVVVAVSAFDKDLTLDVLDHPVLNLIYYMVVEVLPSALVLFILRKLPPKRVSAQYHPIQ

SEQ ID NO: 20956 - protein, 285 aa, Arabidopsis thaliana
  peptide (1)..(285): Ceres Seq. ID no. 13490500
  misc_feature (16)..(285): Homolog of NCBI NO: 18394129 NR Description: THH1 protein [Arabidopsis thaliana]
  misc_feature (1)..(285): Homolog of NCBI NO: 7262697 NR Description: Contains similarity to an unknown protein from
  misc_feature (48)..(271): Homolog of NCBI NO: 14091866 NR Description: Putative transmembrane protein [Oryza sativa]
  misc_feature (15)..(285): Homolog of NCBI NO: 21537264 NR Description: unknown [Arabidopsis thaliana]
  misc_feature (1)..(284): Homolog of NCBI NO: 37536460 NR Description: putative transmembrane protein
  misc_feature (15)..(285): Homolog of NCBI NO: 18395323 NR Description: TOM3 protein [Arabidopsis thaliana]
  misc_feature (1)..(151): Homolog of NCBI NO: 7485647 NR Description: hypothetical protein F17L22.250 - Arabidopsis
  misc_feature (3)..(284): Homolog of NCBI NO: 34394174 NR Description: putative transmembrane protein(TOM3)
  misc_feature (1)..(285): Homolog of NCBI NO: 34896982 NR Description: unknown protein [Oryza sativa]
  misc_feature (1)..(285): Homolog of NCBI NO: 18415765 NR Description: TOM1 protein [Arabidopsis thaliana]
MMPAEIAGILTTAITSWWDDVNESTQWQDGIFFALCGAYALVSAVALVQLIRIQMRVPEYGWTTQKVFHLMNFVVNGVRAVLFGFHMQVFLVHPKALCWVLLDLPGLLFFSAYTLLVLFWAEIYHQARSLPTDKLRITYISVNVAVYLAQIGIWAYIWVHDNSTVELVGKIFIAVVSFIAALGFLLYGGRLFFMLRRFPIESKGRRKKLHEVGSVTAICFTCFLIRCVVVAVSAFDKDLTLDVLDHPVLNLIYYMVVEVLPSALVLFILRKLPPKRVSAQYHPIQ

SEQ ID NO: 20957 - protein, 284 aa, Arabidopsis thaliana
  peptide (1)..(284): Ceres Seq. ID no. 13490501
  misc_feature (15)..(284): Homolog of NCBI NO: 18394129 NR Description: THH1 protein [Arabidopsis thaliana]
  misc_feature (1)..(284): Homolog of NCBI NO: 7262697 NR Description: Contains similarity to an unknown protein from
  misc_feature (47)..(270): Homolog of NCBI NO: 14091866 NR Description: Putative transmembrane protein [Oryza sativa]
  misc_feature (14)..(284): Homolog of NCBI NO: 21537264 NR Description: unknown [Arabidopsis thaliana]
  misc_feature (1)..(283): Homolog of NCBI NO: 37536460 NR Description: putative transmembrane protein
  misc_feature (14)..(284): Homolog of NCBI NO: 18395323 NR Description: TOM3 protein [Arabidopsis thaliana]
  misc_feature (1)..(150): Homolog of NCBI NO: 7485647 NR Description: hypothetical protein F17L22.250 - Arabidopsis
  misc_feature (2)..(283): Homolog of NCBI NO: 34394174 NR Description: putative transmembrane protein(TOM3)
  misc_feature (1)..(284): Homolog of NCBI NO: 34896982 NR Description: unknown protein [Oryza sativa]
  misc_feature (1)..(284): Homolog of NCBI NO: 18415765 NR Description: TOM1 protein [Arabidopsis thaliana]
MPAEIAGILTTAITSWWDDVNESTQWQDGIFFALCGAYALVSAVALVQLIRIQMRVPEYGWTTQKVFHLMNFVVNGVRAVLFGFHMQVFLVHPKALCWVLLDLPGLLFFSAYTLLVLFWAEIYHQARSLPTDKLRITYISVNVAVYLAQIGIWAYIWVHDNSTVELVGKIFIAVVSFIAALGFLLYGGRLFFMLRRFPIESKGRRKKLHEVGSVTAICFTCFLIRCVVVAVSAFDKDLTLDVLDHPVLNLIYYMVVEVLPSALVLFILRKLPPKRVSAQYHPIQ

SEQ ID NO: 20958 - DNA, 950 bp, Arabidopsis thaliana
  misc_feature (1)..(950): Ceres Seq. ID no. 13490494
  misc_feature: MA Experiment ID: 108434 Result: Down-regulated in Transcription
  misc_feature: MA Experiment 108434 PARAMETER Experiment Name: At_Root_Tips_cDNA_P Parameter: Tissue Value: Root Tips
  misc_feature: MA Experiment ID: 108461 Result: Down-regulated in Transcription
  misc_feature: MA Experiment 108461 PARAMETER Experiment Name: At_Germinating_Seeds_cDNA_P Parameter: Age (day) Value: 1 vs. 0
  misc_feature: MA Experiment 108461 PARAMETER Experiment Name: At_Germinating_Seeds_cDNA_P Parameter: Tissue Value: Germinating Seeds
  misc_feature: MA Experiment ID: 108462 Result: Down-regulated in Transcription
  misc_feature: MA Experiment 108462 PARAMETER Experiment Name: At_Germinating_Seeds_cDNA_P Parameter: Age (day) Value: 2 vs. 0
  misc_feature: MA Experiment 108462 PARAMETER Experiment Name: At_Germinating_Seeds_cDNA_P Parameter: Tissue Value: Germinating Seeds
  misc_feature: MA Experiment ID: 108463 Result: Down-regulated in Transcription
  misc_feature: MA Experiment 108463 PARAMETER Experiment Name: At_Germinating_Seeds_cDNA_P Parameter: Age (day) Value: 3 vs. 0
  misc_feature: MA Experiment 108463 PARAMETER Experiment Name: At_Germinating_Seeds_cDNA_P Parameter: Tissue Value: Germinating Seeds
  misc_feature: MA Experiment ID: 108469 Result: Up-regulated in Transcription
  misc_feature: MA Experiment ID: 108501 Result: Down-regulated in Transcription
  misc_feature: MA Experiment 108501 PARAMETER Experiment Name: At_ap2_floral_buds_cDNA_P Parameter: Plant Line Value: ap2 (Ler.)
  misc_feature: MA Experiment 108501 PARAMETER Experiment Name: At_ap2_floral_buds_cDNA_P Parameter: Tissue Value: Closed Flower
  misc_feature: MA Experiment ID: 108574 Result: Down-regulated in Transcription
  misc_feature: MA Experiment 108574 PARAMETER Experiment Name: At_Wounding__cDNA_P Parameter: Timepoint (hr) Value: 1
  misc_feature: MA Experiment 108574 PARAMETER Experiment Name: At_Wounding__cDNA_P Parameter: Tissue Value: Aerial
  misc_feature: MA Experiment 108574 PARAMETER Experiment Name: At_Wounding__cDNA_P Parameter: Treatment Value: Wounding vs. No Wounding
  misc_feature: MA Experiment ID: 108579 Result: Down-regulated in Transcription
  misc_feature: MA Experiment 108579 PARAMETER Experiment Name: At_4deg_Cold_cDNA_P Parameter: Temperature (deg C) Value: 4 vs. 22
  misc_feature: MA Experiment 108579 PARAMETER Experiment Name: At_4deg_Cold_cDNA_P Parameter: Timepoint (hr) Value: 6
  misc_feature: MA Experiment 108579 PARAMETER Experiment Name: At_4deg_Cold_cDNA_P Parameter: Tissue Value: Aerial
  misc_feature: MA Experiment ID: 108585 Result: Up-regulated in Transcription
  misc_feature: MA Experiment 108585 PARAMETER Experiment Name: At_5mM_NaNP_cDNA_P Parameter: Timepoint (hr) Value: 6
  misc_feature: MA Experiment 108585 PARAMETER Experiment Name: At_5mM_NaNP_cDNA_P Parameter: Tissue Value: Aerial
  misc_feature: MA Experiment 108585 PARAMETER Experiment Name: At_5mM_NaNP_cDNA_P Parameter: Treatment Value: null
  misc_feature: MA Experiment ID: 108595 Result: Down-regulated in Transcription
  misc_feature: MA Experiment 108595 PARAMETER Experiment Name: At_Ler-pi_Ovule_cDNA_P Parameter: Plant Line Value: null
  misc_feature: MA Experiment ID: 108605 Result: Down-regulated in Transcription
  misc_feature: MA Experiment 108605 PARAMETER Experiment Name: At_100uM_ABA_cDNA_P Parameter: Timepoint (hr) Value: 6
  misc_feature: MA Experiment 108605 PARAMETER Experiment Name: At_100uM_ABA_cDNA_P Parameter: Tissue Value: Aerial
  misc_feature: MA Experiment 108605 PARAMETER Experiment Name: At_100uM_ABA_cDNA_P Parameter: Treatment Value: 100uM ABA vs. No Treatment
  misc_feature: MA Experiment ID: 108607 Result: Down-regulated in Transcription
  misc_feature: MA Experiment 108607 PARAMETER Experiment Name: At_100uM_ABA_cDNA_P Parameter: Timepoint (hr) Value: 4
  misc_feature: MA Experiment 108607 PARAMETER Experiment Name: At_100uM_ABA_cDNA_P Parameter: Tissue Value: Aerial
  misc_feature: MA Experiment 108607 PARAMETER Experiment Name: At_100uM_ABA_cDNA_P Parameter: Treatment Value: 100uM ABA vs. No Treatment
  misc_feature: MA Experiment ID: 108667 Result: Up-regulated in Transcription
  misc_feature: MA Experiment 108667 PARAMETER Experiment Name: At_2mM_SA_cDNA_P Parameter: Plant Line Value: WS
  misc_feature: MA Experiment 108667 PARAMETER Experiment Name: At_2mM_SA_cDNA_P Parameter: Timepoint (hr) Value: 1
  misc_feature: MA Experiment 108667 PARAMETER Experiment Name: At_2mM_SA_cDNA_P Parameter: Treatment Value: 2mM SA vs. No Treatment
  misc_feature: MA Experiment ID: 108668 Result: Up-regulated in Transcription
  misc_feature: MA Experiment 108668 PARAMETER Experiment Name: At_2mM_SA_cDNA_P Parameter: Plant Line Value: WS
  misc_feature: MA Experiment 108668 PARAMETER Experiment Name: At_2mM_SA_cDNA_P Parameter: Timepoint (hr) Value: 6
  misc_feature: MA Experiment 108668 PARAMETER Experiment Name: At_2mM_SA_cDNA_P Parameter: Treatment Value: 2mM SA vs. No Treatment
  misc_feature: MA Experiment ID: 20000069 Result: Up-regulated in Transcription
  misc_feature: MA Experiment 20000069 PARAMETER Experiment Name: At_100uM_ABA_Mutants_cDNA_P Parameter: Plant Line Value: CS23
  misc_feature: MA Experiment 20000069 PARAMETER Experiment Name: At_100uM_ABA_Mutants_cDNA_P Parameter: Timepoint (hr) Value: 6
  misc_feature: MA Experiment 20000069 PARAMETER Experiment Name: At_100uM_ABA_Mutants_cDNA_P Parameter: Tissue Value: Aerial
  misc_feature: MA Experiment 20000069 PARAMETER Experiment Name: At_100uM_ABA_Mutants_cDNA_P Parameter: Treatment Value: 100uM ABA vs. No Treatment
  misc_feature: MA Experiment ID: 20000070 Result: Up-regulated in Transcription
  misc_feature: MA Experiment 20000070 PARAMETER Experiment Name: At_100uM_ABA_Mutants_cDNA_P Parameter: Plant Line Value: CS24
  misc_feature: MA Experiment 20000070 PARAMETER Experiment Name: At_100uM_ABA_Mutants_cDNA_P Parameter: Timepoint (hr) Value: 6
  misc_feature: MA Experiment 20000070 PARAMETER Experiment Name: At_100uM_ABA_Mutants_cDNA_P Parameter: Tissue Value: Aerial
  misc_feature: MA Experiment 20000070 PARAMETER Experiment Name: At_100uM_ABA_Mutants_cDNA_P Parameter: Treatment Value: 100uM ABA vs. No Treatment
  misc_feature: MA Experiment ID: 20000086 Result: Up-regulated in Transcription
  misc_feature: MA Experiment 20000086 PARAMETER Experiment Name: At_100uM_ABA_Mutants_cDNA_P Parameter: Plant Line Value: CS22
  misc_feature: MA Experiment 20000086 PARAMETER Experiment Name: At_100uM_ABA_Mutants_cDNA_P Parameter: Timepoint (hr) Value: 6
  misc_feature: MA Experiment 20000086 PARAMETER Experiment Name: At_100uM_ABA_Mutants_cDNA_P Parameter: Tissue Value: Aerial
  misc_feature: MA Experiment 20000086 PARAMETER Experiment Name: At_100uM_ABA_Mutants_cDNA_P Parameter: Treatment Value: 100uM ABA vs. No Treatment
  misc_feature: MA Experiment ID: 20000087 Result: Up-regulated in Transcription
  misc_feature: MA Experiment 20000087 PARAMETER Experiment Name: At_100uM_ABA_Mutants_cDNA_P Parameter: Plant Line Value: WS
  misc_feature: MA Experiment 20000087 PARAMETER Experiment Name: At_100uM_ABA_Mutants_cDNA_P Parameter: Timepoint (hr) Value: 6
  misc_feature: MA Experiment 20000087 PARAMETER Experiment Name: At_100uM_ABA_Mutants_cDNA_P Parameter: Tissue Value: Aerial
  misc_feature: MA Experiment 20000087 PARAMETER Experiment Name: At_100uM_ABA_Mutants_cDNA_P Parameter: Treatment Value: 100uM ABA vs. No Treatment
  misc_feature: MA Experiment ID: 20000088 Result: Up-regulated in Transcription
  misc_feature: MA Experiment 20000088 PARAMETER Experiment Name: At_100uM_ABA_Mutants_cDNA_P Parameter: Plant Line Value: Landsberg
  misc_feature: MA Experiment 20000088 PARAMETER Experiment Name: At_100uM_ABA_Mutants_cDNA_P Parameter: Timepoint (hr) Value: 6
  misc_feature: MA Experiment 20000088 PARAMETER Experiment Name: At_100uM_ABA_Mutants_cDNA_P Parameter: Tissue Value: Aerial
  misc_feature: MA Experiment 20000088 PARAMETER Experiment Name: At_100uM_ABA_Mutants_cDNA_P Parameter: Treatment Value: 100uM ABA vs. No Treatment
  misc_feature: MA Experiment ID: 20000089 Result: Up-regulated in Transcription
  misc_feature: MA Experiment ID: 20000090 Result: Up-regulated in Transcription
  misc_feature: MA Experiment ID: 20000113 Result: Down-regulated in Transcription
  misc_feature: MA Experiment 20000113 PARAMETER Experiment Name: At_42deg_Heat_cDNA_P Parameter: Temperature (deg C) Value: 42 vs. 22
  misc_feature: MA Experiment 20000113 PARAMETER Experiment Name: At_42deg_Heat_cDNA_P Parameter: Timepoint (hr) Value: 8
  misc_feature: MA Experiment 20000113 PARAMETER Experiment Name: At_42deg_Heat_cDNA_P Parameter: Tissue Value: Aerial
  misc_feature: MA Experiment ID: 20000355 Result: Down-regulated in Transcription
  misc_feature: MA Experiment 20000355 PARAMETER Experiment Name: At_Siliques_Sub_P Parameter: Age (day) Value: 21
  misc_feature: MA Experiment 20000355 PARAMETER Experiment Name: At_Siliques_Sub_P Parameter: Organism Value: A. thaliana
  misc_feature: MA Experiment 20000355 PARAMETER Experiment Name: At_Siliques_Sub_P Parameter: Plant Line Value: WS
  misc_feature: MA Experiment 20000355 PARAMETER Experiment Name: At_Siliques_Sub_P Parameter: Tissue Value: Less Than 5mm Siliques vs. Whole Plant
  misc_feature: MA Experiment ID: 20000440 Result: Down-regulated in Transcription
  misc_feature: MA Experiment 20000440 PARAMETER Experiment Name: At_Closed-Flower__Sub_P Parameter: Tissue Value: Closed Flower vs. Whole Plant
catcaccttcaccttcaacatcaaacatcacatttcttcctcttttctctcttttttctcagtcttcaaagagtttcttagtaacccaaatcaatggcaggtatcaaagttttcggacacccagcttccattgccaccaggagagtcctcatcgccctccacgagaaaaacctcgactttgagctcgttcatgtcgaactcaaagacggtgagcacaagaaggagcctttcctctcccgcaacccttttggtcaggttccagcctttgaagatggagacctcaagctcttcgaatcaagagcgattactcagtacatagctcaccgatatgaaaaccaaggaaccaaccttctccaaaccgactccaagaacatatctcagtacgcaatcatggccattggaatgcaagtagaagatcaccagttcgacccagtggcttcaaagcttgcttttgaacaaatattcaagtccatctacggcttgaccacagacgaagccgttgttgcagaagaggaggctaagttagccaaggtccttgatgtctacgaggctaggctcaaggagttcaagtatttggctggtgaaactttcactttgactgatcttcaccacattcccgcgattcaatacctgctcggaactcccaccaagaagctcttcaccgagcgtccacgtgtcaatgagtgggtggctgaaatcaccaagaggccagcttccgagaaggttcagtgagaaatttctaaaaggaaaatatggttttgcttcagtcacagtaataatgctaagattaaataagcggctttctcattgcccaatttctcagtactttctttctgttgtatcctctgttttctttcagttatgtgagtgtgtgtgtatgctcttgagagtatctttggcaaaaactatttatctaatcttcaagctattctaaaataaatcaattagtt

SEQ ID NO: 20959 - protein, 212 aa, Arabidopsis thaliana
  peptide (1)..(212): Ceres Seq. ID no. 13490495
  misc_feature (98)..(206): Pfam Name: Glutathione S-transferase, C-terminal domain Pfam Description: Glutathione S-transferase, C-terminal domain
  misc_feature (1)..(211): Homolog of NCBI NO: 31790103 NR Description: glutathione S-transferase 5 [Brassica juncea]
  misc_feature (1)..(211): Homolog of NCBI NO: 31790105 NR Description: glutathione S-transferase 6 [Brassica juncea]
  misc_feature (1)..(211): Homolog of NCBI NO: 31790095 NR Description: glutathione S-transferase 2 [Brassica juncea]
  misc_feature (1)..(211): Homolog of NCBI NO: 31790093 NR Description: glutathione S-transferase 1 [Brassica juncea]
  misc_feature (1)..(211): Homolog of NCBI NO: 31790097 NR Description: glutathione S-transferase 3 [Brassica juncea]
  misc_feature (1)..(211): Homolog of NCBI NO: 31790099 NR Description: glutathione S-transferase 4 [Brassica juncea]
  misc_feature (1)..(211): Homolog of NCBI NO: 15227063 NR Description: glutathione transferase, putative [Arabidopsis
  misc_feature (1)..(212): Homolog of NCBI NO: 21555418 NR Description: Atpm24.1 glutathione S transferase [Arabidopsis
  misc_feature (2)..(212): Homolog of NCBI NO: 2554769 NR Description: Chain A, Structure Of Glutathione S-Transferase
  misc_feature (1)..(212): Homolog of NCBI NO: 15235401 NR Description: glutathione transferase, putative [Arabidopsis
MAGIKVFGHPASIATRRVLIALHEKNLDFELVHVELKDGEHKKEPFLSRNPFGQVPAFEDGDLKLFESRAITQYIAHRYENQGTNLLQTDSKNISQYAIMAIGMQVEDHQFDPVASKLAFEQIFKSIYGLTTDEAVVAEEEAKLAKVLDVYEARLKEFKYLAGETFTLTDLHHIPAIQYLLGTPTKKLFTERPRVNEWVAEITKRPASEKVQ

SEQ ID NO: 20960 - protein, 113 aa, Arabidopsis thaliana
  peptide (1)..(113): Ceres Seq. ID no. 13490496
  misc_feature (1)..(107): Pfam Name: Glutathione S-transferase, C-terminal domain Pfam Description: Glutathione S-transferase, C-terminal domain
  misc_feature (1)..(112): Homolog of NCBI NO: 31790103 NR Description: glutathione S-transferase 5 [Brassica juncea]
  misc_feature (1)..(112): Homolog of NCBI NO: 31790105 NR Description: glutathione S-transferase 6 [Brassica juncea]
  misc_feature (1)..(112): Homolog of NCBI NO: 31790095 NR Description: glutathione S-transferase 2 [Brassica juncea]
  misc_feature (1)..(112): Homolog of NCBI NO: 31790093 NR Description: glutathione S-transferase 1 [Brassica juncea]
  misc_feature (1)..(112): Homolog of NCBI NO: 31790097 NR Description: glutathione S-transferase 3 [Brassica juncea]
  misc_feature (1)..(112): Homolog of NCBI NO: 31790099 NR Description: glutathione S-transferase 4 [Brassica juncea]
  misc_feature (1)..(112): Homolog of NCBI NO: 15227063 NR Description: glutathione transferase, putative [Arabidopsis
  misc_feature (1)..(113): Homolog of NCBI NO: 21555418 NR Description: Atpm24.1 glutathione S transferase [Arabidopsis
  misc_feature (1)..(113): Homolog of NCBI NO: 2554769 NR Description: Chain A, Structure Of Glutathione S-Transferase
  misc_feature (1)..(113): Homolog of NCBI NO: 15235401 NR Description: glutathione transferase, putative [Arabidopsis
MAIGMQVEDHQFDPVASKLAFEQIFKSIYGLTTDEAVVAEEEAKLAKVLDVYEARLKEFKYLAGETFTLTDLHHIPAIQYLLGTPTKKLFTERPRVNEWVAEITKRPASEKVQ

SEQ ID NO: 20961 - protein, 109 aa, Arabidopsis thaliana
  peptide (1)..(109): Ceres Seq. ID no. 13490497
  misc_feature (1)..(103): Pfam Name: Glutathione S-transferase, C-terminal domain Pfam Description: Glutathione S-transferase, C-terminal domain
  misc_feature (1)..(108): Homolog of NCBI NO: 31790103 NR Description: glutathione S-transferase 5 [Brassica juncea]
  misc_feature (1)..(108): Homolog of NCBI NO: 31790105 NR Description: glutathione S-transferase 6 [Brassica juncea]
  misc_feature (1)..(108): Homolog of NCBI NO: 31790095 NR Description: glutathione S-transferase 2 [Brassica juncea]
  misc_feature (1)..(108): Homolog of NCBI NO: 31790093 NR Description: glutathione S-transferase 1 [Brassica juncea]
  misc_feature (1)..(108): Homolog of NCBI NO: 31790097 NR Description: glutathione S-transferase 3 [Brassica juncea]
  misc_feature (1)..(108): Homolog of NCBI NO: 31790099 NR Description: glutathione S-transferase 4 [Brassica juncea]
  misc_feature (1)..(108): Homolog of NCBI NO: 15227063 NR Description: glutathione transferase, putative [Arabidopsis
  misc_feature (1)..(109): Homolog of NCBI NO: 21555418 NR Description: Atpm24.1 glutathione S transferase [Arabidopsis
  misc_feature (1)..(109): Homolog of NCBI NO: 2554769 NR Description: Chain A, Structure Of Glutathione S-Transferase
  misc_feature (1)..(109): Homolog of NCBI NO: 15235401 NR Description: glutathione transferase, putative [Arabidopsis
MQVEDHQFDPVASKLAFEQIFKSIYGLTTDEAVVAEEEAKLAKVLDVYEARLKEFKYLAGETFTLTDLHHIPAIQYLLGTPTKKLFTERPRVNEWVAEITKRPASEKVQ

SEQ ID NO: 20962 - DNA, 1851 bp, Arabidopsis thaliana
  misc_feature (1)..(1851): Ceres Seq. ID no. 13486872
  misc_feature: MA Experiment ID: 108461 Result: Down-regulated in Transcription
  misc_feature: MA Experiment 108461 PARAMETER Experiment Name: At_Germinating_Seeds_cDNA_P Parameter: Age (day) Value: 1 vs. 0
  misc_feature: MA Experiment 108461 PARAMETER Experiment Name: At_Germinating_Seeds_cDNA_P Parameter: Tissue Value: Germinating Seeds
  misc_feature: MA Experiment ID: 108462 Result: Down-regulated in Transcription
  misc_feature: MA Experiment 108462 PARAMETER Experiment Name: At_Germinating_Seeds_cDNA_P Parameter: Age (day) Value: 2 vs. 0
  misc_feature: MA Experiment 108462 PARAMETER Experiment Name: At_Germinating_Seeds_cDNA_P Parameter: Tissue Value: Germinating Seeds
  misc_feature: MA Experiment ID: 108463 Result: Down-regulated in Transcription
  misc_feature: MA Experiment 108463 PARAMETER Experiment Name: At_Germinating_Seeds_cDNA_P Parameter: Age (day) Value: 3 vs. 0
  misc_feature: MA Experiment 108463 PARAMETER Experiment Name: At_Germinating_Seeds_cDNA_P Parameter: Tissue Value: Germinating Seeds
  misc_feature: MA Experiment ID: 108464 Result: Down-regulated in Transcription
  misc_feature: MA Experiment 108464 PARAMETER Experiment Name: At_Germinating_Seeds_cDNA_P Parameter: Age (day) Value: 4 vs. 0
  misc_feature: MA Experiment 108464 PARAMETER Experiment Name: At_Germinating_Seeds_cDNA_P Parameter: Tissue Value: Germinating Seeds
ctctcaatttgggattcgagacgaaaccctagctctgatttttttcaattccgatggaggcgggagagcggcgcaatggcgattcgatgagtcacaatcaccgcgcaccgaagaagccacgtctcgctgggttattaaccgagtcagatatcgactctgagttcgctcaccaccagaccggtgttgccagaatcaacaacggtagcttcgggtgctgtcctggctccgttctcgaggcgcaacgcgagtggcagcttcgttatctccgtcagcctgatgagttctacttcaacggtctccgtcgtggacttctcgcttctcgaactgtgatcagtgacctaatcaacgccgatgatgttgatgaggtctctctcgttgataacgccaccactgctgctgctattgttcttcagaaagttggaaggtgtttctcggaagggaagtataagaaggaagatactgtagtgatgtttcactgtgcgtttcagagtgtgaagaagtcgattcaggcttatgtctctcgtgtgggaggttctactgttgaggttaggttacctttccctgtaaattcgaacgaagagattatctccaagtttagagaaggactagagaaaggtagagcgaatggtagaacggttaggttagctatcattgatcatataacgtcgatgccgtgtgttttgatgccggtacgagaattggttaagatctgcagagaggaaggtgtggagcaggtttttgttgatgcagctcatgccattggtagtgttaaagttgatgtgaaagaaatcggagctgattactatgtgagtaatctgcataaatggttcttttgtccaccgtctatcgcgtttttctattgtaagaaacgtggttctgagtctgatgttcatcaccctgtggtgtctcatgagtttggaaatggtttgcctatagaaagtgcctggattgggactagggattacagttcacagcttgtggttccatctgtgatggagtttgtaaacaggttcgagggagggatggaagggataatgatgaagaaccatgatgaagctgttagaatgggtttaatgctggctgatgcttggggaacgaatctagggtcacctccagaaatgtgtgttgggatggttatgatcggtttaccttcaaaactctgtgttggaagtgatgaagatgctattaagttgcggtcatatctgcgggttcattactcagttgaggttccagttttttatctcggattgagggatggagaggaaggagtgaaagacaaagacagtggactaattactgcgtatgttcggatctctcatcaggtctataacaaaactgaggattatgagagattgagagacgcaataacagagttagtcaaggatcagatgacttgtcaaaaccttcctgcattgtagtaaccagatatactttgataatccacaagagcctcattgagactctttcatagatcaactgccggtgtaacaataaggcgatggaagagccacgggcaaagattccggaggtaacatgtattgatgagcttgtggaggagcggcttgcaatggaagaagaagctaaccttgagaggccctctctttttattagtcttttataacgtttaacggctttgtatgattattgcaaataaaatcatgtgcgtctaatcttatcttcctcaaacattctgcttgcgaatctcctgtcgcagttcaataatttttccttattgaaaactttttccctcacattgaaagcatattcatagatatgtaatgacacctaatttatcattgttttgtatgattctggttcgttttcacatctatgtctattatgtctatttac

SEQ ID NO: 20963 - protein, 454 aa, Arabidopsis thaliana
  peptide (1)..(454): Ceres Seq. ID no. 13486873
  misc_feature (55)..(434): Pfam Name: Aminotransferase class-V Pfam Description: Aminotransferase class-V
  misc_feature (47)..(377): Homolog of NCBI NO: 32415651 NR Description: hypothetical protein [Neurospora crassa]
  misc_feature (37)..(368): Homolog of NCBI NO: 25463395 NR Description: hypothetical protein [imported] - yeast (Candida
  misc_feature (47)..(276): Homolog of NCBI NO: 40738451 NR Description: hypothetical protein AN6227.2 [Aspergillus
  misc_feature (47)..(441): Homolog of NCBI NO: 32474893 NR Description: isopenicillin N-epimerase [Pirellula sp.]
  misc_feature (44)..(392): Homolog of NCBI NO: 17548917 NR Description: PUTATIVE ISOPENICILLIN N EPIMERASE PROTEIN
  misc_feature (30)..(394): Homolog of NCBI NO: 21230669 NR Description: isopenicillin N epimerase
  misc_feature (20)..(451): Homolog of NCBI NO: 34894322 NR Description: unnamed protein product [Oryza sativa (japonica
  misc_feature (8)..(451): Homolog of NCBI NO: 34894318 NR Description: unnamed protein product [Oryza sativa (japonica
  misc_feature (1)..(451): Homolog of NCBI NO: 30690360 NR Description: expressed protein [Arabidopsis thaliana]
  misc_feature (1)..(454): Homolog of NCBI NO: 15228693 NR Description: expressed protein [Arabidopsis thaliana]
MEAGERRNGDSMSHNHRAPKKPRLAGLLTESDIDSEFAHHQTGVARINNGSFGCCPGSVLEAQREWQLRYLRQPDEFYFNGLRRGLLASRTVISDLINADDVDEVSLVDNATTAAAIVLQKVGRCFSEGKYKKEDTVVMFHCAFQSVKKSIQAYVSRVGGSTVEVRLPFPVNSNEEIISKFREGLEKGRANGRTVRLAIIDHITSMPCVLMPVRELVKICREEGVEQVFVDAAHAIGSVKVDVKEIGADYYVSNLHKWFFCPPSIAFFYCKKRGSESDVHHPVVSHEFGNGLPIESAWIGTRDYSSQLVVPSVMEFVNRFEGGMEGIMMKNHDEAVRMGLMLADAWGTNLGSPPEMCVGMVMIGLPSKLCVGSDEDAIKLRSYLRVHYSVEVPVFYLGLRDGEEGVKDKDSGLITAYVRISHQVYNKTEDYERLRDAITELVKDQMTCQNLPAL

SEQ ID NO: 20964 - protein, 443 aa, Arabidopsis thaliana
  peptide (1)..(443): Ceres Seq. ID no. 13486874
  misc_feature (44)..(423): Pfam Name: Aminotransferase class-V Pfam Description: Aminotransferase class-V
  misc_feature (36)..(366): Homolog of NCBI NO: 32415651 NR Description: hypothetical protein [Neurospora crassa]
  misc_feature (26)..(357): Homolog of NCBI NO: 25463395 NR Description: hypothetical protein [imported] - yeast (Candida
  misc_feature (36)..(265): Homolog of NCBI NO: 40738451 NR Description: hypothetical protein AN6227.2 [Aspergillus
  misc_feature (36)..(430): Homolog of NCBI NO: 32474893 NR Description: isopenicillin N-epimerase [Pirellula sp.]
  misc_feature (33)..(381): Homolog of NCBI NO: 17548917 NR Description: PUTATIVE ISOPENICILLIN N EPIMERASE PROTEIN
  misc_feature (19)..(383): Homolog of NCBI NO: 21230669 NR Description: isopenicillin N epimerase
  misc_feature (9)..(440): Homolog of NCBI NO: 34894322 NR Description: unnamed protein product [Oryza sativa (japonica
  misc_feature (1)..(440): Homolog of NCBI NO: 34894318 NR Description: unnamed protein product [Oryza sativa (japonica
  misc_feature (1)..(440): Homolog of NCBI NO: 30690360 NR Description: expressed protein [Arabidopsis thaliana]
  misc_feature (1)..(443): Homolog of NCBI NO: 15228693 NR Description: expressed protein [Arabidopsis thaliana]
MSHNHRAPKKPRLAGLLTESDIDSEFAHHQTGVARINNGSFGCCPGSVLEAQREWQLRYLRQPDEFYFNGLRRGLLASRTVISDLINADDVDEVSLVDNATTAAAIVLQKVGRCFSEGKYKKEDTVVMFHCAFQSVKKSIQAYVSRVGGSTVEVRLPFPVNSNEEIISKFREGLEKGRANGRTVRLAIIDHITSMPCVLMPVRELVKICREEGVEQVFVDAAHAIGSVKVDVKEIGADYYVSNLHKWFFCPPSIAFFYCKKRGSESDVHHPVVSHEFGNGLPIESAWIGTRDYSSQLVVPSVMEFVNRFEGGMEGIMMKNHDEAVRMGLMLADAWGTNLGSPPEMCVGMVMIGLPSKLCVGSDEDAIKLRSYLRVHYSVEVPVFYLGLRDGEEGVKDKDSGLITAYVRISHQVYNKTEDYERLRDAITELVKDQMTCQNLPAL

SEQ ID NO: 20965 - protein, 316 aa, Arabidopsis thaliana
  peptide (1)..(316): Ceres Seq. ID no. 13486875
  misc_feature (1)..(296): Pfam Name: Aminotransferase class-V Pfam Description: Aminotransferase class-V
  misc_feature (1)..(239): Homolog of NCBI NO: 32415651 NR Description: hypothetical protein [Neurospora crassa]
  misc_feature (1)..(230): Homolog of NCBI NO: 25463395 NR Description: hypothetical protein [imported] - yeast (Candida
  misc_feature (1)..(138): Homolog of NCBI NO: 40738451 NR Description: hypothetical protein AN6227.2 [Aspergillus
  misc_feature (1)..(303): Homolog of NCBI NO: 32474893 NR Description: isopenicillin N-epimerase [Pirellula sp.]
  misc_feature (1)..(254): Homolog of NCBI NO: 17548917 NR Description: PUTATIVE ISOPENICILLIN N EPIMERASE PROTEIN
  misc_feature (1)..(256): Homolog of NCBI NO: 21230669 NR Description: isopenicillin N epimerase
  misc_feature (1)..(313): Homolog of NCBI NO: 34894322 NR Description: unnamed protein product [Oryza sativa (japonica
  misc_feature (1)..(313): Homolog of NCBI NO: 34894318 NR Description: unnamed protein product [Oryza sativa (japonica
  misc_feature (1)..(313): Homolog of NCBI NO: 30690360 NR Description: expressed protein [Arabidopsis thaliana]
  misc_feature (1)..(316): Homolog of NCBI NO: 15228693 NR Description: expressed protein [Arabidopsis thaliana]
MFHCAFQSVKKSIQAYVSRVGGSTVEVRLPFPVNSNEEIISKFREGLEKGRANGRTVRLAIIDHITSMPCVLMPVRELVKICREEGVEQVFVDAAHAIGSVKVDVKEIGADYYVSNLHKWFFCPPSIAFFYCKKRGSESDVHHPVVSHEFGNGLPIESAWIGTRDYSSQLVVPSVMEFVNRFEGGMEGIMMKNHDEAVRMGLMLADAWGTNLGSPPEMCVGMVMIGLPSKLCVGSDEDAIKLRSYLRVHYSVEVPVFYLGLRDGEEGVKDKDSGLITAYVRISHQVYNKTEDYERLRDAITELVKDQMTCQNLPAL

SEQ ID NO: 20966 - DNA, 2476 bp, Arabidopsis thaliana
  misc_feature (1)..(2476): Ceres Seq. ID no. 12482585
gaaacaccgcgtttttgtttacatttcttctctttctctctctctcttctctcatatctctctcttcgccgtcaggttttgcccaaatttctcggtcttcttcactcccgcgagttttttttctcgggaaaattttccaattccaagctccattgaagccaagtaagaggtgcgattctcttcaattttgacttggaacttgtaaatagcgtatggatttgagctggttatggacagaattctagctcgtatgaagaaatcaactggacgaagaggaggagataagaatattactccggtacggcggttagagcgtcgcgatgcggcgaggaatatcaattacgacgcagcttcatgttctagttcgtcagctgaagatctttccgtttcgacttcttcgttgatgactcgctctttggagtttccggagcctactagtttccgaatcggtggtggtgttggagagatggatcggatttatcggtctcttggtgtttctggtcctgatgatttggctatttcttttgatgcttgggaagcttgtaagaaacgttcttcttcagatgttgttaataggtttaagtcttttgatcttgataaggttcgtgatcaggatttgagtgaagaaggtcctagtggtgttgttgttggttctgattcaatgaatcataaggttcagggtcaggatttgagtgaagcaggtcctagtggtggaattgttactgagttgagtgagattgggaatttaatcactcctgtggataggttagtagctgatggtgtggtagagaataggcgtgttatggaaagaacaccaactattgtgaagtcgaaagggtatcttgtaccaaataatgtagtggctgttggtgttggtgttggtggtggtattaaggggctaagaccaccagtacttaagcctcctccggctatgaaacgaccccctattgatcatcggggatcgtcttgggatttcctgacgcatttcgctccaagtgaaacagttaagcggccgagttcctcttcttcttcttccgaggatggatgcgatgaagaggaaggcaaggaagaggaagcggaagcggaagagatgggagctaggtttatccagttgggggatacggctgacgagacgtgctcattcactacaaatgagggtgactcctcaagcacagtatccaatacttcgcctatctatccagatggaggagctatcataacgtcttggcaaaagggtcaacttttgggacgaggatcatttggttctgtgtatgaaggcatttctggagatggggacttctttgctgtcaaggaagtttcacttcttgatcagggaagtcaggcacaagaatgcatacaacaacttgagggggagattaaactacttagtcagcttcagcatcagaatattgtgagatatcgtggcacagccaaggatgggtcaaacttgtacatttttcttgagcttgtaacccaagggtcccttctaaaactctaccaaagataccagcttcgggactctgtagtctccttgtacactagacagattcttgacggtttgaaatatctccacgataaaggttttattcacagggacatcaaatgtgcaaatatattggtggacgctaatggcgccgtcaaacttgcagattttggattggcaaaggtttcaaagtttaacgacattaagtcctgcaagggaactccattttggatggctccagaggttattaaccgaaaggatagtgatggctatggaagtccagctgatatatggagcctcgggtgcactgtgctggaaatgtgtactggtcagatcccctactctgatctcgaacccgttcaagccctgtttaggatcggaaggggtactcttccggaagtacctgatacgttatcactagatgctcggcttttcatacttaagtgtcttaaagtgaacccggaagagcggccaactgcagctgaactgctgaaccatccatttgtgagaagacccttaccatccgtgggttcaggaggctcgggatcagcatctccccttctccgtagatgaggctaattttagtaaatttcctcaataggcataacccgaagatttatgagagattagatcccagagaaactattgggagacacgagacatgattcttcgacacacacacacgtgcggtcgggttgcgcagcaagagccaaacttacttagtttctgtgtcattcgttggttatttgttgcaagttatgtgttgggcttgattttaaaactgaagagccttatttttctaggaattagaaatgtcgaccttggggtttttgggtgtataggttttgtttagttttttttgttaaattatagtgtatgtatgtctgtatctatatcatgtaatgtataattatagttggttcttatagttcctggcttgttgtaactgtgtacacacatcgatgggtttaagttctatttgtctcatatttt

SEQ ID NO: 20967 - protein, 608 aa, Arabidopsis thaliana
  peptide (1)..(608): Ceres Seq. ID no. 12482586
  misc_feature (333)..(587): Pfam Name: Protein kinase domain Pfam Description: Protein kinase domain
  misc_feature (198)..(353): Homolog of NCBI NO: 7446456 NR Description: serine/threonine-specific protein kinase ARA.KIN
  misc_feature (330)..(587): Homolog of NCBI NO: 7446456 NR Description: serine/threonine-specific protein kinase ARA.KIN
  misc_feature (198)..(353): Homolog of NCBI NO: 28393793 NR Description: putative mitogen-activated protein kinase
  misc_feature (198)..(353): Homolog of NCBI NO: 15236509 NR Description: putative mitogen-activated protein kinase
  misc_feature (330)..(587): Homolog of NCBI NO: 28393793 NR Description: putative mitogen-activated protein kinase
  misc_feature (330)..(587): Homolog of NCBI NO: 15236509 NR Description: putative mitogen-activated protein kinase
  misc_feature (184)..(608): Homolog of NCBI NO: 3688209 NR Description: MAP3K beta 1 protein kinase [Brassica napus]
  misc_feature (1)..(236): Homolog of NCBI NO: 15236511 NR Description: putative mitogen-activated protein kinase
  misc_feature (220)..(608): Homolog of NCBI NO: 15236511 NR Description: putative mitogen-activated protein kinase
  misc_feature (118)..(608): Homolog of NCBI NO: 871812 NR Description: ARA.KIN gene product
MDRILARMKKSTGRRGGDKNITPVRRLERRDAARNINYDAASCSSSSAEDLSVSTSSLMTRSLEFPEPTSFRIGGGVGEMDRIYRSLGVSGPDDLAISFDAWEACKKRSSSDVVNRFKSFDLDKVRDQDLSEEGPSGVVVGSDSMNHKVQGQDLSEAGPSGGIVTELSEIGNLITPVDRLVADGVVENRRVMERTPTIVKSKGYLVPNNVVAVGVGVGGGIKGLRPPVLKPPPAMKRPPIDHRGSSWDFLTHFAPSETVKRPSSSSSSSEDGCDEEEGKEEEAEAEEMGARFIQLGDTADETCSFTTNEGDSSSTVSNTSPIYPDGGAIITSWQKGQLLGRGSFGSVYEGISGDGDFFAVKEVSLLDQGSQAQECIQQLEGEIKLLSQLQHQNIVRYRGTAKDGSNLYIFLELVTQGSLLKLYQRYQLRDSVVSLYTRQILDGLKYLHDKGFIHRDIKCANILVDANGAVKLADFGLAKVSKFNDIKSCKGTPFWMAPEVINRKDSDGYGSPADIWSLGCTVLEMCTGQIPYSDLEPVQALFRIGRGTLPEVPDTLSLDARLFILKCLKVNPEERPTAAELLNHPFVRRPLPSVGSGGSGSASPLLRR

SEQ ID NO: 20968 - protein, 601 aa, Arabidopsis thaliana
  peptide (1)..(601): Ceres Seq. ID no. 12482587
  misc_feature (326)..(580): Pfam Name: Protein kinase domain Pfam Description: Protein kinase domain
  misc_feature (191)..(346): Homolog of NCBI NO: 7446456 NR Description: serine/threonine-specific protein kinase ARA.KIN
  misc_feature (323)..(580): Homolog of NCBI NO: 7446456 NR Description: serine/threonine-specific protein kinase ARA.KIN
  misc_feature (191)..(346): Homolog of NCBI NO: 28393793 NR Description: putative mitogen-activated protein kinase
  misc_feature (191)..(346): Homolog of NCBI NO: 15236509 NR Description: putative mitogen-activated protein kinase
  misc_feature (323)..(580): Homolog of NCBI NO: 28393793 NR Description: putative mitogen-activated protein kinase
  misc_feature (323)..(580): Homolog of NCBI NO: 15236509 NR Description: putative mitogen-activated protein kinase
  misc_feature (177)..(601): Homolog of NCBI NO: 3688209 NR Description: MAP3K beta 1 protein kinase [Brassica napus]
  misc_feature (1)..(229): Homolog of NCBI NO: 15236511 NR Description: putative mitogen-activated protein kinase
  misc_feature (213)..(601): Homolog of NCBI NO: 15236511 NR Description: putative mitogen-activated protein kinase
  misc_feature (111)..(601): Homolog of NCBI NO: 871812 NR Description: ARA.KIN gene product
MKKSTGRRGGDKNITPVRRLERRDAARNINYDAASCSSSSAEDLSVSTSSLMTRSLEFPEPTSFRIGGGVGEMDRIYRSLGVSGPDDLAISFDAWEACKKRSSSDVVNRFKSFDLDKVRDQDLSEEGPSGVVVGSDSMNHKVQGQDLSEAGPSGGIVTELSEIGNLITPVDRLVADGVVENRRVMERTPTIVKSKGYLVPNNVVAVGVGVGGGIKGLRPPVLKPPPAMKRPPIDHRGSSWDFLTHFAPSETVKRPSSSSSSSEDGCDEEEGKEEEAEAEEMGARFIQLGDTADETCSFTTNEGDSSSTVSNTSPIYPDGGAIITSWQKGQLLGRGSFGSVYEGISGDGDFFAVKEVSLLDQGSQAQECIQQLEGEIKLLSQLQHQNIVRYRGTAKDGSNLYIFLELVTQGSLLKLYQRYQLRDSVVSLYTRQILDGLKYLHDKGFIHRDIKCANILVDANGAVKLADFGLAKVSKFNDIKSCKGTPFWMAPEVINRKDSDGYGSPADIWSLGCTVLEMCTGQIPYSDLEPVQALFRIGRGTLPEVPDTLSLDARLFILKCLKVNPEERPTAAELLNHPFVRRPLPSVGSGGSGSASPLLRR

SEQ ID NO: 20969 - protein, 550 aa, Arabidopsis thaliana
  peptide (1)..(550): Ceres Seq. ID no. 12482588
  misc_feature (275)..(529): Pfam Name: Protein kinase domain Pfam Description: Protein kinase domain
  misc_feature (140)..(295): Homolog of NCBI NO: 7446456 NR Description: serine/threonine-specific protein kinase ARA.KIN
  misc_feature (272)..(529): Homolog of NCBI NO: 7446456 NR Description: serine/threonine-specific protein kinase ARA.KIN
  misc_feature (140)..(295): Homolog of NCBI NO: 28393793 NR Description: putative mitogen-activated protein kinase
  misc_feature (140)..(295): Homolog of NCBI NO: 15236509 NR Description: putative mitogen-activated protein kinase
  misc_feature (272)..(529): Homolog of NCBI NO: 28393793 NR Description: putative mitogen-activated protein kinase
  misc_feature (272)..(529): Homolog of NCBI NO: 15236509 NR Description: putative mitogen-activated protein kinase
  misc_feature (126)..(550): Homolog of NCBI NO: 3688209 NR Description: MAP3K beta 1 protein kinase [Brassica napus]
  misc_feature (1)..(178): Homolog of NCBI NO: 15236511 NR Description: putative mitogen-activated protein kinase
  misc_feature (162)..(550): Homolog of NCBI NO: 15236511 NR Description: putative mitogen-activated protein kinase
  misc_feature (60)..(550): Homolog of NCBI NO: 871812 NR Description: ARA.KIN gene product
MTRSLEFPEPTSFRIGGGVGEMDRIYRSLGVSGPDDLAISFDAWEACKKRSSSDVVNRFKSFDLDKVRDQDLSEEGPSGVVVGSDSMNHKVQGQDLSEAGPSGGIVTELSEIGNLITPVDRLVADGVVENRRVMERTPTIVKSKGYLVPNNVVAVGVGVGGGIKGLRPPVLKPPPAMKRPPIDHRGSSWDFLTHFAPSETVKRPSSSSSSSEDGCDEEEGKEEEAEAEEMGARFIQLGDTADETCSFTTNEGDSSSTVSNTSPIYPDGGAIITSWQKGQLLGRGSFGSVYEGISGDGDFFAVKEVSLLDQGSQAQECIQQLEGEIKLLSQLQHQNIVRYRGTAKDGSNLYIFLELVTQGSLLKLYQRYQLRDSVVSLYTRQILDGLKYLHDKGFIHRDIKCANILVDANGAVKLADFGLAKVSKFNDIKSCKGTPFWMAPEVINRKDSDGYGSPADIWSLGCTVLEMCTGQIPYSDLEPVQALFRIGRGTLPEVPDTLSLDARLFILKCLKVNPEERPTAAELLNHPFVRRPLPSVGSGGSGSASPLLRR

SEQ ID NO: 20970 - DNA, 822 bp, Arabidopsis thaliana
  misc_feature (1)..(822): Ceres Seq. ID no. 13489916
  misc_feature: MA Experiment ID: 108434 Result: Down-regulated in Transcription
  misc_feature: MA Experiment 108434 PARAMETER Experiment Name: At_Root_Tips_cDNA_P Parameter: Tissue Value: Root Tips
  misc_feature: MA Experiment ID: 108461 Result: Up-regulated in Transcription
  misc_feature: MA Experiment 108461 PARAMETER Experiment Name: At_Germinating_Seeds_cDNA_P Parameter: Age (day) Value: 1 vs. 0
  misc_feature: MA Experiment 108461 PARAMETER Experiment Name: At_Germinating_Seeds_cDNA_P Parameter: Tissue Value: Germinating Seeds
  misc_feature: MA Experiment ID: 108462 Result: Up-regulated in Transcription
  misc_feature: MA Experiment 108462 PARAMETER Experiment Name: At_Germinating_Seeds_cDNA_P Parameter: Age (day) Value: 2 vs. 0
  misc_feature: MA Experiment 108462 PARAMETER Experiment Name: At_Germinating_Seeds_cDNA_P Parameter: Tissue Value: Germinating Seeds
  misc_feature: MA Experiment ID: 108474 Result: Down-regulated in Transcription
  misc_feature: MA Experiment 108474 PARAMETER Experiment Name: At_Drought_Flowers_cDNA_P Parameter: Timepoint (hr) Value: null
  misc_feature: MA Experiment 108474 PARAMETER Experiment Name: At_Drought_Flowers_cDNA_P Parameter: Treatment Value: Drought vs. No Drought
  misc_feature: MA Experiment ID: 108573 Result: Up-regulated in Transcription
  misc_feature: MA Experiment 108573 PARAMETER Experiment Name: At_Drought_cDNA_P Parameter: Timepoint (hr) Value: 6
  misc_feature: MA Experiment 108573 PARAMETER Experiment Name: At_Drought_cDNA_P Parameter: Tissue Value: Aerial
  misc_feature: MA Experiment 108573 PARAMETER Experiment Name: At_Drought_cDNA_P Parameter: Treatment Value: Drought vs. No Drought
  misc_feature: MA Experiment ID: 108594 Result: Down-regulated in Transcription
  misc_feature: MA Experiment 108594 PARAMETER Experiment Name: At_Ler-rhl_Root_cDNA_P Parameter: Plant Line Value: null
  misc_feature: MA Experiment ID: 108668 Result: Down-regulated in Transcription
  misc_feature: MA Experiment 108668 PARAMETER Experiment Name: At_2mM_SA_cDNA_P Parameter: Plant Line Value: WS
  misc_feature: MA Experiment 108668 PARAMETER Experiment Name: At_2mM_SA_cDNA_P Parameter: Timepoint (hr) Value: 6
  misc_feature: MA Experiment 108668 PARAMETER Experiment Name: At_2mM_SA_cDNA_P Parameter: Treatment Value: 2mM SA vs. No Treatment
  misc_feature: MA Experiment ID: 20000111 Result: Down-regulated in Transcription
  misc_feature: MA Experiment 20000111 PARAMETER Experiment Name: At_42deg_Heat_cDNA_P Parameter: Temperature (deg C) Value: 42 vs. 22
  misc_feature: MA Experiment 20000111 PARAMETER Experiment Name: At_42deg_Heat_cDNA_P Parameter: Timepoint (hr) Value: 6
  misc_feature: MA Experiment 20000111 PARAMETER Experiment Name: At_42deg_Heat_cDNA_P Parameter: Tissue Value: Aerial
  misc_feature: MA Experiment ID: 20000113 Result: Down-regulated in Transcription
  misc_feature: MA Experiment 20000113 PARAMETER Experiment Name: At_42deg_Heat_cDNA_P Parameter: Temperature (deg C) Value: 42 vs. 22
  misc_feature: MA Experiment 20000113 PARAMETER Experiment Name: At_42deg_Heat_cDNA_P Parameter: Timepoint (hr) Value: 8
  misc_feature: MA Experiment 20000113 PARAMETER Experiment Name: At_42deg_Heat_cDNA_P Parameter: Tissue Value: Aerial
  misc_feature: MA Experiment ID: 20000173 Result: Down-regulated in Transcription
  misc_feature: MA Experiment 20000173 PARAMETER Experiment Name: At_42deg_Heat_P Parameter: Age (day) Value: 14
  misc_feature: MA Experiment 20000173 PARAMETER Experiment Name: At_42deg_Heat_P Parameter: Organism Value: A. thaliana
  misc_feature: MA Experiment 20000173 PARAMETER Experiment Name: At_42deg_Heat_P Parameter: Plant Line Value: WS
  misc_feature: MA Experiment 20000173 PARAMETER Experiment Name: At_42deg_Heat_P Parameter: Temperature (deg C) Value: 42 vs. 22
  misc_feature: MA Experiment 20000173 PARAMETER Experiment Name: At_42deg_Heat_P Parameter: Timepoint (hr) Value: 6
  misc_feature: MA Experiment 20000173 PARAMETER Experiment Name: At_42deg_Heat_P Parameter: Tissue Value: Aerial
  misc_feature: MA Experiment ID: 20000182 Result: Down-regulated in Transcription
  misc_feature: MA Experiment 20000182 PARAMETER Experiment Name: At_2mM_SA_P Parameter: Age (day) Value: 14
  misc_feature: MA Experiment 20000182 PARAMETER Experiment Name: At_2mM_SA_P Parameter: Organism Value: A. thaliana
  misc_feature: MA Experiment 20000182 PARAMETER Experiment Name: At_2mM_SA_P Parameter: Plant Line Value: WS
  misc_feature: MA Experiment 20000182 PARAMETER Experiment Name: At_2mM_SA_P Parameter: Timepoint (hr) Value: 6
  misc_feature: MA Experiment 20000182 PARAMETER Experiment Name: At_2mM_SA_P Parameter: Tissue Value: Aerial
  misc_feature: MA Experiment 20000182 PARAMETER Experiment Name: At_2mM_SA_P Parameter: Treatment Value: 2mM SA vs. No Treatment
  misc_feature: MA Experiment ID: 20000184 Result: Down-regulated in Transcription
  misc_feature: MA Experiment 20000184 PARAMETER Experiment Name: At_Shoots__P Parameter: Age (day) Value: 7
  misc_feature: MA Experiment 20000184 PARAMETER Experiment Name: At_Shoots__P Parameter: Tissue Value: Shoots vs. Whole Plant
  misc_feature: MA Experiment ID: 20000185 Result: Up-regulated in Transcription
  misc_feature: MA Experiment 20000185 PARAMETER Experiment Name: At_Roots__P Parameter: Age (day) Value: 7 vs. 21
  misc_feature: MA Experiment 20000185 PARAMETER Experiment Name: At_Roots__P Parameter: Organism Value: A. thaliana
  misc_feature: MA Experiment 20000185 PARAMETER Experiment Name: At_Roots__P Parameter: Tissue Value: Roots vs. Whole Plant
  misc_feature: MA Experiment ID: 20000227 Result: Down-regulated in Transcription
  misc_feature: MA Experiment 20000227 PARAMETER Experiment Name: At_Root-Tips-vs-Tops_P Parameter: Tissue Value: Root Tips vs. Root Tops
  misc_feature: MA Experiment ID: 20000306 Result: Down-regulated in Transcription
  misc_feature: MA Experiment 20000306 PARAMETER Experiment Name: At_Germinating_Seeds_Sub_P Parameter: Age (hr) Value: 6 vs. 0
  misc_feature: MA Experiment 20000306 PARAMETER Experiment Name: At_Germinating_Seeds_Sub_P Parameter: Organism Value: A. thaliana
  misc_feature: MA Experiment 20000306 PARAMETER Experiment Name: At_Germinating_Seeds_Sub_P Parameter: Plant Line Value: WS
  misc_feature: MA Experiment 20000306 PARAMETER Experiment Name: At_Germinating_Seeds_Sub_P Parameter: Tissue Value: Germinating Seeds
  misc_feature: MA Experiment ID: 20000307 Result: Up-regulated in Transcription
  misc_feature: MA Experiment 20000307 PARAMETER Experiment Name: At_Germinating_Seeds_Sub_P Parameter: Age (hr) Value: 24 vs. 0
  misc_feature: MA Experiment 20000307 PARAMETER Experiment Name: At_Germinating_Seeds_Sub_P Parameter: Organism Value: A. thaliana
  misc_feature: MA Experiment 20000307 PARAMETER Experiment Name: At_Germinating_Seeds_Sub_P Parameter: Plant Line Value: WS
  misc_feature: MA Experiment 20000307 PARAMETER Experiment Name: At_Germinating_Seeds_Sub_P Parameter: Tissue Value: Germinating Seeds
  misc_feature: MA Experiment ID: 20000314 Result: Up-regulated in Transcription
  misc_feature: MA Experiment 20000314 PARAMETER Experiment Name: At_14day_Shoots-Roots_Sub_P Parameter: Age (day) Value: 14
  misc_feature: MA Experiment 20000314 PARAMETER Experiment Name: At_14day_Shoots-Roots_Sub_P Parameter: Organism Value: A. thaliana
  misc_feature: MA Experiment 20000314 PARAMETER Experiment Name: At_14day_Shoots-Roots_Sub_P Parameter: Plant Line Value: WS
  misc_feature: MA Experiment 20000314 PARAMETER Experiment Name: At_14day_Shoots-Roots_Sub_P Parameter: Tissue Value: Roots vs. Whole Plant
  misc_feature: MA Experiment ID: 20000315 Result: Down-regulated in Transcription
  misc_feature: MA Experiment 20000315 PARAMETER Experiment Name: At_14day_Shoots-Roots_Sub_P Parameter: Age (day) Value: 14
  misc_feature: MA Experiment 20000315 PARAMETER Experiment Name: At_14day_Shoots-Roots_Sub_P Parameter: Organism Value: A. thaliana
  misc_feature: MA Experiment 20000315 PARAMETER Experiment Name: At_14day_Shoots-Roots_Sub_P Parameter: Plant Line Value: WS
  misc_feature: MA Experiment 20000315 PARAMETER Experiment Name: At_14day_Shoots-Roots_Sub_P Parameter: Tissue Value: Shoots vs. Whole Plant
  misc_feature: MA Experiment ID: 20000327 Result: Down-regulated in Transcription
  misc_feature: MA Experiment 20000327 PARAMETER Experiment Name: At_42deg_Heat_Sub_P Parameter: Age (day) Value: 14
  misc_feature: MA Experiment 20000327 PARAMETER Experiment Name: At_42deg_Heat_Sub_P Parameter: Organism Value: A. thaliana
  misc_feature: MA Experiment 20000327 PARAMETER Experiment Name: At_42deg_Heat_Sub_P Parameter: Plant Line Value: WS
  misc_feature: MA Experiment 20000327 PARAMETER Experiment Name: At_42deg_Heat_Sub_P Parameter: Temperature (deg C) Value: 42 vs. 22
  misc_feature: MA Experiment 20000327 PARAMETER Experiment Name: At_42deg_Heat_Sub_P Parameter: Timepoint (hr) Value: 1
  misc_feature: MA Experiment 20000327 PARAMETER Experiment Name: At_42deg_Heat_Sub_P Parameter: Tissue Value: Aerial
  misc_feature: MA Experiment ID: 20000329 Result: Up-regulated in Transcription
  misc_feature: MA Experiment 20000329 PARAMETER Experiment Name: At_4deg_Cold_Sub_P Parameter: Age (day) Value: 14
  misc_feature: MA Experiment 20000329 PARAMETER Experiment Name: At_4deg_Cold_Sub_P Parameter: Organism Value: A. thaliana
  misc_feature: MA Experiment 20000329 PARAMETER Experiment Name: At_4deg_Cold_Sub_P Parameter: Plant Line Value: WS
  misc_feature: MA Experiment 20000329 PARAMETER Experiment Name: At_4deg_Cold_Sub_P Parameter: Temperature (deg C) Value: 4 vs. 22
  misc_feature: MA Experiment 20000329 PARAMETER Experiment Name: At_4deg_Cold_Sub_P Parameter: Timepoint (hr) Value: 6
  misc_feature: MA Experiment 20000329 PARAMETER Experiment Name: At_4deg_Cold_Sub_P Parameter: Tissue Value: Aerial
  misc_feature: MA Experiment ID: 20000439 Result: Up-regulated in Transcription
  misc_feature: MA Experiment 20000439 PARAMETER Experiment Name: At_Roots__P Parameter: Age (day) Value: 14 vs. 21
  misc_feature: MA Experiment 20000439 PARAMETER Experiment Name: At_Roots__P Parameter: Organism Value: A. thaliana
  misc_feature: MA Experiment 20000439 PARAMETER Experiment Name: At_Roots__P Parameter: Tissue Value: Roots vs. Whole Plant
  misc_feature: MA Experiment ID: 20000794 Result: Down-regulated in Transcription
  misc_feature: MA Experiment 20000794 PARAMETER Experiment Name: At_Petals_P Parameter: Age (day) Value: 23-25 days
  misc_feature: MA Experiment 20000794 PARAMETER Experiment Name: At_Petals_P Parameter: Plant Line Value: WS
  misc_feature: MA Experiment 20000794 PARAMETER Experiment Name: At_Petals_P Parameter: Tissue Value: Petals vs. Whole plant
  misc_feature: MA Experiment ID: 20001451 Result: Up-regulated in Transcription
  misc_feature: MA Experiment 20001451 PARAMETER Experiment Name: At_Far-red-induction_P Parameter: Age (day) Value: 7
  misc_feature: MA Experiment 20001451 PARAMETER Experiment Name: At_Far-red-induction_P Parameter: Light Value: Far-red vs. White
  misc_feature: MA Experiment 20001451 PARAMETER Experiment Name: At_Far-red-induction_P Parameter: Organism Value: A. thaliana
  misc_feature: MA Experiment 20001451 PARAMETER Experiment Name: At_Far-red-induction_P Parameter: Plant Line Value: Columbia
  misc_feature: MA Experiment 20001451 PARAMETER Experiment Name: At_Far-red-induction_P Parameter: Timepoint (hr) Value: 24
  misc_feature: MA Experiment 20001451 PARAMETER Experiment Name: At_Far-red-induction_P Parameter: Tissue Value: Whole Plant
  misc_feature: MA Experiment ID: 20001556 Result: Down-regulated in Transcription
  misc_feature: MA Experiment 20001556 PARAMETER Experiment Name: At_Drought_Soil_Dry_P Parameter: Age (day) Value: 26
  misc_feature: MA Experiment 20001556 PARAMETER Experiment Name: At_Drought_Soil_Dry_P Parameter: Organism Value: A. thaliana
  misc_feature: MA Experiment 20001556 PARAMETER Experiment Name: At_Drought_Soil_Dry_P Parameter: Plant Line Value: WS
  misc_feature: MA Experiment 20001556 PARAMETER Experiment Name: At_Drought_Soil_Dry_P Parameter: Post Timepoint (hr) Value: None
  misc_feature: MA Experiment 20001556 PARAMETER Experiment Name: At_Drought_Soil_Dry_P Parameter: Post-Treatment Value: None
  misc_feature: MA Experiment 20001556 PARAMETER Experiment Name: At_Drought_Soil_Dry_P Parameter: Timepoint (day) Value: 12
  misc_feature: MA Experiment 20001556 PARAMETER Experiment Name: At_Drought_Soil_Dry_P Parameter: Treatment Value: Drought vs. No Drought
  misc_feature: MA Experiment ID: 20001557 Result: Down-regulated in Transcription
  misc_feature: MA Experiment 20001557 PARAMETER Experiment Name: At_Drought_Soil_Dry_P Parameter: Age (day) Value: 27
  misc_feature: MA Experiment 20001557 PARAMETER Experiment Name: At_Drought_Soil_Dry_P Parameter: Organism Value: A. thaliana
  misc_feature: MA Experiment 20001557 PARAMETER Experiment Name: At_Drought_Soil_Dry_P Parameter: Plant Line Value: WS
  misc_feature: MA Experiment 20001557 PARAMETER Experiment Name: At_Drought_Soil_Dry_P Parameter: Post Timepoint (hr) Value: 3
  misc_feature: MA Experiment 20001557 PARAMETER Experiment Name: At_Drought_Soil_Dry_P Parameter: Post-Treatment Value: Re-Water vs. No Drought
  misc_feature: MA Experiment 20001557 PARAMETER Experiment Name: At_Drought_Soil_Dry_P Parameter: Timepoint (day) Value: 13
  misc_feature: MA Experiment 20001557 PARAMETER Experiment Name: At_Drought_Soil_Dry_P Parameter: Treatment Value: Drought vs. No Drought
  misc_feature: MA Experiment ID: 20001558 Result: Down-regulated in Transcription
  misc_feature: MA Experiment 20001558 PARAMETER Experiment Name: At_Drought_Soil_Dry_P Parameter: Age (day) Value: 27
  misc_feature: MA Experiment 20001558 PARAMETER Experiment Name: At_Drought_Soil_Dry_P Parameter: Organism Value: A. thaliana
  misc_feature: MA Experiment 20001558 PARAMETER Experiment Name: At_Drought_Soil_Dry_P Parameter: Plant Line Value: WS
  misc_feature: MA Experiment 20001558 PARAMETER Experiment Name: At_Drought_Soil_Dry_P Parameter: Post Timepoint (hr) Value: 6
  misc_feature: MA Experiment 20001558 PARAMETER Experiment Name: At_Drought_Soil_Dry_P Parameter: Post-Treatment Value: Re-Water vs. No Drought
  misc_feature: MA Experiment 20001558 PARAMETER Experiment Name: At_Drought_Soil_Dry_P Parameter: Timepoint (day) Value: 13
  misc_feature: MA Experiment 20001558 PARAMETER Experiment Name: At_Drought_Soil_Dry_P Parameter: Treatment Value: Drought vs. No Drought
  misc_feature: MA Experiment ID: 20001560 Result: Down-regulated in Transcription
  misc_feature: MA Experiment 20001560 PARAMETER Experiment Name: At_Drought_Soil_Dry_P Parameter: Age (day) Value: 28
  misc_feature: MA Experiment 20001560 PARAMETER Experiment Name: At_Drought_Soil_Dry_P Parameter: Organism Value: A. thaliana
  misc_feature: MA Experiment 20001560 PARAMETER Experiment Name: At_Drought_Soil_Dry_P Parameter: Plant Line Value: WS
  misc_feature: MA Experiment 20001560 PARAMETER Experiment Name: At_Drought_Soil_Dry_P Parameter: Post Timepoint (hr) Value: None
  misc_feature: MA Experiment 20001560 PARAMETER Experiment Name: At_Drought_Soil_Dry_P Parameter: Post-Treatment Value: None
  misc_feature: MA Experiment 20001560 PARAMETER Experiment Name: At_Drought_Soil_Dry_P Parameter: Timepoint (day) Value: 14
  misc_feature: MA Experiment 20001560 PARAMETER Experiment Name: At_Drought_Soil_Dry_P Parameter: Treatment Value: Drought vs. No Drought
atagttaaataaaattcatcttttcacggatatatttaatttggagccatgatgaattcaagaatttctattatcattgcgttatcttgcattatgatcacttcaattcgtgcatacgataccgacgatcttcaagatctctgcgttgccgataaatctcacggaaccaaactgaatggatttccgtgcaaggaaacattaaacatcacggagtccgacttcttcttcgccggaatctcaaaacccgccgtcataaactctacgatgggttcggccgtaacaggagccaacgtggaaaagatcccaggcctcaacactctctccgtctccttagcacgtatagactacgcgccgggaggtttaaacccaccgcacactcacccacgcgccaccgaagtcgtctacgttctagaaggagagcttgaggttggatttatcacaacagcgaataagcttttcactaaaaccataaagattggtgaagttttcgtttttccaagagggcttgtgcattttcaaaagaacaatgggaaatctcccgcgtcggttttgtcggcatttaatagtcagttgccgggaacggcttctgttgcggcaaccctatttgcggcagagccggctttgccggaagatgtgttaactaagacttttcaagtgggatctaagatggttgataagattaaggaaaggcttgccactaaaaaataattcataaaagtttaaaaaaaaaataaaaacatgaaaatataatgtaaccgttacctagaaagattttatttaacactactgtattgaataaaaaggtgttactgtgattatctt

SEQ ID NO: 20971 - protein, 219 aa, Arabidopsis thaliana
  peptide (1)..(219): Ceres Seq. ID no. 13489917
  misc_feature (59)..(209): Pfam Name: Cupin Pfam Description: Cupin
  misc_feature (6)..(219): Homolog of NCBI NO: 7447341 NR Description: germin homolog - potato
  misc_feature (1)..(219): Homolog of NCBI NO: 27805638 NR Description: Nectarin 1 precursor (Superoxide dismutase [Mn])
  misc_feature (6)..(219): Homolog of NCBI NO: 18203442 NR Description: Rhicadhesin receptor precursor (Germin-like
  misc_feature (4)..(214): Homolog of NCBI NO: 34902528 NR Description: probable germin protein 4
  misc_feature (1)..(219): Homolog of NCBI NO: 15217561 NR Description: germin-like protein (GLP4) (GLP5) [Arabidopsis
  misc_feature (7)..(219): Homolog of NCBI NO: 34904670 NR Description: putative germin protein [Oryza sativa (japonica
  misc_feature (20)..(219): Homolog of NCBI NO: 15228673 NR Description: germin-like protein (GLP10) [Arabidopsis
  misc_feature (20)..(219): Homolog of NCBI NO: 1934730 NR Description: germin-like protein [Arabidopsis thaliana]
  misc_feature (1)..(219): Homolog of NCBI NO: 18202917 NR Description: Germin-like protein subfamily 2 member 2
  misc_feature (1)..(219): Homolog of NCBI NO: 26449711 NR Description: putative germin [Arabidopsis thaliana]
MMNSRISIIIALSCIMITSIRAYDTDDLQDLCVADKSHGTKLNGFPCKETLNITESDFFFAGISKPAVINSTMGSAVTGANVEKIPGLNTLSVSLARIDYAPGGLNPPHTHPRATEVVYVLEGELEVGFITTANKLFTKTIKIGEVFVFPRGLVHFQKNNGKSPASVLSAFNSQLPGTASVAATLFAAEPALPEDVLTKTFQVGSKMVDKIKERLATKK

SEQ ID NO: 20972 - protein, 218 aa, Arabidopsis thaliana
  peptide (1)..(218): Ceres Seq. ID no. 13489918
  misc_feature (58)..(208): Pfam Name: Cupin Pfam Description: Cupin
  misc_feature (5)..(218): Homolog of NCBI NO: 7447341 NR Description: germin homolog - potato
  misc_feature (1)..(218): Homolog of NCBI NO: 27805638 NR Description: Nectarin 1 precursor (Superoxide dismutase [Mn])
  misc_feature (5)..(218): Homolog of NCBI NO: 18203442 NR Description: Rhicadhesin receptor precursor (Germin-like
  misc_feature (3)..(213): Homolog of NCBI NO: 34902528 NR Description: probable germin protein 4
  misc_feature (1)..(218): Homolog of NCBI NO: 15217561 NR Description: germin-like protein (GLP4) (GLP5) [Arabidopsis
  misc_feature (6)..(218): Homolog of NCBI NO: 34904670 NR Description: putative germin protein [Oryza sativa (japonica
  misc_feature (19)..(218): Homolog of NCBI NO: 15228673 NR Description: germin-like protein (GLP10) [Arabidopsis
  misc_feature (19)..(218): Homolog of NCBI NO: 1934730 NR Description: germin-like protein [Arabidopsis thaliana]
  misc_feature (1)..(218): Homolog of NCBI NO: 18202917 NR Description: Germin-like protein subfamily 2 member 2
  misc_feature (1)..(218): Homolog of NCBI NO: 26449711 NR Description: putative germin [Arabidopsis thaliana]
MNSRISIIIALSCIMITSIRAYDTDDLQDLCVADKSHGTKLNGFPCKETLNITESDFFFAGISKPAVINSTMGSAVTGANVEKIPGLNTLSVSLARIDYAPGGLNPPHTHPRATEVVYVLEGELEVGFITTANKLFTKTIKIGEVFVFPRGLVHFQKNNGKSPASVLSAFNSQLPGTASVAATLFAAEPALPEDVLTKTFQVGSKMVDKIKERLATKK

SEQ ID NO: 20973 - protein, 204 aa, Arabidopsis thaliana
  peptide (1)..(204): Ceres Seq. ID no. 13489919
  misc_feature (44)..(194): Pfam Name: Cupin Pfam Description: Cupin
  misc_feature (1)..(204): Homolog of NCBI NO: 7447341 NR Description: germin homolog - potato
  misc_feature (1)..(204): Homolog of NCBI NO: 27805638 NR Description: Nectarin 1 precursor (Superoxide dismutase [Mn])
  misc_feature (1)..(204): Homolog of NCBI NO: 18203442 NR Description: Rhicadhesin receptor precursor (Germin-like
  misc_feature (1)..(199): Homolog of NCBI NO: 34902528 NR Description: probable germin protein 4
  misc_feature (1)..(204): Homolog of NCBI NO: 15217561 NR Description: germin-like protein (GLP4) (GLP5) [Arabidopsis
  misc_feature (1)..(204): Homolog of NCBI NO: 34904670 NR Description: putative germin protein [Oryza sativa (japonica
  misc_feature (5)..(204): Homolog of NCBI NO: 15228673 NR Description: germin-like protein (GLP10) [Arabidopsis
  misc_feature (5)..(204): Homolog of NCBI NO: 1934730 NR Description: germin-like protein [Arabidopsis thaliana]
  misc_feature (1)..(204): Homolog of NCBI NO: 18202917 NR Description: Germin-like protein subfamily 2 member 2
  misc_feature (1)..(204): Homolog of NCBI NO: 26449711 NR Description: putative germin [Arabidopsis thaliana]
MITSIRAYDTDDLQDLCVADKSHGTKLNGFPCKETLNITESDFFFAGISKPAVINSTMGSAVTGANVEKIPGLNTLSVSLARIDYAPGGLNPPHTHPRATEVVYVLEGELEVGFITTANKLFTKTIKIGEVFVFPRGLVHFQKNNGKSPASVLSAFNSQLPGTASVAATLFAAEPALPEDVLTKTFQVGSKMVDKIKERLATKK

SEQ ID NO: 20974 - DNA, 828 bp, Arabidopsis thaliana
  misc_feature (1)..(828): Ceres Seq. ID no. 13489009
  misc_feature: MA Experiment ID: 108435 Result: Down-regulated in Transcription
  misc_feature: MA Experiment 108435 PARAMETER Experiment Name: At_stm_Mutants_cDNA_P Parameter: Plant Line Value: wt Landsburg vs stm
  misc_feature: MA Experiment 108435 PARAMETER Experiment Name: At_stm_Mutants_cDNA_P Parameter: Tissue Value: Shoot Apical Meristem Region
  misc_feature: MA Experiment ID: 108488 Result: Up-regulated in Transcription
  misc_feature: MA Experiment ID: 108595 Result: Down-regulated in Transcription
  misc_feature: MA Experiment 108595 PARAMETER Experiment Name: At_Ler-pi_Ovule_cDNA_P Parameter: Plant Line Value: null
  misc_feature: MA Experiment ID: 20000070 Result: Down-regulated in Transcription
  misc_feature: MA Experiment 20000070 PARAMETER Experiment Name: At_100uM_ABA_Mutants_cDNA_P Parameter: Plant Line Value: CS24
  misc_feature: MA Experiment 20000070 PARAMETER Experiment Name: At_100uM_ABA_Mutants_cDNA_P Parameter: Timepoint (hr) Value: 6
  misc_feature: MA Experiment 20000070 PARAMETER Experiment Name: At_100uM_ABA_Mutants_cDNA_P Parameter: Tissue Value: Aerial
  misc_feature: MA Experiment 20000070 PARAMETER Experiment Name: At_100uM_ABA_Mutants_cDNA_P Parameter: Treatment Value: 100uM ABA vs. No Treatment
  misc_feature: MA Experiment ID: 20000180 Result: Up-regulated in Transcription
  misc_feature: MA Experiment 20000180 PARAMETER Experiment Name: At_Germinating_Seeds_P Parameter: Age (hr) Value: 24 vs. 0
  misc_feature: MA Experiment 20000180 PARAMETER Experiment Name: At_Germinating_Seeds_P Parameter: Tissue Value: Germinating Seeds
  misc_feature: MA Experiment ID: 20000185 Result: Down-regulated in Transcription
  misc_feature: MA Experiment 20000185 PARAMETER Experiment Name: At_Roots__P Parameter: Age (day) Value: 7 vs. 21
  misc_feature: MA Experiment 20000185 PARAMETER Experiment Name: At_Roots__P Parameter: Organism Value: A. thaliana
  misc_feature: MA Experiment 20000185 PARAMETER Experiment Name: At_Roots__P Parameter: Tissue Value: Roots vs. Whole Plant
  misc_feature: MA Experiment ID: 20000224 Result: Up-regulated in Transcription
  misc_feature: MA Experiment ID: 20000439 Result: Down-regulated in Transcription
  misc_feature: MA Experiment 20000439 PARAMETER Experiment Name: At_Roots__P Parameter: Age (day) Value: 14 vs. 21
  misc_feature: MA Experiment 20000439 PARAMETER Experiment Name: At_Roots__P Parameter: Organism Value: A. thaliana
  misc_feature: MA Experiment 20000439 PARAMETER Experiment Name: At_Roots__P Parameter: Tissue Value: Roots vs. Whole Plant
  misc_feature: MA Experiment ID: 20001450 Result: Down-regulated in Transcription
  misc_feature: MA Experiment 20001450 PARAMETER Experiment Name: At_Far-red-induction_P Parameter: Age (day) Value: 7
  misc_feature: MA Experiment 20001450 PARAMETER Experiment Name: At_Far-red-induction_P Parameter: Light Value: Far-red vs. White
  misc_feature: MA Experiment 20001450 PARAMETER Experiment Name: At_Far-red-induction_P Parameter: Organism Value: A. thaliana
  misc_feature: MA Experiment 20001450 PARAMETER Experiment Name: At_Far-red-induction_P Parameter: Plant Line Value: Columbia
  misc_feature: MA Experiment 20001450 PARAMETER Experiment Name: At_Far-red-induction_P Parameter: Timepoint (hr) Value: 8
  misc_feature: MA Experiment 20001450 PARAMETER Experiment Name: At_Far-red-induction_P Parameter: Tissue Value: Whole Plant
atcgtcatctgtggaacggataggacgaaggaaaaagaagaagagtgaaagttgcagagcgagaaaaaatggcaaccatgtctgctcttcagagctcttttacttctctttctctatctcccagctcttccttcctcggccagcgtttaatttccccgatttccctctccgtcacttctccggtcaagcccgctgagaacccatgtcttgttcttgcaaagctcaagcgttgggaacgaaaagaatgcaaaccaaacagtcttccgattctccacaaaatgcatgtcaagtttggagatacagtcaaagtaatatctggacgcgacaagggtaaaatcggagaggttactaagattttcactcacaacagtaccattgtgatcaaagatgtgaacctcaaaacaaaacacatgaagagccgagaagagggagagcctggtcaaattgtcaagatagaagcacctatccacagctcaaatgtgatgttgtattcaaaagaaaaagacgtagtaagccgggtgggtcacaaggtacttgaagatggacagaaggtaagatatctgatcaaaacaggggaactcatcgacaccattgagaagtggaagctacttaaggaggctaaggataaggaaaccacccaagttgcagttacctccgcatcttagcgtctcatttctttcttcttcagtgcacttttgatataatagacctatgcattggatggatgtattgaatcccttttaaggtaaattataatatttctgctcccctcatgaacacctcttagcatgatttaacatattaatcgaactaaagccgggtactctt

SEQ ID NO: 20975 - protein, 198 aa, Arabidopsis thaliana
  peptide (1)..(198): Ceres Seq. ID no. 13489010
  misc_feature (73)..(106): Pfam Name: KOW motif Pfam Description: KOW motif
  misc_feature (4)..(198): Homolog of NCBI NO: 400989 NR Description: 50S RIBOSOMAL PROTEIN L24, CHLOROPLAST PRECURSOR
  misc_feature (4)..(195): Homolog of NCBI NO: 132819 NR Description: 50S RIBOSOMAL PROTEIN L24, CHLOROPLAST PRECURSOR
  misc_feature (61)..(173): Homolog of NCBI NO: 16329930 NR Description: 50S ribosomal protein L24 [Synechocystis sp. PCC
  misc_feature (61)..(173): Homolog of NCBI NO: 22297636 NR Description: 50S ribosomal protein L24 [Thermosynechococcus
  misc_feature (1)..(103): Homolog of NCBI NO: 30696487 NR Description: 50S ribosomal protein L24, chloroplast precursor
  misc_feature (1)..(196): Homolog of NCBI NO: 132821 NR Description: 50S RIBOSOMAL PROTEIN L24, CHLOROPLAST PRECURSOR
  misc_feature (89)..(198): Homolog of NCBI NO: 30696487 NR Description: 50S ribosomal protein L24, chloroplast precursor
  misc_feature (66)..(173): Homolog of NCBI NO: 23042779 NR Description: hypothetical protein [Trichodesmium erythraeum
  misc_feature (1)..(198): Homolog of NCBI NO: 1694974 NR Description: plastid ribosomal protein [Arabidopsis thaliana]
  misc_feature (1)..(198): Homolog of NCBI NO: 30696483 NR Description: 50S ribosomal protein L24, chloroplast precursor
MATMSALQSSFTSLSLSPSSSFLGQRLISPISLSVTSPVKPAENPCLVLAKLKRWERKECKPNSLPILHKMHVKFGDTVKVISGRDKGKIGEVTKIFTHNSTIVIKDVNLKTKHMKSREEGEPGQIVKIEAPIHSSNVMLYSKEKDVVSRVGHKVLEDGQKVRYLIKTGELIDTIEKWKLLKEAKDKETTQVAVTSAS

SEQ ID NO: 20976 - protein, 195 aa, Arabidopsis thaliana
  peptide (1)..(195): Ceres Seq. ID no. 13489011
  misc_feature (70)..(103): Pfam Name: KOW motif Pfam Description: KOW motif
  misc_feature (58)..(170): Homolog of NCBI NO: 16329930 NR Description: 50S ribosomal protein L24 [Synechocystis sp. PCC
  misc_feature (63)..(170): Homolog of NCBI NO: 23042779 NR Description: hypothetical protein [Trichodesmium erythraeum
  misc_feature (58)..(170): Homolog of NCBI NO: 22297636 NR Description: 50S ribosomal protein L24 [Thermosynechococcus
  misc_feature (86)..(195): Homolog of NCBI NO: 30696487 NR Description: 50S ribosomal protein L24, chloroplast precursor
  misc_feature (1)..(100): Homolog of NCBI NO: 30696487 NR Description: 50S ribosomal protein L24, chloroplast precursor
  misc_feature (1)..(193): Homolog of NCBI NO: 132821 NR Description: 50S RIBOSOMAL PROTEIN L24, CHLOROPLAST PRECURSOR
  misc_feature (1)..(195): Homolog of NCBI NO: 400989 NR Description: 50S RIBOSOMAL PROTEIN L24, CHLOROPLAST PRECURSOR
  misc_feature (1)..(192): Homolog of NCBI NO: 132819 NR Description: 50S RIBOSOMAL PROTEIN L24, CHLOROPLAST PRECURSOR
  misc_feature (1)..(195): Homolog of NCBI NO: 1694974 NR Description: plastid ribosomal protein [Arabidopsis thaliana]
  misc_feature (1)..(195): Homolog of NCBI NO: 30696483 NR Description: 50S ribosomal protein L24, chloroplast precursor
MSALQSSFTSLSLSPSSSFLGQRLISPISLSVTSPVKPAENPCLVLAKLKRWERKECKPNSLPILHKMHVKFGDTVKVISGRDKGKIGEVTKIFTHNSTIVIKDVNLKTKHMKSREEGEPGQIVKIEAPIHSSNVMLYSKEKDVVSRVGHKVLEDGQKVRYLIKTGELIDTIEKWKLLKEAKDKETTQVAVTSAS

SEQ ID NO: 20977 - protein, 128 aa, Arabidopsis thaliana
  peptide (1)..(128): Ceres Seq. ID no. 13489012
  misc_feature (3)..(36): Pfam Name: KOW motif Pfam Description: KOW motif
  misc_feature (1)..(103): Homolog of NCBI NO: 16329930 NR Description: 50S ribosomal protein L24 [Synechocystis sp. PCC
  misc_feature (1)..(103): Homolog of NCBI NO: 23042779 NR Description: hypothetical protein [Trichodesmium erythraeum
  misc_feature (1)..(103): Homolog of NCBI NO: 22297636 NR Description: 50S ribosomal protein L24 [Thermosynechococcus
  misc_feature (19)..(128): Homolog of NCBI NO: 30696487 NR Description: 50S ribosomal protein L24, chloroplast precursor
  misc_feature (1)..(33): Homolog of NCBI NO: 30696487 NR Description: 50S ribosomal protein L24, chloroplast precursor
  misc_feature (1)..(126): Homolog of NCBI NO: 132821 NR Description: 50S RIBOSOMAL PROTEIN L24, CHLOROPLAST PRECURSOR
  misc_feature (1)..(128): Homolog of NCBI NO: 400989 NR Description: 50S RIBOSOMAL PROTEIN L24, CHLOROPLAST PRECURSOR
  misc_feature (1)..(125): Homolog of NCBI NO: 132819 NR Description: 50S RIBOSOMAL PROTEIN L24, CHLOROPLAST PRECURSOR
  misc_feature (1)..(128): Homolog of NCBI NO: 1694974 NR Description: plastid ribosomal protein [Arabidopsis thaliana]
  misc_feature (1)..(128): Homolog of NCBI NO: 30696483 NR Description: 50S ribosomal protein L24, chloroplast precursor
MHVKFGDTVKVISGRDKGKIGEVTKIFTHNSTIVIKDVNLKTKHMKSREEGEPGQIVKIEAPIHSSNVMLYSKEKDVVSRVGHKVLEDGQKVRYLIKTGELIDTIEKWKLLKEAKDKETTQVAVTSAS

SEQ ID NO: 20978 - DNA, 828 bp, Arabidopsis thaliana
  misc_feature (1)..(828): Ceres Seq. ID no. 12333111
  misc_feature: MA Experiment ID: 108434 Result: Up-regulated in Transcription
  misc_feature: MA Experiment 108434 PARAMETER Experiment Name: At_Root_Tips_cDNA_P Parameter: Tissue Value: Root Tips
  misc_feature: MA Experiment ID: 108435 Result: Up-regulated in Transcription
  misc_feature: MA Experiment 108435 PARAMETER Experiment Name: At_stm_Mutants_cDNA_P Parameter: Plant Line Value: wt Landsburg vs stm
  misc_feature: MA Experiment 108435 PARAMETER Experiment Name: At_stm_Mutants_cDNA_P Parameter: Tissue Value: Shoot Apical Meristem Region
  misc_feature: MA Experiment ID: 108462 Result: Down-regulated in Transcription
  misc_feature: MA Experiment 108462 PARAMETER Experiment Name: At_Germinating_Seeds_cDNA_P Parameter: Age (day) Value: 2 vs. 0
  misc_feature: MA Experiment 108462 PARAMETER Experiment Name: At_Germinating_Seeds_cDNA_P Parameter: Tissue Value: Germinating Seeds
  misc_feature: MA Experiment ID: 108463 Result: Down-regulated in Transcription
  misc_feature: MA Experiment 108463 PARAMETER Experiment Name: At_Germinating_Seeds_cDNA_P Parameter: Age (day) Value: 3 vs. 0
  misc_feature: MA Experiment 108463 PARAMETER Experiment Name: At_Germinating_Seeds_cDNA_P Parameter: Tissue Value: Germinating Seeds
  misc_feature: MA Experiment ID: 108464 Result: Down-regulated in Transcription
  misc_feature: MA Experiment 108464 PARAMETER Experiment Name: At_Germinating_Seeds_cDNA_P Parameter: Age (day) Value: 4 vs. 0
  misc_feature: MA Experiment 108464 PARAMETER Experiment Name: At_Germinating_Seeds_cDNA_P Parameter: Tissue Value: Germinating Seeds
  misc_feature: MA Experiment ID: 108489 Result: Up-regulated in Transcription
  misc_feature: MA Experiment ID: 108569 Result: Down-regulated in Transcription
  misc_feature: MA Experiment 108569 PARAMETER Experiment Name: At_0.001%_MeJA__cDNA_P Parameter: Timepoint (hr) Value: 6
  misc_feature: MA Experiment 108569 PARAMETER Experiment Name: At_0.001%_MeJA__cDNA_P Parameter: Tissue Value: Aerial
  misc_feature: MA Experiment 108569 PARAMETER Experiment Name: At_0.001%_MeJA__cDNA_P Parameter: Treatment Value: 0.001% MeJA vs. No Treatment
  misc_feature: MA Experiment ID: 108573 Result: Down-regulated in Transcription
  misc_feature: MA Experiment 108573 PARAMETER Experiment Name: At_Drought_cDNA_P Parameter: Timepoint (hr) Value: 6
  misc_feature: MA Experiment 108573 PARAMETER Experiment Name: At_Drought_cDNA_P Parameter: Tissue Value: Aerial
  misc_feature: MA Experiment 108573 PARAMETER Experiment Name: At_Drought_cDNA_P Parameter: Treatment Value: Drought vs. No Drought
  misc_feature: MA Experiment ID: 108579 Result: Up-regulated in Transcription
  misc_feature: MA Experiment 108579 PARAMETER Experiment Name: At_4deg_Cold_cDNA_P Parameter: Temperature (deg C) Value: 4 vs. 22
  misc_feature: MA Experiment 108579 PARAMETER Experiment Name: At_4deg_Cold_cDNA_P Parameter: Timepoint (hr) Value: 6
  misc_feature: MA Experiment 108579 PARAMETER Experiment Name: At_4deg_Cold_cDNA_P Parameter: Tissue Value: Aerial
  misc_feature: MA Experiment ID: 108585 Result: Down-regulated in Transcription
  misc_feature: MA Experiment 108585 PARAMETER Experiment Name: At_5mM_NaNP_cDNA_P Parameter: Timepoint (hr) Value: 6
  misc_feature: MA Experiment 108585 PARAMETER Experiment Name: At_5mM_NaNP_cDNA_P Parameter: Tissue Value: Aerial
  misc_feature: MA Experiment 108585 PARAMETER Experiment Name: At_5mM_NaNP_cDNA_P Parameter: Treatment Value: null
  misc_feature: MA Experiment ID: 108595 Result: Down-regulated in Transcription
  misc_feature: MA Experiment 108595 PARAMETER Experiment Name: At_Ler-pi_Ovule_cDNA_P Parameter: Plant Line Value: null
  misc_feature: MA Experiment ID: 108607 Result: Down-regulated in Transcription
  misc_feature: MA Experiment 108607 PARAMETER Experiment Name: At_100uM_ABA_cDNA_P Parameter: Timepoint (hr) Value: 4
  misc_feature: MA Experiment 108607 PARAMETER Experiment Name: At_100uM_ABA_cDNA_P Parameter: Tissue Value: Aerial
  misc_feature: MA Experiment 108607 PARAMETER Experiment Name: At_100uM_ABA_cDNA_P Parameter: Treatment Value: 100uM ABA vs. No Treatment
  misc_feature: MA Experiment ID: 108609 Result: Down-regulated in Transcription
  misc_feature: MA Experiment 108609 PARAMETER Experiment Name: At_100uM_ABA_cDNA_P Parameter: Timepoint (hr) Value: 24
  misc_feature: MA Experiment 108609 PARAMETER Experiment Name: At_100uM_ABA_cDNA_P Parameter: Tissue Value: Aerial
  misc_feature: MA Experiment 108609 PARAMETER Experiment Name: At_100uM_ABA_cDNA_P Parameter: Treatment Value: 100uM ABA vs. No Treatment
  misc_feature: MA Experiment ID: 20000087 Result: Down-regulated in Transcription
  misc_feature: MA Experiment 20000087 PARAMETER Experiment Name: At_100uM_ABA_Mutants_cDNA_P Parameter: Plant Line Value: WS
  misc_feature: MA Experiment 20000087 PARAMETER Experiment Name: At_100uM_ABA_Mutants_cDNA_P Parameter: Timepoint (hr) Value: 6
  misc_feature: MA Experiment 20000087 PARAMETER Experiment Name: At_100uM_ABA_Mutants_cDNA_P Parameter: Tissue Value: Aerial
  misc_feature: MA Experiment 20000087 PARAMETER Experiment Name: At_100uM_ABA_Mutants_cDNA_P Parameter: Treatment Value: 100uM ABA vs. No Treatment
  misc_feature: MA Experiment ID: 20001807 Result: Up-regulated in Transcription
  misc_feature: MA Experiment 20001807 PARAMETER Experiment Name: At_50mM_NH4NO3_L-to-H_Sub_P Parameter: Timepoint (hr) Value: 6
  misc_feature: MA Experiment 20001807 PARAMETER Experiment Name: At_50mM_NH4NO3_L-to-H_Sub_P Parameter: Tissue Value: Leaf
  misc_feature: MA Experiment 20001807 PARAMETER Experiment Name: At_50mM_NH4NO3_L-to-H_Sub_P Parameter: Treatment Value: 50mM NH4NO3 vs 100mM Mannitol
aacaaaaaagccctaaacggagagaggcggagaggagaaggaagacggcgtgaagcaatggtgtcgctgaagatccagaagcggctcgccgcatccgtaatgaaatgcgggaaaggaaaagtttggctcgaccccaatgaatcgggcgatatctctatggccaattccaggcagaacattaggaagcttgtgaaggatggtttcattatcaggaagcctactaagatccactcacgttctcgggctagggctttgaacgaggccaagcgaaagggtcgtcactctggatacggtaagagaaagggtacaagagaggcaaggctaccaaccaagattctttggatgaggagaatgagggtgttgaggcgtttcttgagcaagtaccgtgagtcaaagaagattgataggcacatgtaccatgacatgtacatgaaagtgaagggtaatgttttcaagaacaagcgtgtgcttatggagagcatccacaagatgaaggctgagaaggctagagagaagactctcgctgaccagtttgaggccaagcgtattaagaacaaggctagcagggagagaaagtttgccagaagagaggagagattagctcagggacctggaggtggagagacaacgactcctgctggcgcacctcaacaaccagaggtaaccaagaagaagtcgaagaagtgatttggtgttgaacttttttgcaattgaatctttgaatttacctgtagaagaagcgtcttttttttatcttttatatgattttgtcggagattcttttcttcaaaaatatttcttatgttatggatctcattgcttattatg

SEQ ID NO: 20979 - protein, 228 aa, Arabidopsis thaliana
  peptide (1)..(228): Ceres Seq. ID no. 12333112
  misc_feature (21)..(168): Pfam Name: Ribosomal protein L19e Pfam Description: Ribosomal protein L19e
  misc_feature (18)..(201): Homolog of NCBI NO: 27819985 NR Description: LD16326p [Drosophila melanogaster]
  misc_feature (20)..(201): Homolog of NCBI NO: 28630352 NR Description: ribosomal protein L19 [Branchiostoma lanceolatum]
  misc_feature (20)..(201): Homolog of NCBI NO: 28200276 NR Description: ribosomal protein L19 [Branchiostoma belcheri
  misc_feature (20)..(228): Homolog of NCBI NO: 29837764 NR Description: putative ribosomal protein L19
  misc_feature (20)..(228): Homolog of NCBI NO: 18087585 NR Description: At1g02780/T14P4_3 [Arabidopsis thaliana]
  misc_feature (20)..(216): Homolog of NCBI NO: 7440943 NR Description: ribosomal protein L19.T2H3.3 - Arabidopsis
  misc_feature (20)..(228): Homolog of NCBI NO: 15218602 NR Description: ribosomal protein L19, putative
  misc_feature (20)..(219): Homolog of NCBI NO: 40287526 NR Description: 60S ribosomal protein L19 [Capsicum annuum]
  misc_feature (20)..(228): Homolog of NCBI NO: 15235290 NR Description: putative ribosomal protein L19
  misc_feature (20)..(228): Homolog of NCBI NO: 15228314 NR Description: putative ribosomal protein
NKKALNGERRRGEGRRREAMVSLKIQKRLAASVMKCGKGKVWLDPNESGDISMANSRQNIRKLVKDGFIIRKPTKIHSRSRARALNEAKRKGRHSGYGKRKGTREARLPTKILWMRRMRVLRRFLSKYRESKKIDRHMYHDMYMKVKGNVFKNKRVLMESIHKMKAEKAREKTLADQFEAKRIKNKASRERKFARREERLAQGPGGGETTTPAGAPQQPEVTKKKSKK

SEQ ID NO: 20980 - protein, 209 aa, Arabidopsis thaliana
  peptide (1)..(209): Ceres Seq. ID no. 12333113
  misc_feature (2)..(149): Pfam Name: Ribosomal protein L19e Pfam Description: Ribosomal protein L19e
  misc_feature (1)..(182): Homolog of NCBI NO: 27819985 NR Description: LD16326p [Drosophila melanogaster]
  misc_feature (1)..(182): Homolog of NCBI NO: 28630352 NR Description: ribosomal protein L19 [Branchiostoma lanceolatum]
  misc_feature (1)..(182): Homolog of NCBI NO: 28200276 NR Description: ribosomal protein L19 [Branchiostoma belcheri
  misc_feature (1)..(209): Homolog of NCBI NO: 29837764 NR Description: putative ribosomal protein L19
  misc_feature (1)..(209): Homolog of NCBI NO: 18087585 NR Description: At1g02780/T14P4_3 [Arabidopsis thaliana]
  misc_feature (1)..(197): Homolog of NCBI NO: 7440943 NR Description: ribosomal protein L19.T2H3.3 - Arabidopsis
  misc_feature (1)..(209): Homolog of NCBI NO: 15218602 NR Description: ribosomal protein L19, putative
  misc_feature (1)..(200): Homolog of NCBI NO: 40287526 NR Description: 60S ribosomal protein L19 [Capsicum annuum]
  misc_feature (1)..(209): Homolog of NCBI NO: 15235290 NR Description: putative ribosomal protein L19
  misc_feature (1)..(209): Homolog of NCBI NO: 15228314 NR Description: putative ribosomal protein
MVSLKIQKRLAASVMKCGKGKVWLDPNESGDISMANSRQNIRKLVKDGFIIRKPTKIHSRSRARALNEAKRKGRHSGYGKRKGTREARLPTKILWMRRMRVLRRFLSKYRESKKIDRHMYHDMYMKVKGNVFKNKRVLMESIHKMKAEKAREKTLADQFEAKRIKNKASRERKFARREERLAQGPGGGETTTPAGAPQQPEVTKKKSKK

SEQ ID NO: 20981 - protein, 195 aa, Arabidopsis thaliana
  peptide (1)..(195): Ceres Seq. ID no. 12333114
  misc_feature (1)..(135): Pfam Name: Ribosomal protein L19e Pfam Description: Ribosomal protein L19e
  misc_feature (1)..(168): Homolog of NCBI NO: 27819985 NR Description: LD16326p [Drosophila melanogaster]
  misc_feature (1)..(168): Homolog of NCBI NO: 28630352 NR Description: ribosomal protein L19 [Branchiostoma lanceolatum]
  misc_feature (1)..(168): Homolog of NCBI NO: 28200276 NR Description: ribosomal protein L19 [Branchiostoma belcheri
  misc_feature (1)..(195): Homolog of NCBI NO: 29837764 NR Description: putative ribosomal protein L19
  misc_feature (1)..(195): Homolog of NCBI NO: 18087585 NR Description: At1g02780/T14P4_3 [Arabidopsis thaliana]
  misc_feature (1)..(183): Homolog of NCBI NO: 7440943 NR Description: ribosomal protein L19.T2H3.3 - Arabidopsis
  misc_feature (1)..(195): Homolog of NCBI NO: 15218602 NR Description: ribosomal protein L19, putative
  misc_feature (1)..(186): Homolog of NCBI NO: 40287526 NR Description: 60S ribosomal protein L19 [Capsicum annuum]
  misc_feature (1)..(195): Homolog of NCBI NO: 15235290 NR Description: putative ribosomal protein L19
  misc_feature (1)..(195): Homolog of NCBI NO: 15228314 NR Description: putative ribosomal protein
MKCGKGKVWLDPNESGDISMANSRQNIRKLVKDGFIIRKPTKIHSRSRARALNEAKRKGRHSGYGKRKGTREARLPTKILWMRRMRVLRRFLSKYRESKKIDRHMYHDMYMKVKGNVFKNKRVLMESIHKMKAEKAREKTLADQFEAKRIKNKASRERKFARREERLAQGPGGGETTTPAGAPQQPEVTKKKSKK

SEQ ID NO: 20982 - DNA, 906 bp, Arabidopsis thaliana
  misc_feature (1)..(906): Ceres Seq. ID no. 13499487
  misc_feature: Phenotype: FERTILITY Fertility-Sterile
  misc_feature: Phenotype: FERTILITY Fertility-Sterile
  misc_feature: Phenotype: WHOLE PLANT Dwarf-Misc. Dwarf
  misc_feature: Phenotype: FERTILITY Fertility-Reduced
  misc_feature: Phenotype: FERTILITY Fertility-Sterile
cttttacaaagacaagccttttcaacacactactgatcttgagaatcctctcttcaaagccatggcgttagaactatggcaaactctcaaagaagcaatccatgcttacacaggtctttctcctgttgtcttcttcactgctctagctctcgccttcgccatttaccaagtcatctcaggctggtttgcctcgccgttcgatgatgttaaccgacatcagagagctagatccttggctcaagaggaggagccaccgattcctcagcctgttcaagtcggtgagatcacggaggaggagcttaaacagtacgatggctctgatcctcaaaagccccttcttatggctatcaaacatcagatctatgatgttacacaaagcaggatgttctacggaccaggaggaccatatgctttgtttgcagggaaagacgctagccgagctcttgcaaagatgtcatttgaggagaaagacttgacttgggatgtctctggtcttggtccctttgagctagatgctcttcaagattgggagtacaagttcatgagcaagtatgctaaggttggtactgtcaaagtggctggttcagaacctgaaaccgcatctgtctctgaacccacagagaatgttgagcaagatgctcatgtaaccacaacgcctgggaagaccgttgttgataagagtgatgatgctcctgctgagactgtgttgaagaaggaggagtagagcccatttccaagatttgctctgatttgtcatagagaccagttttatgaaaaggattgtagaatctctaatgttgaagtgtcaatgataatcttgttttactttcccaaaaaataaagattgctgattaatgataagaaaaaaatgttttataaactgcatatcagaaggcgttgcattgc

SEQ ID NO: 20983 - protein, 240 aa, Arabidopsis thaliana
  peptide (1)..(240): Ceres Seq. ID no. 13499488
  misc_feature (94)..(191): Pfam Name: Cytochrome b5-like Heme/Steroid binding domain Pfam Description: Cytochrome b5-like Heme/Steroid binding domain
  misc_feature (81)..(204): Homolog of NCBI NO: 6647578 NR Description: Membrane associated progesterone receptor
  misc_feature (94)..(190): Homolog of NCBI NO: 40889041 NR Description: Chain A, Solution Structure Of A Putative
  misc_feature (94)..(190): Homolog of NCBI NO: 15224648 NR Description: cytochrome b5 domain-containing protein
  misc_feature (78)..(233): Homolog of NCBI NO: 18859969 NR Description: CG9066-PA [Drosophila melanogaster]
  misc_feature (24)..(212): Homolog of NCBI NO: 37535794 NR Description: putative steroid membrane binding protein
  misc_feature (20)..(240): Homolog of NCBI NO: 37535798 NR Description: putative steroid membrane binding protein
  misc_feature (21)..(221): Homolog of NCBI NO: 15229044 NR Description: cytochrome b5 domain-containing protein
  misc_feature (21)..(237): Homolog of NCBI NO: 4960154 NR Description: putative progesterone-binding protein homolog
  misc_feature (21)..(240): Homolog of NCBI NO: 4960156 NR Description: putative progesterone-binding protein homolog
  misc_feature (21)..(240): Homolog of NCBI NO: 15242943 NR Description: cytochrome b5 domain-containing protein
FYKDKPFQHTTDLENPLFKAMALELWQTLKEAIHAYTGLSPVVFFTALALAFAIYQVISGWFASPFDDVNRHQRARSLAQEEEPPIPQPVQVGEITEEELKQYDGSDPQKPLLMAIKHQIYDVTQSRMFYGPGGPYALFAGKDASRALAKMSFEEKDLTWDVSGLGPFELDALQDWEYKFMSKYAKVGTVKVAGSEPETASVSEPTENVEQDAHVTTTPGKTVVDKSDDAPAETVLKKEE

SEQ ID NO: 20984 - protein, 220 aa, Arabidopsis thaliana
  peptide (1)..(220): Ceres Seq. ID no. 13499489
  misc_feature (74)..(171): Pfam Name: Cytochrome b5-like Heme/Steroid binding domain Pfam Description: Cytochrome b5-like Heme/Steroid binding domain
  misc_feature (61)..(184): Homolog of NCBI NO: 6647578 NR Description: Membrane associated progesterone receptor
  misc_feature (74)..(170): Homolog of NCBI NO: 40889041 NR Description: Chain A, Solution Structure Of A Putative
  misc_feature (74)..(170): Homolog of NCBI NO: 15224648 NR Description: cytochrome b5 domain-containing protein
  misc_feature (58)..(213): Homolog of NCBI NO: 18859969 NR Description: CG9066-PA [Drosophila melanogaster]
  misc_feature (4)..(192): Homolog of NCBI NO: 37535794 NR Description: putative steroid membrane binding protein
  misc_feature (1)..(220): Homolog of NCBI NO: 37535798 NR Description: putative steroid membrane binding protein
  misc_feature (1)..(201): Homolog of NCBI NO: 15229044 NR Description: cytochrome b5 domain-containing protein
  misc_feature (1)..(217): Homolog of NCBI NO: 4960154 NR Description: putative progesterone-binding protein homolog
  misc_feature (1)..(220): Homolog of NCBI NO: 4960156 NR Description: putative progesterone-binding protein homolog
  misc_feature (1)..(220): Homolog of NCBI NO: 15242943 NR Description: cytochrome b5 domain-containing protein
MALELWQTLKEAIHAYTGLSPVVFFTALALAFAIYQVISGWFASPFDDVNRHQRARSLAQEEEPPIPQPVQVGEITEEELKQYDGSDPQKPLLMAIKHQIYDVTQSRMFYGPGGPYALFAGKDASRALAKMSFEEKDLTWDVSGLGPFELDALQDWEYKFMSKYAKVGTVKVAGSEPETASVSEPTENVEQDAHVTTTPGKTVVDKSDDAPAETVLKKEE

SEQ ID NO: 20985 - protein, 127 aa, Arabidopsis thaliana
  peptide (1)..(127): Ceres Seq. ID no. 13499490
  misc_feature (1)..(78): Pfam Name: Cytochrome b5-like Heme/Steroid binding domain Pfam Description: Cytochrome b5-like Heme/Steroid binding domain
  misc_feature (1)..(91): Homolog of NCBI NO: 6647578 NR Description: Membrane associated progesterone receptor
  misc_feature (1)..(77): Homolog of NCBI NO: 40889041 NR Description: Chain A, Solution Structure Of A Putative
  misc_feature (1)..(77): Homolog of NCBI NO: 15224648 NR Description: cytochrome b5 domain-containing protein
  misc_feature (1)..(120): Homolog of NCBI NO: 18859969 NR Description: CG9066-PA [Drosophila melanogaster]
  misc_feature (1)..(99): Homolog of NCBI NO: 37535794 NR Description: putative steroid membrane binding protein
  misc_feature (1)..(127): Homolog of NCBI NO: 37535798 NR Description: putative steroid membrane binding protein
  misc_feature (1)..(108): Homolog of NCBI NO: 15229044 NR Description: cytochrome b5 domain-containing protein
  misc_feature (1)..(124): Homolog of NCBI NO: 4960154 NR Description: putative progesterone-binding protein homolog
  misc_feature (1)..(127): Homolog of NCBI NO: 4960156 NR Description: putative progesterone-binding protein homolog
  misc_feature (1)..(127): Homolog of NCBI NO: 15242943 NR Description: cytochrome b5 domain-containing protein
MAIKHQIYDVTQSRMFYGPGGPYALFAGKDASRALAKMSFEEKDLTWDVSGLGPFELDALQDWEYKFMSKYAKVGTVKVAGSEPETASVSEPTENVEQDAHVTTTPGKTVVDKSDDAPAETVLKKEE

SEQ ID NO: 20986 - DNA, 936 bp, Arabidopsis thaliana
  misc_feature (1)..(936): Ceres Seq. ID no. 13493724
  misc_feature: MA Experiment ID: 20000227 Result: Down-regulated in Transcription
  misc_feature: MA Experiment 20000227 PARAMETER Experiment Name: At_Root-Tips-vs-Tops_P Parameter: Tissue Value: Root Tips vs. Root Tops
  misc_feature: MA Experiment ID: 20000794 Result: Up-regulated in Transcription
  misc_feature: MA Experiment 20000794 PARAMETER Experiment Name: At_Petals_P Parameter: Age (day) Value: 23-25 days
  misc_feature: MA Experiment 20000794 PARAMETER Experiment Name: At_Petals_P Parameter: Plant Line Value: WS
  misc_feature: MA Experiment 20000794 PARAMETER Experiment Name: At_Petals_P Parameter: Tissue Value: Petals vs. Whole plant
  misc_feature: MA Experiment ID: 20001247 Result: Up-regulated in Transcription
  misc_feature: MA Experiment 20001247 PARAMETER Experiment Name: At_Far-red-induction_P Parameter: Age (day) Value: 7
  misc_feature: MA Experiment 20001247 PARAMETER Experiment Name: At_Far-red-induction_P Parameter: Light Value: Far-red vs. White
  misc_feature: MA Experiment 20001247 PARAMETER Experiment Name: At_Far-red-induction_P Parameter: Organism Value: A. thaliana
  misc_feature: MA Experiment 20001247 PARAMETER Experiment Name: At_Far-red-induction_P Parameter: Plant Line Value: Columbia
  misc_feature: MA Experiment 20001247 PARAMETER Experiment Name: At_Far-red-induction_P Parameter: Timepoint (hr) Value: 1
  misc_feature: MA Experiment 20001247 PARAMETER Experiment Name: At_Far-red-induction_P Parameter: Tissue Value: Whole Plant
  misc_feature: MA Experiment ID: 20001450 Result: Up-regulated in Transcription
  misc_feature: MA Experiment 20001450 PARAMETER Experiment Name: At_Far-red-induction_P Parameter: Age (day) Value: 7
  misc_feature: MA Experiment 20001450 PARAMETER Experiment Name: At_Far-red-induction_P Parameter: Light Value: Far-red vs. White
  misc_feature: MA Experiment 20001450 PARAMETER Experiment Name: At_Far-red-induction_P Parameter: Organism Value: A. thaliana
  misc_feature: MA Experiment 20001450 PARAMETER Experiment Name: At_Far-red-induction_P Parameter: Plant Line Value: Columbia
  misc_feature: MA Experiment 20001450 PARAMETER Experiment Name: At_Far-red-induction_P Parameter: Timepoint (hr) Value: 8
  misc_feature: MA Experiment 20001450 PARAMETER Experiment Name: At_Far-red-induction_P Parameter: Tissue Value: Whole Plant
  misc_feature: MA Experiment ID: 20001451 Result: Up-regulated in Transcription
  misc_feature: MA Experiment 20001451 PARAMETER Experiment Name: At_Far-red-induction_P Parameter: Age (day) Value: 7
  misc_feature: MA Experiment 20001451 PARAMETER Experiment Name: At_Far-red-induction_P Parameter: Light Value: Far-red vs. White
  misc_feature: MA Experiment 20001451 PARAMETER Experiment Name: At_Far-red-induction_P Parameter: Organism Value: A. thaliana
  misc_feature: MA Experiment 20001451 PARAMETER Experiment Name: At_Far-red-induction_P Parameter: Plant Line Value: Columbia
  misc_feature: MA Experiment 20001451 PARAMETER Experiment Name: At_Far-red-induction_P Parameter: Timepoint (hr) Value: 24
  misc_feature: MA Experiment 20001451 PARAMETER Experiment Name: At_Far-red-induction_P Parameter: Tissue Value: Whole Plant
  misc_feature: MA Experiment ID: 20001554 Result: Down-regulated in Transcription
  misc_feature: MA Experiment 20001554 PARAMETER Experiment Name: At_Drought_Soil_Dry_P Parameter: Age (day) Value: 21
  misc_feature: MA Experiment 20001554 PARAMETER Experiment Name: At_Drought_Soil_Dry_P Parameter: Organism Value: A. thaliana
  misc_feature: MA Experiment 20001554 PARAMETER Experiment Name: At_Drought_Soil_Dry_P Parameter: Plant Line Value: WS
  misc_feature: MA Experiment 20001554 PARAMETER Experiment Name: At_Drought_Soil_Dry_P Parameter: Post Timepoint (hr) Value: None
  misc_feature: MA Experiment 20001554 PARAMETER Experiment Name: At_Drought_Soil_Dry_P Parameter: Post-Treatment Value: None
  misc_feature: MA Experiment 20001554 PARAMETER Experiment Name: At_Drought_Soil_Dry_P Parameter: Timepoint (day) Value: 7
  misc_feature: MA Experiment 20001554 PARAMETER Experiment Name: At_Drought_Soil_Dry_P Parameter: Treatment Value: Drought vs. No Drought
  misc_feature: MA Experiment ID: 20001555 Result: Down-regulated in Transcription
  misc_feature: MA Experiment 20001555 PARAMETER Experiment Name: At_Drought_Soil_Dry_P Parameter: Age (day) Value: 24
  misc_feature: MA Experiment 20001555 PARAMETER Experiment Name: At_Drought_Soil_Dry_P Parameter: Organism Value: A. thaliana
  misc_feature: MA Experiment 20001555 PARAMETER Experiment Name: At_Drought_Soil_Dry_P Parameter: Plant Line Value: WS
  misc_feature: MA Experiment 20001555 PARAMETER Experiment Name: At_Drought_Soil_Dry_P Parameter: Post Timepoint (hr) Value: None
  misc_feature: MA Experiment 20001555 PARAMETER Experiment Name: At_Drought_Soil_Dry_P Parameter: Post-Treatment Value: None
  misc_feature: MA Experiment 20001555 PARAMETER Experiment Name: At_Drought_Soil_Dry_P Parameter: Timepoint (day) Value: 10
  misc_feature: MA Experiment 20001555 PARAMETER Experiment Name: At_Drought_Soil_Dry_P Parameter: Treatment Value: Drought vs. No Drought
  misc_feature: MA Experiment ID: 20001556 Result: Down-regulated in Transcription
  misc_feature: MA Experiment 20001556 PARAMETER Experiment Name: At_Drought_Soil_Dry_P Parameter: Age (day) Value: 26
  misc_feature: MA Experiment 20001556 PARAMETER Experiment Name: At_Drought_Soil_Dry_P Parameter: Organism Value: A. thaliana
  misc_feature: MA Experiment 20001556 PARAMETER Experiment Name: At_Drought_Soil_Dry_P Parameter: Plant Line Value: WS
  misc_feature: MA Experiment 20001556 PARAMETER Experiment Name: At_Drought_Soil_Dry_P Parameter: Post Timepoint (hr) Value: None
  misc_feature: MA Experiment 20001556 PARAMETER Experiment Name: At_Drought_Soil_Dry_P Parameter: Post-Treatment Value: None
  misc_feature: MA Experiment 20001556 PARAMETER Experiment Name: At_Drought_Soil_Dry_P Parameter: Timepoint (day) Value: 12
  misc_feature: MA Experiment 20001556 PARAMETER Experiment Name: At_Drought_Soil_Dry_P Parameter: Treatment Value: Drought vs. No Drought
  misc_feature: MA Experiment ID: 20001906 Result: Down-regulated in Transcription
  misc_feature: MA Experiment 20001906 PARAMETER Experiment Name: At_Drought_Reproduction_P Parameter: Age (day) Value: 35
  misc_feature: MA Experiment 20001906 PARAMETER Experiment Name: At_Drought_Reproduction_P Parameter: Organism Value: A. thaliana
  misc_feature: MA Experiment 20001906 PARAMETER Experiment Name: At_Drought_Reproduction_P Parameter: Plant Line Value: WS
  misc_feature: MA Experiment 20001906 PARAMETER Experiment Name: At_Drought_Reproduction_P Parameter: Timepoint (day) Value: 5
  misc_feature: MA Experiment 20001906 PARAMETER Experiment Name: At_Drought_Reproduction_P Parameter: Tissue Value: Siliques
  misc_feature: MA Experiment 20001906 PARAMETER Experiment Name: At_Drought_Reproduction_P Parameter: Treatment Value: Drought vs. No Drought
  misc_feature: MA Experiment ID: 20001911 Result: Down-regulated in Transcription
  misc_feature: MA Experiment 20001911 PARAMETER Experiment Name: At_Drought_Reproduction_P Parameter: Age (day) Value: 40
  misc_feature: MA Experiment 20001911 PARAMETER Experiment Name: At_Drought_Reproduction_P Parameter: Organism Value: A. thaliana
  misc_feature: MA Experiment 20001911 PARAMETER Experiment Name: At_Drought_Reproduction_P Parameter: Plant Line Value: WS
  misc_feature: MA Experiment 20001911 PARAMETER Experiment Name: At_Drought_Reproduction_P Parameter: Timepoint (day) Value: 10
  misc_feature: MA Experiment 20001911 PARAMETER Experiment Name: At_Drought_Reproduction_P Parameter: Tissue Value: Flowers
  misc_feature: MA Experiment 20001911 PARAMETER Experiment Name: At_Drought_Reproduction_P Parameter: Treatment Value: Drought vs. No Drought
aacccacaaattgatctcttctctcttctcttacaccatcttcttcattcaccatgggaagatctccttgttgtgaaaaagctcacacaaacaaaggagcttggactaaagaagaagatcaacgtctcgtagattatatccgtaatcacggtgaaggttgttggcgttctcttcctaaatccgctggattgttgcgttgtggtaaaagttgtagattgagatggattaattaccttcgtcctgatcttaaacgtggtaattttactgatgatgaagatcaaatcatcatcaaactccatagcttactcggtaacaaatggtcattgatagctggaagattaccaggaagaacagataacgaaataaagaattattggaacactcatattaagaggaagcttcttagtcacggtattgatccacaaactcatcgtcagattaacgaatccaaaacggtgtcgtctcaagttgttgttcctattcaaaacgatgccgttgagtattctttttccaatttagccgttaaaccgaagacggaaaattcctccgataacggagcttcgactagcggcacgacgacggacgaggatctccggcagaatggggagtgttattatagtgataattcaggacatataaagctgaatttggatttaactcttgggtttggatcctggtcgggtcggatagtcggagtcgggtcatcggctgattctaaaccgtggtgcgacccggtgatggaggcgcgtttgtcactgttgtaataatttgtcaaaaaaatcccaaaaaatgggttttgttacttcattttttttttgcttgagtccttttggataaatatagaaattctttacttcagtttctttggtatttttgttttagtttttgttcatattaccttttgaagaaaaagaaaaaaaacgatacatggtttcc

SEQ ID NO: 20987 - protein, 236 aa, Arabidopsis thaliana
  peptide (1)..(236): Ceres Seq. ID no. 13493725
  misc_feature (14)..(61): Pfam Name: Myb-like DNA-binding domain Pfam Description: Myb-like DNA-binding domain
  misc_feature (14)..(61): Pfam Name: Myb-like DNA-binding domain Pfam Description: Myb-like DNA-binding domain
  misc_feature (1)..(225): Homolog of NCBI NO: 15233968 NR Description: transcription factor (MYB4) -related [Arabidopsis
  misc_feature (1)..(225): Homolog of NCBI NO: 11273985 NR Description: myb-related transcription factor MYB4
  misc_feature (1)..(179): Homolog of NCBI NO: 7438345 NR Description: myb-related protein A - upland cotton
  misc_feature (1)..(182): Homolog of NCBI NO: 23476279 NR Description: myb-like transcription factor 1 [Gossypium
  misc_feature (1)..(224): Homolog of NCBI NO: 30687964 NR Description: myb family transcription factor [Arabidopsis
  misc_feature (1)..(225): Homolog of NCBI NO: 15233968 NR Description: transcription factor (MYB4) -related [Arabidopsis
  misc_feature (1)..(179): Homolog of NCBI NO: 7438345 NR Description: myb-related protein A - upland cotton
  misc_feature (1)..(224): Homolog of NCBI NO: 30687964 NR Description: myb family transcription factor [Arabidopsis
  misc_feature (1)..(236): Homolog of NCBI NO: 15233894 NR Description: myb family transcription factor [Arabidopsis
  misc_feature (1)..(217): Homolog of NCBI NO: 30693208 NR Description: myb family transcription factor [Arabidopsis
  misc_feature (84)..(217): Homolog of NCBI NO: 25403442 NR Description: protein F15O4.43 [imported] - Arabidopsis
  misc_feature (1)..(88): Homolog of NCBI NO: 25403442 NR Description: protein F15O4.43 [imported] - Arabidopsis
  misc_feature (1)..(219): Homolog of NCBI NO: 82310 NR Description: myb-related protein 330 - garden snapdragon
  misc_feature (1)..(182): Homolog of NCBI NO: 23476279 NR Description: myb-like transcription factor 1 [Gossypium
  misc_feature (1)..(225): Homolog of NCBI NO: 11273985 NR Description: myb-related transcription factor MYB4
  misc_feature (1)..(219): Homolog of NCBI NO: 82310 NR Description: myb-related protein 330 - garden snapdragon
  misc_feature (1)..(88): Homolog of NCBI NO: 25403442 NR Description: protein F15O4.43 [imported] - Arabidopsis
  misc_feature (84)..(217): Homolog of NCBI NO: 25403442 NR Description: protein F15O4.43 [imported] - Arabidopsis
  misc_feature (1)..(217): Homolog of NCBI NO: 30693208 NR Description: myb family transcription factor [Arabidopsis
  misc_feature (1)..(236): Homolog of NCBI NO: 15233894 NR Description: myb family transcription factor [Arabidopsis
MGRSPCCEKAHTNKGAWTKEEDQRLVDYIRNHGEGCWRSLPKSAGLLRCGKSCRLRWINYLRPDLKRGNFTDDEDQIIIKLHSLLGNKWSLIAGRLPGRTDNEIKNYWNTHIKRKLLSHGIDPQTHRQINESKTVSSQVVVPIQNDAVEYSFSNLAVKPKTENSSDNGASTSGTTTDEDLRQNGECYYSDNSGHIKLNLDLTLGFGSWSGRIVGVGSSADSKPWCDPVMEARLSLL

SEQ ID NO: 20988 - DNA, 667 bp, Arabidopsis thaliana
  misc_feature (1)..(667): Ceres Seq. ID no. 12332311
  misc_feature: MA Experiment ID: 108579 Result: Down-regulated in Transcription
  misc_feature: MA Experiment 108579 PARAMETER Experiment Name: At_4deg_Cold_cDNA_P Parameter: Temperature (deg C) Value: 4 vs. 22
  misc_feature: MA Experiment 108579 PARAMETER Experiment Name: At_4deg_Cold_cDNA_P Parameter: Timepoint (hr) Value: 6
  misc_feature: MA Experiment 108579 PARAMETER Experiment Name: At_4deg_Cold_cDNA_P Parameter: Tissue Value: Aerial
  misc_feature: MA Experiment ID: 20000224 Result: Down-regulated in Transcription
  misc_feature: MA Experiment ID: 20000227 Result: Down-regulated in Transcription
  misc_feature: MA Experiment 20000227 PARAMETER Experiment Name: At_Root-Tips-vs-Tops_P Parameter: Tissue Value: Root Tips vs. Root Tops
aaatcgaagctggaactaacccactgcgatcggggaagaaacagctcgagtctcgagagacgccatggaaatttcccaagctcgttctagcttcgtttgtcttcttctgttactctccatttttttcattccctgcgtcttttccaaatctcctcgtcctatctcagatgtggagatcaggcagaagaagagcgaatgctacggtgatatagagagtgggttatggggttggcaatgcaaatcttctgcaatagcgaaagagaattgtgcgctgcgatgcctttctccggtttgctatcagctcatttatgagagtgatccgcttgaagaaggtgaaaaagatttgattaggagccaagagtacaagtattgtatgtacaagtcatcactcggggaaagcttagagggtgttcgaggcatcttttgatggtatcaaataagactttctcagtgaagacatttgccaaaagctgagctaagctcttgaatttctgatcagtagtattctgctctgtcgcgtttgaagccatgtaaggcttcttttattataaacctcaatttttgggttaatggttgtttttatgaaacgtttacgtttatgattggcaaatccactgaatcttgaaaccattgtacaaatcagtcttaatacgcacagattggtccc

SEQ ID NO: 20989 - protein, 120 aa, Arabidopsis thaliana
  peptide (1)..(120): Ceres Seq. ID no. 12332312
  misc_feature (35)..(120): Homolog of NCBI NO: 34902472 NR Description: Putative DNAJ protein [Oryza sativa (japonica
  misc_feature (97)..(120): Homolog of NCBI NO: 11346183 NR Description: hypothetical protein K10A8_90 - Arabidopsis
  misc_feature (1)..(107): Homolog of NCBI NO: 11346183 NR Description: hypothetical protein K10A8_90 - Arabidopsis
  misc_feature (1)..(120): Homolog of NCBI NO: 18418364 NR Description: expressed protein
  misc_feature (1)..(120): Homolog of NCBI NO: 21618076 NR Description: unknown [Arabidopsis thaliana]
MEISQARSSFVCLLLLLSIFFIPCVFSKSPRPISDVEIRQKKSECYGDIESGLWGWQCKSSAIAKENCALRCLSPVCYQLIYESDPLEEGEKDLIRSQEYKYCMYKSSLGESLEGVRGIF

SEQ ID NO: 20990 - protein, 69 aa, Arabidopsis thaliana
  peptide (1)..(69): Ceres Seq. ID no. 12332313
IEAGTNPLRSGKKQLESRETPWKFPKLVLASFVFFCYSPFFSFPASFPNLLVLSQMWRSGRRRANATVI

SEQ ID NO: 20991 - DNA, 710 bp, Arabidopsis thaliana
  misc_feature (1)..(710): Ceres Seq. ID no. 13489897
  misc_feature: MA Experiment ID: 108434 Result: Up-regulated in Transcription
  misc_feature: MA Experiment 108434 PARAMETER Experiment Name: At_Root_Tips_cDNA_P Parameter: Tissue Value: Root Tips
  misc_feature: MA Experiment ID: 108462 Result: Down-regulated in Transcription
  misc_feature: MA Experiment 108462 PARAMETER Experiment Name: At_Germinating_Seeds_cDNA_P Parameter: Age (day) Value: 2 vs. 0
  misc_feature: MA Experiment 108462 PARAMETER Experiment Name: At_Germinating_Seeds_cDNA_P Parameter: Tissue Value: Germinating Seeds
  misc_feature: MA Experiment ID: 108463 Result: Down-regulated in Transcription
  misc_feature: MA Experiment 108463 PARAMETER Experiment Name: At_Germinating_Seeds_cDNA_P Parameter: Age (day) Value: 3 vs. 0
  misc_feature: MA Experiment 108463 PARAMETER Experiment Name: At_Germinating_Seeds_cDNA_P Parameter: Tissue Value: Germinating Seeds
  misc_feature: MA Experiment ID: 108488 Result: Up-regulated in Transcription
  misc_feature: MA Experiment ID: 108561 Result: Down-regulated in Transcription
  misc_feature: MA Experiment 108561 PARAMETER Experiment Name: At_100uM_ABA_cDNA_P Parameter: Timepoint (hr) Value: 6
  misc_feature: MA Experiment 108561 PARAMETER Experiment Name: At_100uM_ABA_cDNA_P Parameter: Tissue Value: Aerial
  misc_feature: MA Experiment 108561 PARAMETER Experiment Name: At_100uM_ABA_cDNA_P Parameter: Treatment Value: 100uM ABA vs. No Treatment
  misc_feature: MA Experiment ID: 108573 Result: Down-regulated in Transcription
  misc_feature: MA Experiment 108573 PARAMETER Experiment Name: At_Drought_cDNA_P Parameter: Timepoint (hr) Value: 6
  misc_feature: MA Experiment 108573 PARAMETER Experiment Name: At_Drought_cDNA_P Parameter: Tissue Value: Aerial
  misc_feature: MA Experiment 108573 PARAMETER Experiment Name: At_Drought_cDNA_P Parameter: Treatment Value: Drought vs. No Drought
  misc_feature: MA Experiment ID: 108585 Result: Down-regulated in Transcription
  misc_feature: MA Experiment 108585 PARAMETER Experiment Name: At_5mM_NaNP_cDNA_P Parameter: Timepoint (hr) Value: 6
  misc_feature: MA Experiment 108585 PARAMETER Experiment Name: At_5mM_NaNP_cDNA_P Parameter: Tissue Value: Aerial
  misc_feature: MA Experiment 108585 PARAMETER Experiment Name: At_5mM_NaNP_cDNA_P Parameter: Treatment Value: null
  misc_feature: MA Experiment ID: 108595 Result: Down-regulated in Transcription
  misc_feature: MA Experiment 108595 PARAMETER Experiment Name: At_Ler-pi_Ovule_cDNA_P Parameter: Plant Line Value: null
  misc_feature: MA Experiment ID: 108607 Result: Down-regulated in Transcription
  misc_feature: MA Experiment 108607 PARAMETER Experiment Name: At_100uM_ABA_cDNA_P Parameter: Timepoint (hr) Value: 4
  misc_feature: MA Experiment 108607 PARAMETER Experiment Name: At_100uM_ABA_cDNA_P Parameter: Tissue Value: Aerial
  misc_feature: MA Experiment 108607 PARAMETER Experiment Name: At_100uM_ABA_cDNA_P Parameter: Treatment Value: 100uM ABA vs. No Treatment
  misc_feature: MA Experiment ID: 108668 Result: Down-regulated in Transcription
  misc_feature: MA Experiment 108668 PARAMETER Experiment Name: At_2mM_SA_cDNA_P Parameter: Plant Line Value: WS
  misc_feature: MA Experiment 108668 PARAMETER Experiment Name: At_2mM_SA_cDNA_P Parameter: Timepoint (hr) Value: 6
  misc_feature: MA Experiment 108668 PARAMETER Experiment Name: At_2mM_SA_cDNA_P Parameter: Treatment Value: 2mM SA vs. No Treatment
  misc_feature: MA Experiment ID: 20000089 Result: Up-regulated in Transcription
  misc_feature: MA Experiment ID: 20000224 Result: Down-regulated in Transcription
  misc_feature: MA Experiment ID: 20000307 Result: Up-regulated in Transcription
  misc_feature: MA Experiment 20000307 PARAMETER Experiment Name: At_Germinating_Seeds_Sub_P Parameter: Age (hr) Value: 24 vs. 0
  misc_feature: MA Experiment 20000307 PARAMETER Experiment Name: At_Germinating_Seeds_Sub_P Parameter: Organism Value: A. thaliana
  misc_feature: MA Experiment 20000307 PARAMETER Experiment Name: At_Germinating_Seeds_Sub_P Parameter: Plant Line Value: WS
  misc_feature: MA Experiment 20000307 PARAMETER Experiment Name: At_Germinating_Seeds_Sub_P Parameter: Tissue Value: Germinating Seeds
  misc_feature: MA Experiment ID: 20000314 Result: Down-regulated in Transcription
  misc_feature: MA Experiment 20000314 PARAMETER Experiment Name: At_14day_Shoots-Roots_Sub_P Parameter: Age (day) Value: 14
  misc_feature: MA Experiment 20000314 PARAMETER Experiment Name: At_14day_Shoots-Roots_Sub_P Parameter: Organism Value: A. thaliana
  misc_feature: MA Experiment 20000314 PARAMETER Experiment Name: At_14day_Shoots-Roots_Sub_P Parameter: Plant Line Value: WS
  misc_feature: MA Experiment 20000314 PARAMETER Experiment Name: At_14day_Shoots-Roots_Sub_P Parameter: Tissue Value: Roots vs. Whole Plant
  misc_feature: MA Experiment ID: 20000315 Result: Up-regulated in Transcription
  misc_feature: MA Experiment 20000315 PARAMETER Experiment Name: At_14day_Shoots-Roots_Sub_P Parameter: Age (day) Value: 14
  misc_feature: MA Experiment 20000315 PARAMETER Experiment Name: At_14day_Shoots-Roots_Sub_P Parameter: Organism Value: A. thaliana
  misc_feature: MA Experiment 20000315 PARAMETER Experiment Name: At_14day_Shoots-Roots_Sub_P Parameter: Plant Line Value: WS
  misc_feature: MA Experiment 20000315 PARAMETER Experiment Name: At_14day_Shoots-Roots_Sub_P Parameter: Tissue Value: Shoots vs. Whole Plant
  misc_feature: MA Experiment ID: 20000347 Result: Down-regulated in Transcription
  misc_feature: MA Experiment 20000347 PARAMETER Experiment Name: At_2mM_SA_Sub_P Parameter: Age (day) Value: 14
  misc_feature: MA Experiment 20000347 PARAMETER Experiment Name: At_2mM_SA_Sub_P Parameter: Organism Value: A. thaliana
  misc_feature: MA Experiment 20000347 PARAMETER Experiment Name: At_2mM_SA_Sub_P Parameter: Plant Line Value: WS
  misc_feature: MA Experiment 20000347 PARAMETER Experiment Name: At_2mM_SA_Sub_P Parameter: Timepoint (hr) Value: 6
  misc_feature: MA Experiment 20000347 PARAMETER Experiment Name: At_2mM_SA_Sub_P Parameter: Tissue Value: Aerial
  misc_feature: MA Experiment 20000347 PARAMETER Experiment Name: At_2mM_SA_Sub_P Parameter: Treatment Value: 2mM SA vs. No Treatment
  misc_feature: MA Experiment ID: 20000349 Result: Down-regulated in Transcription
  misc_feature: MA Experiment 20000349 PARAMETER Experiment Name: At_100uM_ABA_Sub_P Parameter: Age (day) Value: 14
  misc_feature: MA Experiment 20000349 PARAMETER Experiment Name: At_100uM_ABA_Sub_P Parameter: Organism Value: A. thaliana
  misc_feature: MA Experiment 20000349 PARAMETER Experiment Name: At_100uM_ABA_Sub_P Parameter: Plant Line Value: WS
  misc_feature: MA Experiment 20000349 PARAMETER Experiment Name: At_100uM_ABA_Sub_P Parameter: Timepoint (hr) Value: 6
  misc_feature: MA Experiment 20000349 PARAMETER Experiment Name: At_100uM_ABA_Sub_P Parameter: Tissue Value: Aerial
  misc_feature: MA Experiment 20000349 PARAMETER Experiment Name: At_100uM_ABA_Sub_P Parameter: Treatment Value: 100uM ABA vs. No Treatment
  misc_feature: MA Experiment ID: 20000352 Result: Down-regulated in Transcription
  misc_feature: MA Experiment 20000352 PARAMETER Experiment Name: At_Drought_Sub_P Parameter: Age (day) Value: 7
  misc_feature: MA Experiment 20000352 PARAMETER Experiment Name: At_Drought_Sub_P Parameter: Organism Value: A. thaliana
  misc_feature: MA Experiment 20000352 PARAMETER Experiment Name: At_Drought_Sub_P Parameter: Plant Line Value: WS
  misc_feature: MA Experiment 20000352 PARAMETER Experiment Name: At_Drought_Sub_P Parameter: Timepoint (hr) Value: 6
  misc_feature: MA Experiment 20000352 PARAMETER Experiment Name: At_Drought_Sub_P Parameter: Tissue Value: Whole Plant
  misc_feature: MA Experiment 20000352 PARAMETER Experiment Name: At_Drought_Sub_P Parameter: Treatment Value: Drought vs. No Drought
  misc_feature: MA Experiment ID: 20000355 Result: Up-regulated in Transcription
  misc_feature: MA Experiment 20000355 PARAMETER Experiment Name: At_Siliques_Sub_P Parameter: Age (day) Value: 21
  misc_feature: MA Experiment 20000355 PARAMETER Experiment Name: At_Siliques_Sub_P Parameter: Organism Value: A. thaliana
  misc_feature: MA Experiment 20000355 PARAMETER Experiment Name: At_Siliques_Sub_P Parameter: Plant Line Value: WS
  misc_feature: MA Experiment 20000355 PARAMETER Experiment Name: At_Siliques_Sub_P Parameter: Tissue Value: Less Than 5mm Siliques vs. Whole Plant
gttctaaaattaagacaactctaaatgttagtatcgtttctgtaatatttattatatcctcttcttcttttttactgattcatcaaatcggggatcggataagcctgactgcttcagggtttaagggttactctcactcacacttccgctggtttgacaagattggataaaagcagccatggcaagtctgataatgactacaccattcccaggttctgtcactacatgtaagaagacaaataacctgtcagttcaaagagcctttagggtgacttgtatgcagacagagaaaccattagaggagctatacaatgttaaagtggaacggaaagtttcacagaaacggttggaggaacttggggtttcgagatggtcagtttggaagacagggaaatgcaaattgccatgggattggcaggtggatcagttggtttacattgaacaaggagaggttcgagttgttcccgaaggaagcaagaggtatatgcagtttttagctggagatcttgttcggtatccgaaatggttggaagctgatcttttctttaacgctccttatattgagcggtattgtttcaaggcctatggtgatgattgatccaactttgacttttgagtttttagtagagccaagaaactttacacttgttgtgtgttgttgtagcctgatggatctttttgtgataatataagaaaacaagttctctctc

SEQ ID NO: 20992 - protein, 139 aa, Arabidopsis thaliana
  peptide (1)..(139): Ceres Seq. ID no. 13489898
  misc_feature (54)..(130): Pfam Name: Protein of unknown function (DUF861) Pfam Description: Protein of unknown function (DUF861)
  misc_feature (54)..(130): Pfam Name: Protein of unknown function (DUF861) Pfam Description: Protein of unknown function (DUF861)
  misc_feature (20)..(115): Homolog of NCBI NO: 15234988 NR Description: expressed protein [Arabidopsis thaliana]
  misc_feature (45)..(127): Homolog of NCBI NO: 15229267 NR Description: hypothetical protein [Arabidopsis thaliana]
  misc_feature (46)..(114): Homolog of NCBI NO: 23127631 NR Description: hypothetical protein [Nostoc punctiforme]
  misc_feature (42)..(134): Homolog of NCBI NO: 15235021 NR Description: expressed protein [Arabidopsis thaliana]
  misc_feature (24)..(134): Homolog of NCBI NO: 21553516 NR Description: unknown [Arabidopsis thaliana]
  misc_feature (20)..(115): Homolog of NCBI NO: 15234988 NR Description: expressed protein [Arabidopsis thaliana]
  misc_feature (46)..(114): Homolog of NCBI NO: 23127631 NR Description: hypothetical protein [Nostoc punctiforme]
  misc_feature (24)..(134): Homolog of NCBI NO: 21553516 NR Description: unknown [Arabidopsis thaliana]
  misc_feature (1)..(139): Homolog of NCBI NO: 15225202 NR Description: expressed protein [Arabidopsis thaliana]
  misc_feature (1)..(139): Homolog of NCBI NO: 18403036 NR Description: expressed protein [Arabidopsis thaliana]
  misc_feature (1)..(139): Homolog of NCBI NO: 21592432 NR Description: unknown [Arabidopsis thaliana]
  misc_feature (6)..(57): Homolog of NCBI NO: 26451964 NR Description: unknown protein [Arabidopsis thaliana]
  misc_feature (11)..(115): Homolog of NCBI NO: 38344542 NR Description: OSJNBa0027P08.10 [Oryza sativa (japonica
  misc_feature (42)..(134): Homolog of NCBI NO: 15235021 NR Description: expressed protein [Arabidopsis thaliana]
  misc_feature (45)..(127): Homolog of NCBI NO: 15229267 NR Description: hypothetical protein [Arabidopsis thaliana]
  misc_feature (11)..(115): Homolog of NCBI NO: 38344542 NR Description: OSJNBa0027P08.10 [Oryza sativa (japonica
  misc_feature (6)..(57): Homolog of NCBI NO: 26451964 NR Description: unknown protein [Arabidopsis thaliana]
  misc_feature (1)..(139): Homolog of NCBI NO: 21592432 NR Description: unknown [Arabidopsis thaliana]
  misc_feature (1)..(139): Homolog of NCBI NO: 18403036 NR Description: expressed protein [Arabidopsis thaliana]
  misc_feature (1)..(139): Homolog of NCBI NO: 15225202 NR Description: expressed protein [Arabidopsis thaliana]
MASLIMTTPFPGSVTTCKKTNNLSVQRAFRVTCMQTEKPLEELYNVKVERKVSQKRLEELGVSRWSVWKTGKCKLPWDWQVDQLVYIEQGEVRVVPEGSKRYMQFLAGDLVRYPKWLEADLFFNAPYIERYCFKAYGDD

SEQ ID NO: 20993 - protein, 134 aa, Arabidopsis thaliana
  peptide (1)..(134): Ceres Seq. ID no. 13489899
  misc_feature (49)..(125): Pfam Name: Protein of unknown function (DUF861) Pfam Description: Protein of unknown function (DUF861)
  misc_feature (49)..(125): Pfam Name: Protein of unknown function (DUF861) Pfam Description: Protein of unknown function (DUF861)
  misc_feature (15)..(110): Homolog of NCBI NO: 15234988 NR Description: expressed protein [Arabidopsis thaliana]
  misc_feature (40)..(122): Homolog of NCBI NO: 15229267 NR Description: hypothetical protein [Arabidopsis thaliana]
  misc_feature (41)..(109): Homolog of NCBI NO: 23127631 NR Description: hypothetical protein [Nostoc punctiforme]
  misc_feature (37)..(129): Homolog of NCBI NO: 15235021 NR Description: expressed protein [Arabidopsis thaliana]
  misc_feature (19)..(129): Homolog of NCBI NO: 21553516 NR Description: unknown [Arabidopsis thaliana]
  misc_feature (15)..(110): Homolog of NCBI NO: 15234988 NR Description: expressed protein [Arabidopsis thaliana]
  misc_feature (41)..(109): Homolog of NCBI NO: 23127631 NR Description: hypothetical protein [Nostoc punctiforme]
  misc_feature (19)..(129): Homolog of NCBI NO: 21553516 NR Description: unknown [Arabidopsis thaliana]
  misc_feature (1)..(134): Homolog of NCBI NO: 15225202 NR Description: expressed protein [Arabidopsis thaliana]
  misc_feature (1)..(134): Homolog of NCBI NO: 18403036 NR Description: expressed protein [Arabidopsis thaliana]
  misc_feature (1)..(134): Homolog of NCBI NO: 21592432 NR Description: unknown [Arabidopsis thaliana]
  misc_feature (1)..(52): Homolog of NCBI NO: 26451964 NR Description: unknown protein [Arabidopsis thaliana]
  misc_feature (6)..(110): Homolog of NCBI NO: 38344542 NR Description: OSJNBa0027P08.10 [Oryza sativa (japonica
  misc_feature (37)..(129): Homolog of NCBI NO: 15235021 NR Description: expressed protein [Arabidopsis thaliana]
  misc_feature (40)..(122): Homolog of NCBI NO: 15229267 NR Description: hypothetical protein [Arabidopsis thaliana]
  misc_feature (6)..(110): Homolog of NCBI NO: 38344542 NR Description: OSJNBa0027P08.10 [Oryza sativa (japonica
  misc_feature (1)..(52): Homolog of NCBI NO: 26451964 NR Description: unknown protein [Arabidopsis thaliana]
  misc_feature (1)..(134): Homolog of NCBI NO: 21592432 NR Description: unknown [Arabidopsis thaliana]
  misc_feature (1)..(134): Homolog of NCBI NO: 18403036 NR Description: expressed protein [Arabidopsis thaliana]
  misc_feature (1)..(134): Homolog of NCBI NO: 15225202 NR Description: expressed protein [Arabidopsis thaliana]
MTTPFPGSVTTCKKTNNLSVQRAFRVTCMQTEKPLEELYNVKVERKVSQKRLEELGVSRWSVWKTGKCKLPWDWQVDQLVYIEQGEVRVVPEGSKRYMQFLAGDLVRYPKWLEADLFFNAPYIERYCFKAYGDD

SEQ ID NO: 20994 - protein, 106 aa, Arabidopsis thaliana
  peptide (1)..(106): Ceres Seq. ID no. 13489900
  misc_feature (21)..(97): Pfam Name: Protein of unknown function (DUF861) Pfam Description: Protein of unknown function (DUF861)
  misc_feature (21)..(97): Pfam Name: Protein of unknown function (DUF861) Pfam Description: Protein of unknown function (DUF861)
  misc_feature (1)..(82): Homolog of NCBI NO: 15234988 NR Description: expressed protein [Arabidopsis thaliana]
  misc_feature (12)..(94): Homolog of NCBI NO: 15229267 NR Description: hypothetical protein [Arabidopsis thaliana]
  misc_feature (13)..(81): Homolog of NCBI NO: 23127631 NR Description: hypothetical protein [Nostoc punctiforme]
  misc_feature (9)..(101): Homolog of NCBI NO: 15235021 NR Description: expressed protein [Arabidopsis thaliana]
  misc_feature (1)..(101): Homolog of NCBI NO: 21553516 NR Description: unknown [Arabidopsis thaliana]
  misc_feature (1)..(82): Homolog of NCBI NO: 15234988 NR Description: expressed protein [Arabidopsis thaliana]
  misc_feature (13)..(81): Homolog of NCBI NO: 23127631 NR Description: hypothetical protein [Nostoc punctiforme]
  misc_feature (1)..(101): Homolog of NCBI NO: 21553516 NR Description: unknown [Arabidopsis thaliana]
  misc_feature (1)..(106): Homolog of NCBI NO: 15225202 NR Description: expressed protein [Arabidopsis thaliana]
  misc_feature (1)..(106): Homolog of NCBI NO: 18403036 NR Description: expressed protein [Arabidopsis thaliana]
  misc_feature (1)..(106): Homolog of NCBI NO: 21592432 NR Description: unknown [Arabidopsis thaliana]
  misc_feature (1)..(24): Homolog of NCBI NO: 26451964 NR Description: unknown protein [Arabidopsis thaliana]
  misc_feature (1)..(82): Homolog of NCBI NO: 38344542 NR Description: OSJNBa0027P08.10 [Oryza sativa (japonica
  misc_feature (9)..(101): Homolog of NCBI NO: 15235021 NR Description: expressed protein [Arabidopsis thaliana]
  misc_feature (12)..(94): Homolog of NCBI NO: 15229267 NR Description: hypothetical protein [Arabidopsis thaliana]
  misc_feature (1)..(82): Homolog of NCBI NO: 38344542 NR Description: OSJNBa0027P08.10 [Oryza sativa (japonica
  misc_feature (1)..(24): Homolog of NCBI NO: 26451964 NR Description: unknown protein [Arabidopsis thaliana]
  misc_feature (1)..(106): Homolog of NCBI NO: 21592432 NR Description: unknown [Arabidopsis thaliana]
  misc_feature (1)..(106): Homolog of NCBI NO: 18403036 NR Description: expressed protein [Arabidopsis thaliana]
  misc_feature (1)..(106): Homolog of NCBI NO: 15225202 NR Description: expressed protein [Arabidopsis thaliana]
MQTEKPLEELYNVKVERKVSQKRLEELGVSRWSVWKTGKCKLPWDWQVDQLVYIEQGEVRVVPEGSKRYMQFLAGDLVRYPKWLEADLFFNAPYIERYCFKAYGDD

SEQ ID NO: 20995 - DNA, 818 bp, Arabidopsis thaliana
  misc_feature (1)..(818): Ceres Seq. ID no. 12330146
  misc_feature: MA Experiment ID: 108434 Result: Down-regulated in Transcription
  misc_feature: MA Experiment 108434 PARAMETER Experiment Name: At_Root_Tips_cDNA_P Parameter: Tissue Value: Root Tips
  misc_feature: MA Experiment ID: 108464 Result: Up-regulated in Transcription
  misc_feature: MA Experiment 108464 PARAMETER Experiment Name: At_Germinating_Seeds_cDNA_P Parameter: Age (day) Value: 4 vs. 0
  misc_feature: MA Experiment 108464 PARAMETER Experiment Name: At_Germinating_Seeds_cDNA_P Parameter: Tissue Value: Germinating Seeds
  misc_feature: MA Experiment ID: 108501 Result: Up-regulated in Transcription
  misc_feature: MA Experiment 108501 PARAMETER Experiment Name: At_ap2_floral_buds_cDNA_P Parameter: Plant Line Value: ap2 (Ler.)
  misc_feature: MA Experiment 108501 PARAMETER Experiment Name: At_ap2_floral_buds_cDNA_P Parameter: Tissue Value: Closed Flower
  misc_feature: MA Experiment ID: 108668 Result: Down-regulated in Transcription
  misc_feature: MA Experiment 108668 PARAMETER Experiment Name: At_2mM_SA_cDNA_P Parameter: Plant Line Value: WS
  misc_feature: MA Experiment 108668 PARAMETER Experiment Name: At_2mM_SA_cDNA_P Parameter: Timepoint (hr) Value: 6
  misc_feature: MA Experiment 108668 PARAMETER Experiment Name: At_2mM_SA_cDNA_P Parameter: Treatment Value: 2mM SA vs. No Treatment
  misc_feature: MA Experiment ID: 20000069 Result: Down-regulated in Transcription
  misc_feature: MA Experiment 20000069 PARAMETER Experiment Name: At_100uM_ABA_Mutants_cDNA_P Parameter: Plant Line Value: CS23
  misc_feature: MA Experiment 20000069 PARAMETER Experiment Name: At_100uM_ABA_Mutants_cDNA_P Parameter: Timepoint (hr) Value: 6
  misc_feature: MA Experiment 20000069 PARAMETER Experiment Name: At_100uM_ABA_Mutants_cDNA_P Parameter: Tissue Value: Aerial
  misc_feature: MA Experiment 20000069 PARAMETER Experiment Name: At_100uM_ABA_Mutants_cDNA_P Parameter: Treatment Value: 100uM ABA vs. No Treatment
  misc_feature: MA Experiment ID: 20000070 Result: Down-regulated in Transcription
  misc_feature: MA Experiment 20000070 PARAMETER Experiment Name: At_100uM_ABA_Mutants_cDNA_P Parameter: Plant Line Value: CS24
  misc_feature: MA Experiment 20000070 PARAMETER Experiment Name: At_100uM_ABA_Mutants_cDNA_P Parameter: Timepoint (hr) Value: 6
  misc_feature: MA Experiment 20000070 PARAMETER Experiment Name: At_100uM_ABA_Mutants_cDNA_P Parameter: Tissue Value: Aerial
  misc_feature: MA Experiment 20000070 PARAMETER Experiment Name: At_100uM_ABA_Mutants_cDNA_P Parameter: Treatment Value: 100uM ABA vs. No Treatment
  misc_feature: MA Experiment ID: 20000071 Result: Down-regulated in Transcription
  misc_feature: MA Experiment 20000071 PARAMETER Experiment Name: At_100uM_ABA_Mutants_cDNA_P Parameter: Plant Line Value: CS8104
  misc_feature: MA Experiment 20000071 PARAMETER Experiment Name: At_100uM_ABA_Mutants_cDNA_P Parameter: Timepoint (hr) Value: 6
  misc_feature: MA Experiment 20000071 PARAMETER Experiment Name: At_100uM_ABA_Mutants_cDNA_P Parameter: Tissue Value: Aerial
  misc_feature: MA Experiment 20000071 PARAMETER Experiment Name: At_100uM_ABA_Mutants_cDNA_P Parameter: Treatment Value: 100uM ABA vs. No Treatment
  misc_feature: MA Experiment ID: 20000086 Result: Down-regulated in Transcription
  misc_feature: MA Experiment 20000086 PARAMETER Experiment Name: At_100uM_ABA_Mutants_cDNA_P Parameter: Plant Line Value: CS22
  misc_feature: MA Experiment 20000086 PARAMETER Experiment Name: At_100uM_ABA_Mutants_cDNA_P Parameter: Timepoint (hr) Value: 6
  misc_feature: MA Experiment 20000086 PARAMETER Experiment Name: At_100uM_ABA_Mutants_cDNA_P Parameter: Tissue Value: Aerial
  misc_feature: MA Experiment 20000086 PARAMETER Experiment Name: At_100uM_ABA_Mutants_cDNA_P Parameter: Treatment Value: 100uM ABA vs. No Treatment
  misc_feature: MA Experiment ID: 20000087 Result: Down-regulated in Transcription
  misc_feature: MA Experiment 20000087 PARAMETER Experiment Name: At_100uM_ABA_Mutants_cDNA_P Parameter: Plant Line Value: WS
  misc_feature: MA Experiment 20000087 PARAMETER Experiment Name: At_100uM_ABA_Mutants_cDNA_P Parameter: Timepoint (hr) Value: 6
  misc_feature: MA Experiment 20000087 PARAMETER Experiment Name: At_100uM_ABA_Mutants_cDNA_P Parameter: Tissue Value: Aerial
  misc_feature: MA Experiment 20000087 PARAMETER Experiment Name: At_100uM_ABA_Mutants_cDNA_P Parameter: Treatment Value: 100uM ABA vs. No Treatment
  misc_feature: MA Experiment ID: 20000089 Result: Down-regulated in Transcription
  misc_feature: MA Experiment ID: 20000090 Result: Down-regulated in Transcription
  misc_feature: MA Experiment ID: 20000117 Result: Down-regulated in Transcription
  misc_feature: MA Experiment 20000117 PARAMETER Experiment Name: At_100uM_ABA_Mutants_cDNA_P Parameter: Plant Line Value: Columbia
  misc_feature: MA Experiment 20000117 PARAMETER Experiment Name: At_100uM_ABA_Mutants_cDNA_P Parameter: Timepoint (hr) Value: 6
  misc_feature: MA Experiment 20000117 PARAMETER Experiment Name: At_100uM_ABA_Mutants_cDNA_P Parameter: Tissue Value: Aerial
  misc_feature: MA Experiment 20000117 PARAMETER Experiment Name: At_100uM_ABA_Mutants_cDNA_P Parameter: Treatment Value: 100uM ABA vs. No Treatment
  misc_feature: MA Experiment ID: 20000182 Result: Down-regulated in Transcription
  misc_feature: MA Experiment 20000182 PARAMETER Experiment Name: At_2mM_SA_P Parameter: Age (day) Value: 14
  misc_feature: MA Experiment 20000182 PARAMETER Experiment Name: At_2mM_SA_P Parameter: Organism Value: A. thaliana
  misc_feature: MA Experiment 20000182 PARAMETER Experiment Name: At_2mM_SA_P Parameter: Plant Line Value: WS
  misc_feature: MA Experiment 20000182 PARAMETER Experiment Name: At_2mM_SA_P Parameter: Timepoint (hr) Value: 6
  misc_feature: MA Experiment 20000182 PARAMETER Experiment Name: At_2mM_SA_P Parameter: Tissue Value: Aerial
  misc_feature: MA Experiment 20000182 PARAMETER Experiment Name: At_2mM_SA_P Parameter: Treatment Value: 2mM SA vs. No Treatment
  misc_feature: MA Experiment ID: 20000184 Result: Up-regulated in Transcription
  misc_feature: MA Experiment 20000184 PARAMETER Experiment Name: At_Shoots__P Parameter: Age (day) Value: 7
  misc_feature: MA Experiment 20000184 PARAMETER Experiment Name: At_Shoots__P Parameter: Tissue Value: Shoots vs. Whole Plant
  misc_feature: MA Experiment ID: 20000185 Result: Up-regulated in Transcription
  misc_feature: MA Experiment 20000185 PARAMETER Experiment Name: At_Roots__P Parameter: Age (day) Value: 7 vs. 21
  misc_feature: MA Experiment 20000185 PARAMETER Experiment Name: At_Roots__P Parameter: Organism Value: A. thaliana
  misc_feature: MA Experiment 20000185 PARAMETER Experiment Name: At_Roots__P Parameter: Tissue Value: Roots vs. Whole Plant
  misc_feature: MA Experiment ID: 20000224 Result: Up-regulated in Transcription
  misc_feature: MA Experiment ID: 20000234 Result: Up-regulated in Transcription
  misc_feature: MA Experiment 20000234 PARAMETER Experiment Name: At_Siliques_P Parameter: Age (day) Value: 21
  misc_feature: MA Experiment 20000234 PARAMETER Experiment Name: At_Siliques_P Parameter: Organism Value: A. thaliana
  misc_feature: MA Experiment 20000234 PARAMETER Experiment Name: At_Siliques_P Parameter: Plant Line Value: WS
  misc_feature: MA Experiment 20000234 PARAMETER Experiment Name: At_Siliques_P Parameter: Tissue Value: Less Than 5mm Siliques vs. Whole Plant
  misc_feature: MA Experiment ID: 20000235 Result: Up-regulated in Transcription
  misc_feature: MA Experiment 20000235 PARAMETER Experiment Name: At_Siliques_P Parameter: Age (day) Value: 21
  misc_feature: MA Experiment 20000235 PARAMETER Experiment Name: At_Siliques_P Parameter: Organism Value: A. thaliana
  misc_feature: MA Experiment 20000235 PARAMETER Experiment Name: At_Siliques_P Parameter: Plant Line Value: WS
  misc_feature: MA Experiment 20000235 PARAMETER Experiment Name: At_Siliques_P Parameter: Tissue Value: 5-10mm Siliques vs. Whole Plant
  misc_feature: MA Experiment ID: 20000264 Result: Up-regulated in Transcription
  misc_feature: MA Experiment 20000264 PARAMETER Experiment Name: At_Open_Flower_P Parameter: Age (day) Value: 21
  misc_feature: MA Experiment 20000264 PARAMETER Experiment Name: At_Open_Flower_P Parameter: Plant Line Value: WS
  misc_feature: MA Experiment 20000264 PARAMETER Experiment Name: At_Open_Flower_P Parameter: Tissue Value: Open Flower vs. Whole Plant
  misc_feature: MA Experiment ID: 20000265 Result: Up-regulated in Transcription
  misc_feature: MA Experiment 20000265 PARAMETER Experiment Name: At_Open_Flower_P Parameter: Age (day) Value: 21
  misc_feature: MA Experiment 20000265 PARAMETER Experiment Name: At_Open_Flower_P Parameter: Plant Line Value: WS
  misc_feature: MA Experiment 20000265 PARAMETER Experiment Name: At_Open_Flower_P Parameter: Tissue Value: Closed Flower vs. Whole Plant
  misc_feature: MA Experiment ID: 20000286 Result: Up-regulated in Transcription
  misc_feature: MA Experiment 20000286 PARAMETER Experiment Name: At_Open_Flower_P Parameter: Age (day) Value: 21
  misc_feature: MA Experiment 20000286 PARAMETER Experiment Name: At_Open_Flower_P Parameter: Plant Line Value: WS
  misc_feature: MA Experiment 20000286 PARAMETER Experiment Name: At_Open_Flower_P Parameter: Tissue Value: Half Open vs. Whole Plant
  misc_feature: MA Experiment ID: 20000456 Result: Down-regulated in Transcription
  misc_feature: MA Experiment 20000456 PARAMETER Experiment Name: At_100uM_BA_P Parameter: Age (day) Value: 14
  misc_feature: MA Experiment 20000456 PARAMETER Experiment Name: At_100uM_BA_P Parameter: Organism Value: A. thaliana
  misc_feature: MA Experiment 20000456 PARAMETER Experiment Name: At_100uM_BA_P Parameter: Plant Line Value: WS
  misc_feature: MA Experiment 20000456 PARAMETER Experiment Name: At_100uM_BA_P Parameter: Timepoint (hr) Value: 6
  misc_feature: MA Experiment 20000456 PARAMETER Experiment Name: At_100uM_BA_P Parameter: Tissue Value: Aerial
  misc_feature: MA Experiment 20000456 PARAMETER Experiment Name: At_100uM_BA_P Parameter: Treatment Value: 100uM BA vs. No Treatment
  misc_feature: MA Experiment ID: 20000527 Result: Up-regulated in Transcription
  misc_feature: MA Experiment 20000527 PARAMETER Experiment Name: At_10percent_PEG_P Parameter: Age (day) Value: 20
  misc_feature: MA Experiment 20000527 PARAMETER Experiment Name: At_10percent_PEG_P Parameter: Organism Value: A. thaliana
  misc_feature: MA Experiment 20000527 PARAMETER Experiment Name: At_10percent_PEG_P Parameter: Plant Line Value: WS
  misc_feature: MA Experiment 20000527 PARAMETER Experiment Name: At_10percent_PEG_P Parameter: Timepoint (day) Value: 20
  misc_feature: MA Experiment 20000527 PARAMETER Experiment Name: At_10percent_PEG_P Parameter: Tissue Value: Whole Plant
  misc_feature: MA Experiment 20000527 PARAMETER Experiment Name: At_10percent_PEG_P Parameter: Treatment Value: 10percent PEG vs. No Treatment
  misc_feature: MA Experiment ID: 20000573 Result: Down-regulated in Transcription
  misc_feature: MA Experiment 20000573 PARAMETER Experiment Name: At_100uM_ABA_Mutants__P Parameter: Organism Value: A. thaliana
  misc_feature: MA Experiment 20000573 PARAMETER Experiment Name: At_100uM_ABA_Mutants__P Parameter: Plant Line Value: CS22 vs. Ler wt
  misc_feature: MA Experiment 20000573 PARAMETER Experiment Name: At_100uM_ABA_Mutants__P Parameter: Timepoint (hr) Value: N/A
  misc_feature: MA Experiment 20000573 PARAMETER Experiment Name: At_100uM_ABA_Mutants__P Parameter: Tissue Value: Whole Plant
  misc_feature: MA Experiment 20000573 PARAMETER Experiment Name: At_100uM_ABA_Mutants__P Parameter: Treatment Value: None
  misc_feature: MA Experiment ID: 20000574 Result: Down-regulated in Transcription
  misc_feature: MA Experiment 20000574 PARAMETER Experiment Name: At_100uM_ABA_Mutants__P Parameter: Organism Value: A. thaliana
  misc_feature: MA Experiment 20000574 PARAMETER Experiment Name: At_100uM_ABA_Mutants__P Parameter: Plant Line Value: CS23 vs. Ler wt
  misc_feature: MA Experiment 20000574 PARAMETER Experiment Name: At_100uM_ABA_Mutants__P Parameter: Timepoint (hr) Value: N/A
  misc_feature: MA Experiment 20000574 PARAMETER Experiment Name: At_100uM_ABA_Mutants__P Parameter: Tissue Value: Whole Plant
  misc_feature: MA Experiment 20000574 PARAMETER Experiment Name: At_100uM_ABA_Mutants__P Parameter: Treatment Value: None
  misc_feature: MA Experiment ID: 20000794 Result: Up-regulated in Transcription
  misc_feature: MA Experiment 20000794 PARAMETER Experiment Name: At_Petals_P Parameter: Age (day) Value: 23-25 days
  misc_feature: MA Experiment 20000794 PARAMETER Experiment Name: At_Petals_P Parameter: Plant Line Value: WS
  misc_feature: MA Experiment 20000794 PARAMETER Experiment Name: At_Petals_P Parameter: Tissue Value: Petals vs. Whole plant
  misc_feature: MA Experiment ID: 20001247 Result: Down-regulated in Transcription
  misc_feature: MA Experiment 20001247 PARAMETER Experiment Name: At_Far-red-induction_P Parameter: Age (day) Value: 7
  misc_feature: MA Experiment 20001247 PARAMETER Experiment Name: At_Far-red-induction_P Parameter: Light Value: Far-red vs. White
  misc_feature: MA Experiment 20001247 PARAMETER Experiment Name: At_Far-red-induction_P Parameter: Organism Value: A. thaliana
  misc_feature: MA Experiment 20001247 PARAMETER Experiment Name: At_Far-red-induction_P Parameter: Plant Line Value: Columbia
  misc_feature: MA Experiment 20001247 PARAMETER Experiment Name: At_Far-red-induction_P Parameter: Timepoint (hr) Value: 1
  misc_feature: MA Experiment 20001247 PARAMETER Experiment Name: At_Far-red-induction_P Parameter: Tissue Value: Whole Plant
  misc_feature: MA Experiment ID: 20001248 Result: Down-regulated in Transcription
  misc_feature: MA Experiment 20001248 PARAMETER Experiment Name: At_Far-red-induction_P Parameter: Age (day) Value: 7
  misc_feature: MA Experiment 20001248 PARAMETER Experiment Name: At_Far-red-induction_P Parameter: Light Value: Far-red vs. White
  misc_feature: MA Experiment 20001248 PARAMETER Experiment Name: At_Far-red-induction_P Parameter: Organism Value: A. thaliana
  misc_feature: MA Experiment 20001248 PARAMETER Experiment Name: At_Far-red-induction_P Parameter: Plant Line Value: Columbia
  misc_feature: MA Experiment 20001248 PARAMETER Experiment Name: At_Far-red-induction_P Parameter: Timepoint (hr) Value: 4
  misc_feature: MA Experiment 20001248 PARAMETER Experiment Name: At_Far-red-induction_P Parameter: Tissue Value: Whole Plant
  misc_feature: MA Experiment ID: 20001451 Result: Down-regulated in Transcription
  misc_feature: MA Experiment 20001451 PARAMETER Experiment Name: At_Far-red-induction_P Parameter: Age (day) Value: 7
  misc_feature: MA Experiment 20001451 PARAMETER Experiment Name: At_Far-red-induction_P Parameter: Light Value: Far-red vs. White
  misc_feature: MA Experiment 20001451 PARAMETER Experiment Name: At_Far-red-induction_P Parameter: Organism Value: A. thaliana
  misc_feature: MA Experiment 20001451 PARAMETER Experiment Name: At_Far-red-induction_P Parameter: Plant Line Value: Columbia
  misc_feature: MA Experiment 20001451 PARAMETER Experiment Name: At_Far-red-induction_P Parameter: Timepoint (hr) Value: 24
  misc_feature: MA Experiment 20001451 PARAMETER Experiment Name: At_Far-red-induction_P Parameter: Tissue Value: Whole Plant
  misc_feature: MA Experiment ID: 20001555 Result: Down-regulated in Transcription
  misc_feature: MA Experiment 20001555 PARAMETER Experiment Name: At_Drought_Soil_Dry_P Parameter: Age (day) Value: 24
  misc_feature: MA Experiment 20001555 PARAMETER Experiment Name: At_Drought_Soil_Dry_P Parameter: Organism Value: A. thaliana
  misc_feature: MA Experiment 20001555 PARAMETER Experiment Name: At_Drought_Soil_Dry_P Parameter: Plant Line Value: WS
  misc_feature: MA Experiment 20001555 PARAMETER Experiment Name: At_Drought_Soil_Dry_P Parameter: Post Timepoint (hr) Value: None
  misc_feature: MA Experiment 20001555 PARAMETER Experiment Name: At_Drought_Soil_Dry_P Parameter: Post-Treatment Value: None
  misc_feature: MA Experiment 20001555 PARAMETER Experiment Name: At_Drought_Soil_Dry_P Parameter: Timepoint (day) Value: 10
  misc_feature: MA Experiment 20001555 PARAMETER Experiment Name: At_Drought_Soil_Dry_P Parameter: Treatment Value: Drought vs. No Drought
  misc_feature: MA Experiment ID: 20001556 Result: Down-regulated in Transcription
  misc_feature: MA Experiment 20001556 PARAMETER Experiment Name: At_Drought_Soil_Dry_P Parameter: Age (day) Value: 26
  misc_feature: MA Experiment 20001556 PARAMETER Experiment Name: At_Drought_Soil_Dry_P Parameter: Organism Value: A. thaliana
  misc_feature: MA Experiment 20001556 PARAMETER Experiment Name: At_Drought_Soil_Dry_P Parameter: Plant Line Value: WS
  misc_feature: MA Experiment 20001556 PARAMETER Experiment Name: At_Drought_Soil_Dry_P Parameter: Post Timepoint (hr) Value: None
  misc_feature: MA Experiment 20001556 PARAMETER Experiment Name: At_Drought_Soil_Dry_P Parameter: Post-Treatment Value: None
  misc_feature: MA Experiment 20001556 PARAMETER Experiment Name: At_Drought_Soil_Dry_P Parameter: Timepoint (day) Value: 12
  misc_feature: MA Experiment 20001556 PARAMETER Experiment Name: At_Drought_Soil_Dry_P Parameter: Treatment Value: Drought vs. No Drought
  misc_feature: MA Experiment ID: 20001558 Result: Up-regulated in Transcription
  misc_feature: MA Experiment 20001558 PARAMETER Experiment Name: At_Drought_Soil_Dry_P Parameter: Age (day) Value: 27
  misc_feature: MA Experiment 20001558 PARAMETER Experiment Name: At_Drought_Soil_Dry_P Parameter: Organism Value: A. thaliana
  misc_feature: MA Experiment 20001558 PARAMETER Experiment Name: At_Drought_Soil_Dry_P Parameter: Plant Line Value: WS
  misc_feature: MA Experiment 20001558 PARAMETER Experiment Name: At_Drought_Soil_Dry_P Parameter: Post Timepoint (hr) Value: 6
  misc_feature: MA Experiment 20001558 PARAMETER Experiment Name: At_Drought_Soil_Dry_P Parameter: Post-Treatment Value: Re-Water vs. No Drought
  misc_feature: MA Experiment 20001558 PARAMETER Experiment Name: At_Drought_Soil_Dry_P Parameter: Timepoint (day) Value: 13
  misc_feature: MA Experiment 20001558 PARAMETER Experiment Name: At_Drought_Soil_Dry_P Parameter: Treatment Value: Drought vs. No Drought
  misc_feature: MA Experiment ID: 20001560 Result: Up-regulated in Transcription
  misc_feature: MA Experiment 20001560 PARAMETER Experiment Name: At_Drought_Soil_Dry_P Parameter: Age (day) Value: 28
  misc_feature: MA Experiment 20001560 PARAMETER Experiment Name: At_Drought_Soil_Dry_P Parameter: Organism Value: A. thaliana
  misc_feature: MA Experiment 20001560 PARAMETER Experiment Name: At_Drought_Soil_Dry_P Parameter: Plant Line Value: WS
  misc_feature: MA Experiment 20001560 PARAMETER Experiment Name: At_Drought_Soil_Dry_P Parameter: Post Timepoint (hr) Value: None
  misc_feature: MA Experiment 20001560 PARAMETER Experiment Name: At_Drought_Soil_Dry_P Parameter: Post-Treatment Value: None
  misc_feature: MA Experiment 20001560 PARAMETER Experiment Name: At_Drought_Soil_Dry_P Parameter: Timepoint (day) Value: 14
  misc_feature: MA Experiment 20001560 PARAMETER Experiment Name: At_Drought_Soil_Dry_P Parameter: Treatment Value: Drought vs. No Drought
atccataacccaaaaagagtcacttccgtgtcacaagaaaccatgaaaccttctcttcatcaaccacttttcttcttcttcttagccaccgtcctcccattaatcctgaccgtccattctcaatcagacgactcagatttcatccgtactagctgcaacactacattataccctgacctatgcttctcctctctttcctccttctctagctctgtccacaacgatccagccctcttggctcgagccgccatctccatcactctcaccaagactctcgacttagcctcatacctcgccaatatcaccactctccagccggagagccaagacgatggtgcccaccacccaaccgcagccgctgtttttcatgactgcttcgacaatcttaaagacgcggtcgaagaaatgaaaggctctatgaaacagatgagggaactggtctcgactggctcgctcgagtccttcaggttccaaatgagtaacgtgcagacgtggctcagtgcggctttaactgatgaggagacttgtacggacggatttaaagacattcacgatgagccgaggaaggatgacatatgcgcacgggtcgatgacgtcaaaaagatgactagtaacgcgttggctctagttaatcgatgtgttgataaggccatacattgatcattttatcattattcactaaatattcttcttctttttttttcttacttgaaaaagaaattattgtttaaatgtttttggttatcacgcgtgcatgatagagatataataagataagcctgtttgtgattggctgtaatgaaatagtgatattatgt

SEQ ID NO: 20996 - protein, 219 aa, Arabidopsis thaliana
  peptide (1)..(219): Ceres Seq. ID no. 12330147
  misc_feature (23)..(216): Homolog of NCBI NO: 15234982 NR Description: putative protein
  misc_feature (30)..(216): Homolog of NCBI NO: 7488727 NR Description: 21K protein precursor - alfalfa
  misc_feature (30)..(219): Homolog of NCBI NO: 112717 NR Description: 21 KD PROTEIN PRECURSOR (1.2 PROTEIN)
  misc_feature (42)..(211): Homolog of NCBI NO: 18394174 NR Description: expressed protein
  misc_feature (42)..(211): Homolog of NCBI NO: 15226321 NR Description: unknown protein; protein id: At2g01610.1
  misc_feature (15)..(218): Homolog of NCBI NO: 25406069 NR Description: hypothetical protein F5A18.10 [imported] -
  misc_feature (15)..(218): Homolog of NCBI NO: 18409660 NR Description: expressed protein
  misc_feature (15)..(218): Homolog of NCBI NO: 21554277 NR Description: unknown [Arabidopsis thaliana]
  misc_feature (15)..(219): Homolog of NCBI NO: 15220674 NR Description: Unknown protein
  misc_feature (15)..(219): Homolog of NCBI NO: 21555465 NR Description: unknown [Arabidopsis thaliana]
IHNPKRVTSVSQETMKPSLHQPLFFFFLATVLPLILTVHSQSDDSDFIRTSCNTTLYPDLCFSSLSSFSSSVHNDPALLARAAISITLTKTLDLASYLANITTLQPESQDDGAHHPTAAAVFHDCFDNLKDAVEEMKGSMKQMRELVSTGSLESFRFQMSNVQTWLSAALTDEETCTDGFKDIHDEPRKDDICARVDDVKKMTSNALALVNRCVDKAIH

SEQ ID NO: 20997 - protein, 205 aa, Arabidopsis thaliana
  peptide (1)..(205): Ceres Seq. ID no. 12330148
  misc_feature (9)..(202): Homolog of NCBI NO: 15234982 NR Description: putative protein
  misc_feature (16)..(202): Homolog of NCBI NO: 7488727 NR Description: 21K protein precursor - alfalfa
  misc_feature (16)..(205): Homolog of NCBI NO: 112717 NR Description: 21 KD PROTEIN PRECURSOR (1.2 PROTEIN)
  misc_feature (28)..(197): Homolog of NCBI NO: 18394174 NR Description: expressed protein
  misc_feature (28)..(197): Homolog of NCBI NO: 15226321 NR Description: unknown protein; protein id: At2g01610.1
  misc_feature (1)..(204): Homolog of NCBI NO: 25406069 NR Description: hypothetical protein F5A18.10 [imported] -
  misc_feature (1)..(204): Homolog of NCBI NO: 18409660 NR Description: expressed protein
  misc_feature (1)..(204): Homolog of NCBI NO: 21554277 NR Description: unknown [Arabidopsis thaliana]
  misc_feature (1)..(205): Homolog of NCBI NO: 15220674 NR Description: Unknown protein
  misc_feature (1)..(205): Homolog of NCBI NO: 21555465 NR Description: unknown [Arabidopsis thaliana]
MKPSLHQPLFFFFLATVLPLILTVHSQSDDSDFIRTSCNTTLYPDLCFSSLSSFSSSVHNDPALLARAAISITLTKTLDLASYLANITTLQPESQDDGAHHPTAAAVFHDCFDNLKDAVEEMKGSMKQMRELVSTGSLESFRFQMSNVQTWLSAALTDEETCTDGFKDIHDEPRKDDICARVDDVKKMTSNALALVNRCVDKAIH

SEQ ID NO: 20998 - DNA, 2384 bp, Arabidopsis thaliana
  misc_feature (1)..(2384): Ceres Seq. ID no. 12372001
  misc_feature: MA Experiment ID: 108433 Result: Down-regulated in Transcription
  misc_feature: MA Experiment 108433 PARAMETER Experiment Name: At_rhl_Mutant2_cDNA_P Parameter: Age (day) Value: 7
  misc_feature: MA Experiment 108433 PARAMETER Experiment Name: At_rhl_Mutant2_cDNA_P Parameter: Organism Value: A. thaliana
  misc_feature: MA Experiment 108433 PARAMETER Experiment Name: At_rhl_Mutant2_cDNA_P Parameter: Plant Line Value: rhl Mutant vs. wt landsburg
  misc_feature: MA Experiment 108433 PARAMETER Experiment Name: At_rhl_Mutant2_cDNA_P Parameter: Tissue Value: Roots
  misc_feature: MA Experiment ID: 20000234 Result: Up-regulated in Transcription
  misc_feature: MA Experiment 20000234 PARAMETER Experiment Name: At_Siliques_P Parameter: Age (day) Value: 21
  misc_feature: MA Experiment 20000234 PARAMETER Experiment Name: At_Siliques_P Parameter: Organism Value: A. thaliana
  misc_feature: MA Experiment 20000234 PARAMETER Experiment Name: At_Siliques_P Parameter: Plant Line Value: WS
  misc_feature: MA Experiment 20000234 PARAMETER Experiment Name: At_Siliques_P Parameter: Tissue Value: Less Than 5mm Siliques vs. Whole Plant
  misc_feature: MA Experiment ID: 20000235 Result: Up-regulated in Transcription
  misc_feature: MA Experiment 20000235 PARAMETER Experiment Name: At_Siliques_P Parameter: Age (day) Value: 21
  misc_feature: MA Experiment 20000235 PARAMETER Experiment Name: At_Siliques_P Parameter: Organism Value: A. thaliana
  misc_feature: MA Experiment 20000235 PARAMETER Experiment Name: At_Siliques_P Parameter: Plant Line Value: WS
  misc_feature: MA Experiment 20000235 PARAMETER Experiment Name: At_Siliques_P Parameter: Tissue Value: 5-10mm Siliques vs. Whole Plant
  misc_feature: MA Experiment ID: 20000439 Result: Up-regulated in Transcription
  misc_feature: MA Experiment 20000439 PARAMETER Experiment Name: At_Roots__P Parameter: Age (day) Value: 14 vs. 21
  misc_feature: MA Experiment 20000439 PARAMETER Experiment Name: At_Roots__P Parameter: Organism Value: A. thaliana
  misc_feature: MA Experiment 20000439 PARAMETER Experiment Name: At_Roots__P Parameter: Tissue Value: Roots vs. Whole Plant
  misc_feature: MA Experiment ID: 20000495 Result: Up-regulated in Transcription
  misc_feature: MA Experiment 20000495 PARAMETER Experiment Name: At_Guard_Cells_P Parameter: Harvest Date Value: 8/2/2002
  misc_feature: MA Experiment 20000495 PARAMETER Experiment Name: At_Guard_Cells_P Parameter: Organism Value: A. thaliana
  misc_feature: MA Experiment 20000495 PARAMETER Experiment Name: At_Guard_Cells_P Parameter: Tissue Value: Guard Cells vs. Leaves
  misc_feature: MA Experiment ID: 20000496 Result: Up-regulated in Transcription
  misc_feature: MA Experiment 20000496 PARAMETER Experiment Name: At_Guard_Cells_P Parameter: Harvest Date Value: 7/19/2002
  misc_feature: MA Experiment 20000496 PARAMETER Experiment Name: At_Guard_Cells_P Parameter: Organism Value: Canola
  misc_feature: MA Experiment 20000496 PARAMETER Experiment Name: At_Guard_Cells_P Parameter: Tissue Value: Guard Cells vs. Leaves
  misc_feature: MA Experiment ID: 20001451 Result: Down-regulated in Transcription
  misc_feature: MA Experiment 20001451 PARAMETER Experiment Name: At_Far-red-induction_P Parameter: Age (day) Value: 7
  misc_feature: MA Experiment 20001451 PARAMETER Experiment Name: At_Far-red-induction_P Parameter: Light Value: Far-red vs. White
  misc_feature: MA Experiment 20001451 PARAMETER Experiment Name: At_Far-red-induction_P Parameter: Organism Value: A. thaliana
  misc_feature: MA Experiment 20001451 PARAMETER Experiment Name: At_Far-red-induction_P Parameter: Plant Line Value: Columbia
  misc_feature: MA Experiment 20001451 PARAMETER Experiment Name: At_Far-red-induction_P Parameter: Timepoint (hr) Value: 24
  misc_feature: MA Experiment 20001451 PARAMETER Experiment Name: At_Far-red-induction_P Parameter: Tissue Value: Whole Plant
  misc_feature: MA Experiment ID: 20001757 Result: Down-regulated in Transcription
  misc_feature: MA Experiment 20001757 PARAMETER Experiment Name: At_50mM_NH4NO3_L-to-H_P Parameter: Timepoint (hr) Value: 6
  misc_feature: MA Experiment 20001757 PARAMETER Experiment Name: At_50mM_NH4NO3_L-to-H_P Parameter: Tissue Value: Leaf
  misc_feature: MA Experiment 20001757 PARAMETER Experiment Name: At_50mM_NH4NO3_L-to-H_P Parameter: Treatment Value: 50mM NH4NO3 vs 100mM Mannitol
acaacactaccaacactctctcttgcttcctctcctctctgttttttctagctttctctctcacaaaatcaaaactttttttctgtgttcattatcatctccttaaattcataacaatacactctcataattcttctctgcgtaggagagacattgcagaaataaaagagtttttaatagacgcaagaaaaagagaaaaaagcattcatttttttcttgctttgttgctttgcttttgcttttctgtttctcttcttttgtgggcacaacaaaacatcaacaaagtaatgattttgtgttcttccttctccttctggtaatctaatctaaagcttttcatggtggtgatgaagttaataacaatgaagatattctctgttctgttactactatgtttcttcgttacttgttctctctcttctgaacccagaaaccctgaagtggaggcgttgataaacataaagaacgagttacatgatccacatggtgttttcaaaaactgggatgagttttctgttgatccttgtagctggactatgatctcttgttcttcagacaacctcgtaattggcttaggagctccaagtcagtctctttcaggaactttatctgggtctattggaaatctcactaatcttcgacaagtgtcattacagaacaataacatctccggtaaaatcccaccggagatttgttctcttcccaaattacagactctggatttatccaataaccggttctccggtgaaatccccggttctgttaaccagctgagtaatctccaatatctgaggttgaacaacaactcattatctgggccctttcctgcttctctgtctcaaatccctcacctctctttcttagacttgtcttataacaatctcagaggtcctgttcctaaatttcctgcaaggacattcaatgttgctgggaaccctttgatttgtaaaaacagcctaccggagatttgttcaggatcaatcagtgcaagccctctttctgtctctttacgttcttcatcaggacgtagaaccaacatattagcagttgcacttggtgtaagccttggctttgctgttagtgtaatcctctctctcgggttcatttggtatcgaaagaaacaaagacggttaacgatgcttcgcattagtgacaagcaagaggaagggttactagggttgggaaatctaagaagcttcacattcagggaacttcatgtagctacggatggttttagttccaagagtattcttggtgctggtgggtttggtaatgtctacagaggaaaattcggggatgggacagtggttgcagtgaaacgattgaaagatgtgaatggaacctccgggaactcacagtttcgtactgagcttgagatgatcagcttagctgttcataggaatttgcttcggttaatcggttattgtgcgagttctagcgaaagacttcttgtttacccttacatgtccaatggcagcgtcgcctctaggctcaaagctaagccagcgttggactggaacacaaggaagaagatagcaattggagctgcaagagggttgttttatctacacgagcaatgcgatcccaagattattcaccgagatgtcaaggcagcaaacattctcctagatgagtattttgaagcagttgttggggattttggactagcaaagctactcaaccacgaggattcacatgtcacaaccgcggttagaggaactgttggtcacattgcacccgagtatctctccactggtcagtcatctgagaaaaccgatgtctttgggttcggtatacttttgctagagctcatcacaggaatgagagctctcgagtttggcaagtctgttagccagaaaggagctatgctagaatgggtgaggaagctacacaaggaaatgaaagtagaggagctagtagaccgagaactggggacaacctacgatagaatagaagttggagagatgctacaagtggcactgctctgcactcagtttcttccagctcacagacccaaaatgtctgaagtagttcagatgcttgaaggagatggattagctgagagatgggctgcttcacatgaccattcacatttctaccatgccaacatgtcttacaggactattacctctactgatggcaacaaccaaaccaaacatctgtttggctcctcaggatttgaagatgaagatgataatcaagcgttagattcattcgccatggaactatctggtccaaggtagtaaatcttggacacagaaagaaacagatataatatccccatgacttcaatttttgtttttgagatgatatagacatgtaaatggttatcaaacctttgaaaaaattgagattctgggtctaatggttaatattttggatgt

SEQ ID NO: 20999 - protein, 634 aa, Arabidopsis thaliana
  peptide (1)..(634): Ceres Seq. ID no. 12372002
  misc_feature (299)..(494): Pfam Name: Protein kinase domain Pfam Description: Protein kinase domain
  misc_feature (80)..(634): Homolog of NCBI NO: 15224077 NR Description: putative LRR receptor protein kinase; protein id:
  misc_feature (32)..(577): Homolog of NCBI NO: 13897310 NR Description: SERK2 protein [Zea mays]
  misc_feature (155)..(634): Homolog of NCBI NO: 25407653 NR Description: receptor-like kinase homolog [imported] -
  misc_feature (15)..(582): Homolog of NCBI NO: 15219817 NR Description: receptor-like kinase, putative; protein id:
  misc_feature (20)..(634): Homolog of NCBI NO: 9279736 NR Description: receptor-like kinase [Arabidopsis thaliana]
  misc_feature (18)..(634): Homolog of NCBI NO: 22331326 NR Description: somatic embryogenesis receptor-like kinase,
  misc_feature (15)..(634): Homolog of NCBI NO: 11862956 NR Description: putative protein kinase [Oryza sativa (japonica
  misc_feature (6)..(634): Homolog of NCBI NO: 21593619 NR Description: receptor protein kinase-like protein [Arabidopsis
  misc_feature (1)..(634): Homolog of NCBI NO: 15237242 NR Description: receptor protein kinase-like protein
  misc_feature (1)..(634): Homolog of NCBI NO: 22329033 NR Description: receptor-like kinase homolog
MVVMKLITMKIFSVLLLLCFFVTCSLSSEPRNPEVEALINIKNELHDPHGVFKNWDEFSVDPCSWTMISCSSDNLVIGLGAPSQSLSGTLSGSIGNLTNLRQVSLQNNNISGKIPPEICSLPKLQTLDLSNNRFSGEIPGSVNQLSNLQYLRLNNNSLSGPFPASLSQIPHLSFLDLSYNNLRGPVPKFPARTFNVAGNPLICKNSLPEICSGSISASPLSVSLRSSSGRRTNILAVALGVSLGFAVSVILSLGFIWYRKKQRRLTMLRISDKQEEGLLGLGNLRSFTFRELHVATDGFSSKSILGAGGFGNVYRGKFGDGTVVAVKRLKDVNGTSGNSQFRTELEMISLAVHRNLLRLIGYCASSSERLLVYPYMSNGSVASRLKAKPALDWNTRKKIAIGAARGLFYLHEQCDPKIIHRDVKAANILLDEYFEAVVGDFGLAKLLNHEDSHVTTAVRGTVGHIAPEYLSTGQSSEKTDVFGFGILLLELITGMRALEFGKSVSQKGAMLEWVRKLHKEMKVEELVDRELGTTYDRIEVGEMLQVALLCTQFLPAHRPKMSEVVQMLEGDGLAERWAASHDHSHFYHANMSYRTITSTDGNNQTKHLFGSSGFEDEDDNQALDSFAMELSGPR

SEQ ID NO: 21000 - protein, 631 aa, Arabidopsis thaliana
  peptide (1)..(631): Ceres Seq. ID no. 12372003
  misc_feature (296)..(491): Pfam Name: Protein kinase domain Pfam Description: Protein kinase domain
  misc_feature (29)..(574): Homolog of NCBI NO: 13897310 NR Description: SERK2 protein [Zea mays]
  misc_feature (152)..(631): Homolog of NCBI NO: 25407653 NR Description: receptor-like kinase homolog [imported] -
  misc_feature (12)..(579): Homolog of NCBI NO: 15219817 NR Description: receptor-like kinase, putative; protein id:
  misc_feature (17)..(631): Homolog of NCBI NO: 9279736 NR Description: receptor-like kinase [Arabidopsis thaliana]
  misc_feature (15)..(631): Homolog of NCBI NO: 22331326 NR Description: somatic embryogenesis receptor-like kinase,
  misc_feature (12)..(631): Homolog of NCBI NO: 11862956 NR Description: putative protein kinase [Oryza sativa (japonica
  misc_feature (3)..(631): Homolog of NCBI NO: 21593619 NR Description: receptor protein kinase-like protein [Arabidopsis
  misc_feature (1)..(631): Homolog of NCBI NO: 15237242 NR Description: receptor protein kinase-like protein
  misc_feature (1)..(631): Homolog of NCBI NO: 22329033 NR Description: receptor-like kinase homolog
  misc_feature (77)..(631): Homolog of NCBI NO: 15224077 NR Description: putative LRR receptor protein kinase; protein id:
MKLITMKIFSVLLLLCFFVTCSLSSEPRNPEVEALINIKNELHDPHGVFKNWDEFSVDPCSWTMISCSSDNLVIGLGAPSQSLSGTLSGSIGNLTNLRQVSLQNNNISGKIPPEICSLPKLQTLDLSNNRFSGEIPGSVNQLSNLQYLRLNNNSLSGPFPASLSQIPHLSFLDLSYNNLRGPVPKFPARTFNVAGNPLICKNSLPEICSGSISASPLSVSLRSSSGRRTNILAVALGVSLGFAVSVILSLGFIWYRKKQRRLTMLRISDKQEEGLLGLGNLRSFTFRELHVATDGFSSKSILGAGGFGNVYRGKFGDGTVVAVKRLKDVNGTSGNSQFRTELEMISLAVHRNLLRLIGYCASSSERLLVYPYMSNGSVASRLKAKPALDWNTRKKIAIGAARGLFYLHEQCDPKIIHRDVKAANILLDEYFEAVVGDFGLAKLLNHEDSHVTTAVRGTVGHIAPEYLSTGQSSEKTDVFGFGILLLELITGMRALEFGKSVSQKGAMLEWVRKLHKEMKVEELVDRELGTTYDRIEVGEMLQVALLCTQFLPAHRPKMSEVVQMLEGDGLAERWAASHDHSHFYHANMSYRTITSTDGNNQTKHLFGSSGFEDEDDNQALDSFAMELSGPR

SEQ ID NO: 21001 - protein, 626 aa, Arabidopsis thaliana
  peptide (1)..(626): Ceres Seq. ID no. 12372004
  misc_feature (291)..(486): Pfam Name: Protein kinase domain Pfam Description: Protein kinase domain
  misc_feature (24)..(569): Homolog of NCBI NO: 13897310 NR Description: SERK2 protein [Zea mays]
  misc_feature (147)..(626): Homolog of NCBI NO: 25407653 NR Description: receptor-like kinase homolog [imported] -
  misc_feature (7)..(574): Homolog of NCBI NO: 15219817 NR Description: receptor-like kinase, putative; protein id:
  misc_feature (12)..(626): Homolog of NCBI NO: 9279736 NR Description: receptor-like kinase [Arabidopsis thaliana]
  misc_feature (10)..(626): Homolog of NCBI NO: 22331326 NR Description: somatic embryogenesis receptor-like kinase,
  misc_feature (7)..(626): Homolog of NCBI NO: 11862956 NR Description: putative protein kinase [Oryza sativa (japonica
  misc_feature (1)..(626): Homolog of NCBI NO: 21593619 NR Description: receptor protein kinase-like protein [Arabidopsis
  misc_feature (1)..(626): Homolog of NCBI NO: 15237242 NR Description: receptor protein kinase-like protein
  misc_feature (1)..(626): Homolog of NCBI NO: 22329033 NR Description: receptor-like kinase homolog
  misc_feature (72)..(626): Homolog of NCBI NO: 15224077 NR Description: putative LRR receptor protein kinase; protein id:
MKIFSVLLLLCFFVTCSLSSEPRNPEVEALINIKNELHDPHGVFKNWDEFSVDPCSWTMISCSSDNLVIGLGAPSQSLSGTLSGSIGNLTNLRQVSLQNNNISGKIPPEICSLPKLQTLDLSNNRFSGEIPGSVNQLSNLQYLRLNNNSLSGPFPASLSQIPHLSFLDLSYNNLRGPVPKFPARTFNVAGNPLICKNSLPEICSGSISASPLSVSLRSSSGRRTNILAVALGVSLGFAVSVILSLGFIWYRKKQRRLTMLRISDKQEEGLLGLGNLRSFTFRELHVATDGFSSKSILGAGGFGNVYRGKFGDGTVVAVKRLKDVNGTSGNSQFRTELEMISLAVHRNLLRLIGYCASSSERLLVYPYMSNGSVASRLKAKPALDWNTRKKIAIGAARGLFYLHEQCDPKIIHRDVKAANILLDEYFEAVVGDFGLAKLLNHEDSHVTTAVRGTVGHIAPEYLSTGQSSEKTDVFGFGILLLELITGMRALEFGKSVSQKGAMLEWVRKLHKEMKVEELVDRELGTTYDRIEVGEMLQVALLCTQFLPAHRPKMSEVVQMLEGDGLAERWAASHDHSHFYHANMSYRTITSTDGNNQTKHLFGSSGFEDEDDNQALDSFAMELSGPR

SEQ ID NO: 21002 - DNA, 1155 bp, Arabidopsis thaliana
  misc_feature (1)..(1155): Ceres Seq. ID no. 13504851
  misc_feature: MA Experiment ID: 108585 Result: Down-regulated in Transcription
  misc_feature: MA Experiment 108585 PARAMETER Experiment Name: At_5mM_NaNP_cDNA_P Parameter: Timepoint (hr) Value: 6
  misc_feature: MA Experiment 108585 PARAMETER Experiment Name: At_5mM_NaNP_cDNA_P Parameter: Tissue Value: Aerial
  misc_feature: MA Experiment 108585 PARAMETER Experiment Name: At_5mM_NaNP_cDNA_P Parameter: Treatment Value: null
  misc_feature: MA Experiment ID: 108668 Result: Down-regulated in Transcription
  misc_feature: MA Experiment 108668 PARAMETER Experiment Name: At_2mM_SA_cDNA_P Parameter: Plant Line Value: WS
  misc_feature: MA Experiment 108668 PARAMETER Experiment Name: At_2mM_SA_cDNA_P Parameter: Timepoint (hr) Value: 6
  misc_feature: MA Experiment 108668 PARAMETER Experiment Name: At_2mM_SA_cDNA_P Parameter: Treatment Value: 2mM SA vs. No Treatment
  misc_feature: MA Experiment ID: 20000087 Result: Down-regulated in Transcription
  misc_feature: MA Experiment 20000087 PARAMETER Experiment Name: At_100uM_ABA_Mutants_cDNA_P Parameter: Plant Line Value: WS
  misc_feature: MA Experiment 20000087 PARAMETER Experiment Name: At_100uM_ABA_Mutants_cDNA_P Parameter: Timepoint (hr) Value: 6
  misc_feature: MA Experiment 20000087 PARAMETER Experiment Name: At_100uM_ABA_Mutants_cDNA_P Parameter: Tissue Value: Aerial
  misc_feature: MA Experiment 20000087 PARAMETER Experiment Name: At_100uM_ABA_Mutants_cDNA_P Parameter: Treatment Value: 100uM ABA vs. No Treatment
gttatttcattttcaagctctggacatttgattggtgatgaagctgagggagtgaatttatggcttaagatagtcttcaaagctacatacaaaactatattacaatttcgaagctgcccatggccatggcgttacagattatagcttcttcttcttcatcaccaacgattacaaaatctcaccttttctcttatcctcctctgcaatctcgttataaagcttcgaaacctaacctctcctcatggttttctcttctgggttcttctcgtttctctccttacattggtttaaagcatttgggcatctcaatctcgccgaaatcttcaaacccagagaagaagagaagatgtaagagtatgatgattcgtgcgtctctgtttggtgttggagcacctgaggctttggttattggtgttgttgctttgttagtctttggtcctaaaggtcttgctgaggtagctcggaatcttggaaaaactctgcgtacatttcagccaacgattagagagctacaggatgtttcaagagattttaaaagtacccttgagcgtgaaattggccttgatgatatctcaacgccaaacgtgtacaaccaaaacagaacgaatcctgttcaacctcctcctccaccaccaccaccatcagttcctagcactgaagctcctgtgactgcaaatgatcccaatgattcacaatcaccaaaagcttacacatccgaggattacctcaagttcactgaagagcagctaaaagctttgtctcccgctgaaagccaaacagaggatcaaactcagactcaagaaccgccacaacccacaactgtacaaacacctaccggagaaagccagcccaatggtacagcgagagaaacaacagctgcatctcctccaaggcaagattgaaagcaccaaaatatgacttgtagtgttaaaaagcataagcctctctatactgggaagctgctgagggaatttttttgatctgccaaaaaggacgaagctattagctctcaggacattctcgcaaagctgtatgtgcatcttgataatatgtctgtgtatttatgttacattagattctttcttaatggtaattgagtttattaggtcaaagcttggaaaataatgaaatgagtataaattattggctcttgct

SEQ ID NO: 21003 - protein, 260 aa, Arabidopsis thaliana
  peptide (1)..(260): Ceres Seq. ID no. 13504852
  misc_feature (89)..(196): Pfam Name: mttA/Hcf106 family Pfam Description: mttA/Hcf106 family
  misc_feature (85)..(146): Homolog of NCBI NO: 23129516 NR Description: hypothetical protein [Nostoc punctiforme]
  misc_feature (85)..(175): Homolog of NCBI NO: 33864103 NR Description: mttA/Hcf106 family [Prochlorococcus marinus str.
  misc_feature (85)..(145): Homolog of NCBI NO: 22298928 NR Description: ORF_ID:tsl1385~hypothetical protein
  misc_feature (86)..(169): Homolog of NCBI NO: 37522572 NR Description: hypothetical protein gsr3003 [Gloeobacter
  misc_feature (46)..(70): Homolog of NCBI NO: 8778418 NR Description: F18O14.18 [Arabidopsis thaliana]
  misc_feature (72)..(98): Homolog of NCBI NO: 8778418 NR Description: F18O14.18 [Arabidopsis thaliana]
  misc_feature (16)..(259): Homolog of NCBI NO: 7542514 NR Description: HCF106C precursor protein [Zea mays]
  misc_feature (81)..(260): Homolog of NCBI NO: 7489747 NR Description: HCF106 protein precursor, chloroplast - maize
  misc_feature (46)..(259): Homolog of NCBI NO: 15277532 NR Description: HCF106 [Pisum sativum]
  misc_feature (1)..(260): Homolog of NCBI NO: 15237156 NR Description: HCF106 (gb|AAD32652.1) [Arabidopsis thaliana]
MAMALQIIASSSSSPTITKSHLFSYPPLQSRYKASKPNLSSWFSLLGSSRFSPYIGLKHLGISISPKSSNPEKKRRCKSMMIRASLFGVGAPEALVIGVVALLVFGPKGLAEVARNLGKTLRTFQPTIRELQDVSRDFKSTLEREIGLDDISTPNVYNQNRTNPVQPPPPPPPPSVPSTEAPVTANDPNDSQSPKAYTSEDYLKFTEEQLKALSPAESQTEDQTQTQEPPQPTTVQTPTGESQPNGTARETTAASPPRQD

SEQ ID NO: 21004 - protein, 258 aa, Arabidopsis thaliana
  peptide (1)..(258): Ceres Seq. ID no. 13504853
  misc_feature (87)..(194): Pfam Name: mttA/Hcf106 family Pfam Description: mttA/Hcf106 family
  misc_feature (83)..(144): Homolog of NCBI NO: 23129516 NR Description: hypothetical protein [Nostoc punctiforme]
  misc_feature (83)..(173): Homolog of NCBI NO: 33864103 NR Description: mttA/Hcf106 family [Prochlorococcus marinus str.
  misc_feature (83)..(143): Homolog of NCBI NO: 22298928 NR Description: ORF_ID:tsl1385~hypothetical protein
  misc_feature (84)..(167): Homolog of NCBI NO: 37522572 NR Description: hypothetical protein gsr3003 [Gloeobacter
  misc_feature (44)..(68): Homolog of NCBI NO: 8778418 NR Description: F18O14.18 [Arabidopsis thaliana]
  misc_feature (70)..(96): Homolog of NCBI NO: 8778418 NR Description: F18O14.18 [Arabidopsis thaliana]
  misc_feature (14)..(257): Homolog of NCBI NO: 7542514 NR Description: HCF106C precursor protein [Zea mays]
  misc_feature (79)..(258): Homolog of NCBI NO: 7489747 NR Description: HCF106 protein precursor, chloroplast - maize
  misc_feature (44)..(257): Homolog of NCBI NO: 15277532 NR Description: HCF106 [Pisum sativum]
  misc_feature (1)..(258): Homolog of NCBI NO: 15237156 NR Description: HCF106 (gb|AAD32652.1) [Arabidopsis thaliana]
MALQIIASSSSSPTITKSHLFSYPPLQSRYKASKPNLSSWFSLLGSSRFSPYIGLKHLGISISPKSSNPEKKRRCKSMMIRASLFGVGAPEALVIGVVALLVFGPKGLAEVARNLGKTLRTFQPTIRELQDVSRDFKSTLEREIGLDDISTPNVYNQNRTNPVQPPPPPPPPSVPSTEAPVTANDPNDSQSPKAYTSEDYLKFTEEQLKALSPAESQTEDQTQTQEPPQPTTVQTPTGESQPNGTARETTAASPPRQD

SEQ ID NO: 21005 - protein, 181 aa, Arabidopsis thaliana
  peptide (1)..(181): Ceres Seq. ID no. 13504854
  misc_feature (10)..(117): Pfam Name: mttA/Hcf106 family Pfam Description: mttA/Hcf106 family
  misc_feature (6)..(81): Homolog of NCBI NO: 33864806 NR Description: conserved hypothetical protein [Synechococcus sp.
  misc_feature (6)..(67): Homolog of NCBI NO: 23129516 NR Description: hypothetical protein [Nostoc punctiforme]
  misc_feature (6)..(96): Homolog of NCBI NO: 33864103 NR Description: mttA/Hcf106 family [Prochlorococcus marinus str.
  misc_feature (6)..(66): Homolog of NCBI NO: 22298928 NR Description: ORF_ID:tsl1385~hypothetical protein
  misc_feature (7)..(90): Homolog of NCBI NO: 37522572 NR Description: hypothetical protein gsr3003 [Gloeobacter
  misc_feature (1)..(19): Homolog of NCBI NO: 8778418 NR Description: F18O14.18 [Arabidopsis thaliana]
  misc_feature (1)..(180): Homolog of NCBI NO: 7542514 NR Description: HCF106C precursor protein [Zea mays]
  misc_feature (2)..(181): Homolog of NCBI NO: 7489747 NR Description: HCF106 protein precursor, chloroplast - maize
  misc_feature (1)..(180): Homolog of NCBI NO: 15277532 NR Description: HCF106 [Pisum sativum]
  misc_feature (1)..(181): Homolog of NCBI NO: 15237156 NR Description: HCF106 (gb|AAD32652.1) [Arabidopsis thaliana]
MMIRASLFGVGAPEALVIGVVALLVFGPKGLAEVARNLGKTLRTFQPTIRELQDVSRDFKSTLEREIGLDDISTPNVYNQNRTNPVQPPPPPPPPSVPSTEAPVTANDPNDSQSPKAYTSEDYLKFTEEQLKALSPAESQTEDQTQTQEPPQPTTVQTPTGESQPNGTARETTAASPPRQD

SEQ ID NO: 21006 - DNA, 799 bp, Arabidopsis thaliana
  misc_feature (1)..(799): Ceres Seq. ID no. 13580467
  misc_feature: MA Experiment ID: 108434 Result: Up-regulated in Transcription
  misc_feature: MA Experiment 108434 PARAMETER Experiment Name: At_Root_Tips_cDNA_P Parameter: Tissue Value: Root Tips
  misc_feature: MA Experiment ID: 108462 Result: Down-regulated in Transcription
  misc_feature: MA Experiment 108462 PARAMETER Experiment Name: At_Germinating_Seeds_cDNA_P Parameter: Age (day) Value: 2 vs. 0
  misc_feature: MA Experiment 108462 PARAMETER Experiment Name: At_Germinating_Seeds_cDNA_P Parameter: Tissue Value: Germinating Seeds
  misc_feature: MA Experiment ID: 108463 Result: Down-regulated in Transcription
  misc_feature: MA Experiment 108463 PARAMETER Experiment Name: At_Germinating_Seeds_cDNA_P Parameter: Age (day) Value: 3 vs. 0
  misc_feature: MA Experiment 108463 PARAMETER Experiment Name: At_Germinating_Seeds_cDNA_P Parameter: Tissue Value: Germinating Seeds
  misc_feature: MA Experiment ID: 108464 Result: Down-regulated in Transcription
  misc_feature: MA Experiment 108464 PARAMETER Experiment Name: At_Germinating_Seeds_cDNA_P Parameter: Age (day) Value: 4 vs. 0
  misc_feature: MA Experiment 108464 PARAMETER Experiment Name: At_Germinating_Seeds_cDNA_P Parameter: Tissue Value: Germinating Seeds
  misc_feature: MA Experiment ID: 108488 Result: Up-regulated in Transcription
  misc_feature: MA Experiment ID: 20000224 Result: Down-regulated in Transcription
  misc_feature: MA Experiment ID: 20001807 Result: Up-regulated in Transcription
  misc_feature: MA Experiment 20001807 PARAMETER Experiment Name: At_50mM_NH4NO3_L-to-H_Sub_P Parameter: Timepoint (hr) Value: 6
  misc_feature: MA Experiment 20001807 PARAMETER Experiment Name: At_50mM_NH4NO3_L-to-H_Sub_P Parameter: Tissue Value: Leaf
  misc_feature: MA Experiment 20001807 PARAMETER Experiment Name: At_50mM_NH4NO3_L-to-H_Sub_P Parameter: Treatment Value: 50mM NH4NO3 vs 100mM Mannitol
gatcttttcgaagagcggaagctaaggagaggcgaattcgaatcgagaagatggtgtctggctcagggatatgttcaaagcgtgtcgttgttgacgcacgtcaccatatgtgtggtcgtcttgcttcgatcatagctaaagagttgctcaatggatagagtgttgtccgatgtgaggagatttgtttgtctggtggtttggttcgtcagaagatgaagtacatgaggtttcttaggaaacgcatgaacactaaaccttctcatggtcctattcatttccgtgctccgtctaagatcttctggcgtaccgttcgtgggatgattccacacaagaccaagcgtggtgctgctgctcttgcacgtttgaaggtgtttgagggagtaccacctccttatgacaaggtcaagagaatggtcattcctgatgctctcaaggtgttgaggcttcaggctggtcacaagtactgcttgttgggacgtttgtcttctgaagttgtctggaaccattacgataccatcaaggagcttgaggtgaagagaaaggagaggtcacaagctttgtatgagcgtaagaagcaactcaccaagctcagggcaaaggccgagaaggttgcagaggagaaacttggatcccagctcgatgttcttgcatcgatcaagtactgaagaaaatcagcatctatcttttggtttaactcttgttttggtttttatctattcagattttgttttcttccttgtatcactgttgaagtttatcacctcatttcagttttatttatcagttgatacttcaatcc

SEQ ID NO: 21007 - protein, 150 aa, Arabidopsis thaliana
  peptide (1)..(150): Ceres Seq. ID no. 13580468
  misc_feature (1)..(71): Pfam Name: Ribosomal protein L13 Pfam Description: Ribosomal protein L13
  misc_feature (1)..(103): Homolog of NCBI NO: 34899414 NR Description: putative 60S ribosomal protein
  misc_feature (1)..(150): Homolog of NCBI NO: 3914535 NR Description: 60S RIBOSOMAL PROTEIN L13A
  misc_feature (1)..(150): Homolog of NCBI NO: 37718812 NR Description: putative ribosomal protein L13a
  misc_feature (1)..(150): Homolog of NCBI NO: 33146452 NR Description: putative 60S ribosomal protein
  misc_feature (1)..(150): Homolog of NCBI NO: 21326116 NR Description: putative 60S ribosomal protein [Sorghum bicolor]
  misc_feature (1)..(150): Homolog of NCBI NO: 15239698 NR Description: 60S ribosomal protein L13A (RPL13aD) [Arabidopsis
  misc_feature (1)..(150): Homolog of NCBI NO: 15235617 NR Description: 60S ribosomal protein L13A (RPL13aC) [Arabidopsis
  misc_feature (1)..(150): Homolog of NCBI NO: 15231394 NR Description: 60S ribosomal protein L13A (RPL13aA) [Arabidopsis
  misc_feature (1)..(150): Homolog of NCBI NO: 19423912 NR Description: putative 60S ribosomal protein [Arabidopsis
  misc_feature (1)..(150): Homolog of NCBI NO: 15230197 NR Description: 60S ribosomal protein L13A (RPL13aB) [Arabidopsis
MKYMRFLRKRMNTKPSHGPIHFRAPSKIFWRTVRGMIPHKTKRGAAALARLKVFEGVPPPYDKVKRMVIPDALKVLRLQAGHKYCLLGRLSSEVVWNHYDTIKELEVKRKERSQALYERKKQLTKLRAKAEKVAEEKLGSQLDVLASIKY

SEQ ID NO: 21008 - protein, 147 aa, Arabidopsis thaliana
  peptide (1)..(147): Ceres Seq. ID no. 13580469
  misc_feature (1)..(68): Pfam Name: Ribosomal protein L13 Pfam Description: Ribosomal protein L13
  misc_feature (1)..(100): Homolog of NCBI NO: 34899414 NR Description: putative 60S ribosomal protein
  misc_feature (1)..(147): Homolog of NCBI NO: 3914535 NR Description: 60S RIBOSOMAL PROTEIN L13A
  misc_feature (1)..(147): Homolog of NCBI NO: 37718812 NR Description: putative ribosomal protein L13a
  misc_feature (1)..(147): Homolog of NCBI NO: 33146452 NR Description: putative 60S ribosomal protein
  misc_feature (1)..(147): Homolog of NCBI NO: 21326116 NR Description: putative 60S ribosomal protein [Sorghum bicolor]
  misc_feature (1)..(147): Homolog of NCBI NO: 15239698 NR Description: 60S ribosomal protein L13A (RPL13aD) [Arabidopsis
  misc_feature (1)..(147): Homolog of NCBI NO: 15235617 NR Description: 60S ribosomal protein L13A (RPL13aC) [Arabidopsis
  misc_feature (1)..(147): Homolog of NCBI NO: 15231394 NR Description: 60S ribosomal protein L13A (RPL13aA) [Arabidopsis
  misc_feature (1)..(147): Homolog of NCBI NO: 19423912 NR Description: putative 60S ribosomal protein [Arabidopsis
  misc_feature (1)..(147): Homolog of NCBI NO: 15230197 NR Description: 60S ribosomal protein L13A (RPL13aB) [Arabidopsis
MRFLRKRMNTKPSHGPIHFRAPSKIFWRTVRGMIPHKTKRGAAALARLKVFEGVPPPYDKVKRMVIPDALKVLRLQAGHKYCLLGRLSSEVVWNHYDTIKELEVKRKERSQALYERKKQLTKLRAKAEKVAEEKLGSQLDVLASIKY

SEQ ID NO: 21009 - protein, 140 aa, Arabidopsis thaliana
  peptide (1)..(140): Ceres Seq. ID no. 13580470
  misc_feature (1)..(61): Pfam Name: Ribosomal protein L13 Pfam Description: Ribosomal protein L13
  misc_feature (1)..(140): Homolog of NCBI NO: 15235617 NR Description: 60S ribosomal protein L13A (RPL13aC) [Arabidopsis
  misc_feature (1)..(140): Homolog of NCBI NO: 15231394 NR Description: 60S ribosomal protein L13A (RPL13aA) [Arabidopsis
  misc_feature (1)..(93): Homolog of NCBI NO: 34899414 NR Description: putative 60S ribosomal protein
  misc_feature (1)..(140): Homolog of NCBI NO: 37718812 NR Description: putative ribosomal protein L13a
  misc_feature (1)..(140): Homolog of NCBI NO: 21326116 NR Description: putative 60S ribosomal protein [Sorghum bicolor]
  misc_feature (1)..(140): Homolog of NCBI NO: 15239698 NR Description: 60S ribosomal protein L13A (RPL13aD) [Arabidopsis
  misc_feature (1)..(140): Homolog of NCBI NO: 33146452 NR Description: putative 60S ribosomal protein
  misc_feature (1)..(140): Homolog of NCBI NO: 3914535 NR Description: 60S RIBOSOMAL PROTEIN L13A
  misc_feature (1)..(140): Homolog of NCBI NO: 19423912 NR Description: putative 60S ribosomal protein [Arabidopsis
  misc_feature (1)..(140): Homolog of NCBI NO: 15230197 NR Description: 60S ribosomal protein L13A (RPL13aB) [Arabidopsis
MNTKPSHGPIHFRAPSKIFWRTVRGMIPHKTKRGAAALARLKVFEGVPPPYDKVKRMVIPDALKVLRLQAGHKYCLLGRLSSEVVWNHYDTIKELEVKRKERSQALYERKKQLTKLRAKAEKVAEEKLGSQLDVLASIKY

SEQ ID NO: 21010 - DNA, 974 bp, Arabidopsis thaliana
  misc_feature (1)..(974): Ceres Seq. ID no. 12333995
  misc_feature: MA Experiment ID: 108461 Result: Down-regulated in Transcription
  misc_feature: MA Experiment 108461 PARAMETER Experiment Name: At_Germinating_Seeds_cDNA_P Parameter: Age (day) Value: 1 vs. 0
  misc_feature: MA Experiment 108461 PARAMETER Experiment Name: At_Germinating_Seeds_cDNA_P Parameter: Tissue Value: Germinating Seeds
  misc_feature: MA Experiment ID: 108462 Result: Down-regulated in Transcription
  misc_feature: MA Experiment 108462 PARAMETER Experiment Name: At_Germinating_Seeds_cDNA_P Parameter: Age (day) Value: 2 vs. 0
  misc_feature: MA Experiment 108462 PARAMETER Experiment Name: At_Germinating_Seeds_cDNA_P Parameter: Tissue Value: Germinating Seeds
  misc_feature: MA Experiment ID: 108463 Result: Down-regulated in Transcription
  misc_feature: MA Experiment 108463 PARAMETER Experiment Name: At_Germinating_Seeds_cDNA_P Parameter: Age (day) Value: 3 vs. 0
  misc_feature: MA Experiment 108463 PARAMETER Experiment Name: At_Germinating_Seeds_cDNA_P Parameter: Tissue Value: Germinating Seeds
  misc_feature: MA Experiment ID: 108464 Result: Down-regulated in Transcription
  misc_feature: MA Experiment 108464 PARAMETER Experiment Name: At_Germinating_Seeds_cDNA_P Parameter: Age (day) Value: 4 vs. 0
  misc_feature: MA Experiment 108464 PARAMETER Experiment Name: At_Germinating_Seeds_cDNA_P Parameter: Tissue Value: Germinating Seeds
  misc_feature: MA Experiment ID: 108488 Result: Down-regulated in Transcription
  misc_feature: MA Experiment ID: 20000070 Result: Up-regulated in Transcription
  misc_feature: MA Experiment 20000070 PARAMETER Experiment Name: At_100uM_ABA_Mutants_cDNA_P Parameter: Plant Line Value: CS24
  misc_feature: MA Experiment 20000070 PARAMETER Experiment Name: At_100uM_ABA_Mutants_cDNA_P Parameter: Timepoint (hr) Value: 6
  misc_feature: MA Experiment 20000070 PARAMETER Experiment Name: At_100uM_ABA_Mutants_cDNA_P Parameter: Tissue Value: Aerial
  misc_feature: MA Experiment 20000070 PARAMETER Experiment Name: At_100uM_ABA_Mutants_cDNA_P Parameter: Treatment Value: 100uM ABA vs. No Treatment
  misc_feature: MA Experiment ID: 20000179 Result: Down-regulated in Transcription
  misc_feature: MA Experiment 20000179 PARAMETER Experiment Name: At_Germinating_Seeds_P Parameter: Age (hr) Value: 6 vs. 0
  misc_feature: MA Experiment 20000179 PARAMETER Experiment Name: At_Germinating_Seeds_P Parameter: Tissue Value: Germinating Seeds
  misc_feature: MA Experiment ID: 20000180 Result: Down-regulated in Transcription
  misc_feature: MA Experiment 20000180 PARAMETER Experiment Name: At_Germinating_Seeds_P Parameter: Age (hr) Value: 24 vs. 0
  misc_feature: MA Experiment 20000180 PARAMETER Experiment Name: At_Germinating_Seeds_P Parameter: Tissue Value: Germinating Seeds
  misc_feature: MA Experiment ID: 20000224 Result: Down-regulated in Transcription
  misc_feature: MA Experiment ID: 20000527 Result: Down-regulated in Transcription
  misc_feature: MA Experiment 20000527 PARAMETER Experiment Name: At_10percent_PEG_P Parameter: Age (day) Value: 20
  misc_feature: MA Experiment 20000527 PARAMETER Experiment Name: At_10percent_PEG_P Parameter: Organism Value: A. thaliana
  misc_feature: MA Experiment 20000527 PARAMETER Experiment Name: At_10percent_PEG_P Parameter: Plant Line Value: WS
  misc_feature: MA Experiment 20000527 PARAMETER Experiment Name: At_10percent_PEG_P Parameter: Timepoint (day) Value: 20
  misc_feature: MA Experiment 20000527 PARAMETER Experiment Name: At_10percent_PEG_P Parameter: Tissue Value: Whole Plant
  misc_feature: MA Experiment 20000527 PARAMETER Experiment Name: At_10percent_PEG_P Parameter: Treatment Value: 10percent PEG vs. No Treatment
aattaaataaaagctgttgtttgttgccgaagaaaaagcgagaaaactaggaaaataaaatttgaggaagaagaagccattagaggagtctcaaggtaaagatttctacacgcaactttatgtcttctctgtatgttctttatcctgtagaagagctatcagacgattaaagccctacgatacgagatcaatcgatcaccatcattcaatggaggaatcggtggcttcatcttcctcgcactatatctcaattttcacaaattaccctctgatttccgccgttttagctttcaccatcgcacaattcatcaaattcttcacctcctggtataaagaaaggagatgggatttgaaacggcttgttgggtctggaggtatgccttcatcacattcagcaacggttacagctttagctttagctgttggtttacaagaaggttttggtggttcacatttcgctatcgctttggttctcactaccattgttatgtatgatgcaactggtgtaaggttacatgctggacgccaagctgaggttctaaatcagattgtgtatgaacttcctgcagagcatcctctggctgaaaccagacctttgcgtgaacttctaggtcatactcctccccaggttattgctggtggaatgcttggaatatctacagcagttgttgggtacttagtcatcttgttagccaagtagcttaagctgggaacagcaaaatctcgccttttctgctccattgtgtgtcaaggcgctgctaggtagtttaaaaatagccatgacatgcaaatagaatttggaaattgagcttaatttctctgttttttttgctgctctgttcttgtcattgacaatatattttagttaggtttgctctagtaaaggaaacttgaaacgtcattacacagatctgtaaagtggtaaaatgggagcttgtgcattgaactacaacgaacatgatctgtttagattc

SEQ ID NO: 21011 - protein, 163 aa, Arabidopsis thaliana
  peptide (1)..(163): Ceres Seq. ID no. 12333996
  misc_feature (13)..(157): Pfam Name: Divergent PAP2 family Pfam Description: Divergent PAP2 family
  misc_feature (7)..(141): Homolog of NCBI NO: 11994397 NR Description: gb|AAB61516.1~gene_id:MIL23.18~similar to unknown
  misc_feature (18)..(159): Homolog of NCBI NO: 38344227 NR Description: OJ991113_30.3 [Oryza sativa (japonica
  misc_feature (7)..(158): Homolog of NCBI NO: 30686309 NR Description: expressed protein [Arabidopsis thaliana]
  misc_feature (1)..(141): Homolog of NCBI NO: 26449729 NR Description: unknown protein [Arabidopsis thaliana]
  misc_feature (1)..(141): Homolog of NCBI NO: 9743358 NR Description: F21J9.1 [Arabidopsis thaliana]
  misc_feature (1)..(162): Homolog of NCBI NO: 7486375 NR Description: hypothetical protein F3I6.29 - Arabidopsis
  misc_feature (1)..(162): Homolog of NCBI NO: 18395459 NR Description: expressed protein
  misc_feature (1)..(162): Homolog of NCBI NO: 21555270 NR Description: unknown [Arabidopsis thaliana]
  misc_feature (1)..(141): Homolog of NCBI NO: 12324675 NR Description: unknown protein [Arabidopsis thaliana]
  misc_feature (1)..(163): Homolog of NCBI NO: 15220480 NR Description: F12A21.27; protein id: At1g67600.1, supported by
MEESVASSSSHYISIFTNYPLISAVLAFTIAQFIKFFTSWYKERRWDLKRLVGSGGMPSSHSATVTALALAVGLQEGFGGSHFAIALVLTTIVMYDATGVRLHAGRQAEVLNQIVYELPAEHPLAETRPLRELLGHTPPQVIAGGMLGISTAVVGYLVILLAK

SEQ ID NO: 21012 - protein, 107 aa, Arabidopsis thaliana
  peptide (1)..(107): Ceres Seq. ID no. 12333997
  misc_feature (1)..(101): Pfam Name: Divergent PAP2 family Pfam Description: Divergent PAP2 family
  misc_feature (1)..(85): Homolog of NCBI NO: 11994397 NR Description: gb|AAB61516.1~gene_id:MIL23.18~similar to unknown
  misc_feature (1)..(103): Homolog of NCBI NO: 38344227 NR Description: OJ991113_30.3 [Oryza sativa (japonica
  misc_feature (1)..(102): Homolog of NCBI NO: 30686309 NR Description: expressed protein [Arabidopsis thaliana]
  misc_feature (1)..(85): Homolog of NCBI NO: 26449729 NR Description: unknown protein [Arabidopsis thaliana]
  misc_feature (1)..(85): Homolog of NCBI NO: 9743358 NR Description: F21J9.1 [Arabidopsis thaliana]
  misc_feature (1)..(106): Homolog of NCBI NO: 7486375 NR Description: hypothetical protein F3I6.29 - Arabidopsis
  misc_feature (1)..(106): Homolog of NCBI NO: 18395459 NR Description: expressed protein
  misc_feature (1)..(106): Homolog of NCBI NO: 21555270 NR Description: unknown [Arabidopsis thaliana]
  misc_feature (1)..(85): Homolog of NCBI NO: 12324675 NR Description: unknown protein [Arabidopsis thaliana]
  misc_feature (1)..(107): Homolog of NCBI NO: 15220480 NR Description: F12A21.27; protein id: At1g67600.1, supported by
MPSSHSATVTALALAVGLQEGFGGSHFAIALVLTTIVMYDATGVRLHAGRQAEVLNQIVYELPAEHPLAETRPLRELLGHTPPQVIAGGMLGISTAVVGYLVILLAK

SEQ ID NO: 21013 - DNA, 968 bp, Arabidopsis thaliana
  misc_feature (1)..(968): Ceres Seq. ID no. 13490353
  misc_feature: MA Experiment ID: 108595 Result: Down-regulated in Transcription
  misc_feature: MA Experiment 108595 PARAMETER Experiment Name: At_Ler-pi_Ovule_cDNA_P Parameter: Plant Line Value: null
  misc_feature: MA Experiment ID: 20000439 Result: Down-regulated in Transcription
  misc_feature: MA Experiment 20000439 PARAMETER Experiment Name: At_Roots__P Parameter: Age (day) Value: 14 vs. 21
  misc_feature: MA Experiment 20000439 PARAMETER Experiment Name: At_Roots__P Parameter: Organism Value: A. thaliana
  misc_feature: MA Experiment 20000439 PARAMETER Experiment Name: At_Roots__P Parameter: Tissue Value: Roots vs. Whole Plant
  misc_feature: MA Experiment ID: 20001905 Result: Down-regulated in Transcription
  misc_feature: MA Experiment 20001905 PARAMETER Experiment Name: At_Drought_Reproduction_P Parameter: Age (day) Value: 40
  misc_feature: MA Experiment 20001905 PARAMETER Experiment Name: At_Drought_Reproduction_P Parameter: Organism Value: A. thaliana
  misc_feature: MA Experiment 20001905 PARAMETER Experiment Name: At_Drought_Reproduction_P Parameter: Plant Line Value: WS
  misc_feature: MA Experiment 20001905 PARAMETER Experiment Name: At_Drought_Reproduction_P Parameter: Timepoint (day) Value: 10
  misc_feature: MA Experiment 20001905 PARAMETER Experiment Name: At_Drought_Reproduction_P Parameter: Tissue Value: Rosettes
  misc_feature: MA Experiment 20001905 PARAMETER Experiment Name: At_Drought_Reproduction_P Parameter: Treatment Value: Drought vs. No Drought
  misc_feature: MA Experiment ID: 20001911 Result: Down-regulated in Transcription
  misc_feature: MA Experiment 20001911 PARAMETER Experiment Name: At_Drought_Reproduction_P Parameter: Age (day) Value: 40
  misc_feature: MA Experiment 20001911 PARAMETER Experiment Name: At_Drought_Reproduction_P Parameter: Organism Value: A. thaliana
  misc_feature: MA Experiment 20001911 PARAMETER Experiment Name: At_Drought_Reproduction_P Parameter: Plant Line Value: WS
  misc_feature: MA Experiment 20001911 PARAMETER Experiment Name: At_Drought_Reproduction_P Parameter: Timepoint (day) Value: 10
  misc_feature: MA Experiment 20001911 PARAMETER Experiment Name: At_Drought_Reproduction_P Parameter: Tissue Value: Flowers
  misc_feature: MA Experiment 20001911 PARAMETER Experiment Name: At_Drought_Reproduction_P Parameter: Treatment Value: Drought vs. No Drought
aaagcccgaccaaaagcttttgattcctcaagagtgaaaatggcgtcgtacacagtctcctttatccctttgacgctctctaatcctcggatctttgtttcgagacagaatggatctccctcgtcttcttctcggattcctctaacgtcttctctgttaggtaagaagcttctggcgacacaaccgtcgcatcgctgcttcgtccccaagctccggtgcttgacctcggccagcacggtcttaaacgtccctattgcgcaaccggagaatggttcttcggataagatcccaaaatggtcggcgagagctataaagtcacttgcaatgggagaattggaggctaggaagctcaagtatccaagtaccgggaccgaagccattctcatgggtattttagtcgaaggcactagcacagttgctaagttcctgagggggaatggagtcacacttttcaaggttcgagatgagacgttaagcctgctggggaaatcagacatgtactttttcagcccagagcatcctcctctaactgagccggctcaaaaggccattgcctgggccattgatgagaagaataaatctgatgtggatggggaactaaccacggcctacttgcttctgggggtttggtctcaaaaggattcagcaggccgccagattttggagaagctcgggtttaacgaagataaagccaaagaagttgagaaatcgatgaatgaagatgtagatttgagcttcaagaaacaaggtcaatagtgatgaggtttatatcgattagaaaagcttctgtaattgttatggagtagcaaaagcaactcttgattaaagactcggccaaagaccccactttcattagtattcactttccatacttgtttgtggttagtgtcatttagcttttccgcattatcacaatatacaactctggcaaatgattcagtgctttggttctccgataggtttttgtt

SEQ ID NO: 21014 - protein, 251 aa, Arabidopsis thaliana
  peptide (1)..(251): Ceres Seq. ID no. 13490354
  misc_feature (187)..(239): Pfam Name: Clp amino terminal domain Pfam Description: Clp amino terminal domain
  misc_feature (98)..(245): Homolog of NCBI NO: 22297851 NR Description: ATP-dependent Clp protease regulatory subunit
  misc_feature (91)..(245): Homolog of NCBI NO: 7428213 NR Description: endopeptidase Clp ATP-binding chain C -
  misc_feature (98)..(245): Homolog of NCBI NO: 11465497 NR Description: Clp protease ATP binding subunit [Cyanidium
  misc_feature (90)..(245): Homolog of NCBI NO: 17230491 NR Description: endopeptidase Clp ATP-binding chain [Nostoc sp.
  misc_feature (98)..(240): Homolog of NCBI NO: 23039549 NR Description: hypothetical protein [Trichodesmium erythraeum
  misc_feature (43)..(236): Homolog of NCBI NO: 7485569 NR Description: hypothetical protein F16J13.130 - Arabidopsis
  misc_feature (43)..(240): Homolog of NCBI NO: 21592785 NR Description: unknown [Arabidopsis thaliana]
  misc_feature (43)..(240): Homolog of NCBI NO: 18413740 NR Description: expressed protein [Arabidopsis thaliana]
  misc_feature (14)..(239): Homolog of NCBI NO: 7487579 NR Description: hypothetical protein T30C3.40 - Arabidopsis
  misc_feature (14)..(251): Homolog of NCBI NO: 18416540 NR Description: expressed protein [Arabidopsis thaliana]
KARPKAFDSSRVKMASYTVSFIPLTLSNPRIFVSRQNGSPSSSSRIPLTSSLLGKKLLATQPSHRCFVPKLRCLTSASTVLNVPIAQPENGSSDKIPKWSARAIKSLAMGELEARKLKYPSTGTEAILMGILVEGTSTVAKFLRGNGVTLFKVRDETLSLLGKSDMYFFSPEHPPLTEPAQKAIAWAIDEKNKSDVDGELTTAYLLLGVWSQKDSAGRQILEKLGFNEDKAKEVEKSMNEDVDLSFKKQGQ

SEQ ID NO: 21015 - protein, 238 aa, Arabidopsis thaliana
  peptide (1)..(238): Ceres Seq. ID no. 13490355
  misc_feature (174)..(226): Pfam Name: Clp amino terminal domain Pfam Description: Clp amino terminal domain
  misc_feature (85)..(232): Homolog of NCBI NO: 22297851 NR Description: ATP-dependent Clp protease regulatory subunit
  misc_feature (78)..(232): Homolog of NCBI NO: 7428213 NR Description: endopeptidase Clp ATP-binding chain C -
  misc_feature (85)..(232): Homolog of NCBI NO: 11465497 NR Description: Clp protease ATP binding subunit [Cyanidium
  misc_feature (77)..(232): Homolog of NCBI NO: 17230491 NR Description: endopeptidase Clp ATP-binding chain [Nostoc sp.
  misc_feature (85)..(227): Homolog of NCBI NO: 23039549 NR Description: hypothetical protein [Trichodesmium erythraeum
  misc_feature (30)..(223): Homolog of NCBI NO: 7485569 NR Description: hypothetical protein F16J13.130 - Arabidopsis
  misc_feature (30)..(227): Homolog of NCBI NO: 21592785 NR Description: unknown [Arabidopsis thaliana]
  misc_feature (30)..(227): Homolog of NCBI NO: 18413740 NR Description: expressed protein [Arabidopsis thaliana]
  misc_feature (1)..(226): Homolog of NCBI NO: 7487579 NR Description: hypothetical protein T30C3.40 - Arabidopsis
  misc_feature (1)..(238): Homolog of NCBI NO: 18416540 NR Description: expressed protein [Arabidopsis thaliana]
MASYTVSFIPLTLSNPRIFVSRQNGSPSSSSRIPLTSSLLGKKLLATQPSHRCFVPKLRCLTSASTVLNVPIAQPENGSSDKIPKWSARAIKSLAMGELEARKLKYPSTGTEAILMGILVEGTSTVAKFLRGNGVTLFKVRDETLSLLGKSDMYFFSPEHPPLTEPAQKAIAWAIDEKNKSDVDGELTTAYLLLGVWSQKDSAGRQILEKLGFNEDKAKEVEKSMNEDVDLSFKKQGQ

SEQ ID NO: 21016 - protein, 143 aa, Arabidopsis thaliana
  peptide (1)..(143): Ceres Seq. ID no. 13490356
  misc_feature (79)..(131): Pfam Name: Clp amino terminal domain Pfam Description: Clp amino terminal domain
  misc_feature (1)..(137): Homolog of NCBI NO: 22297851 NR Description: ATP-dependent Clp protease regulatory subunit
  misc_feature (1)..(137): Homolog of NCBI NO: 7428213 NR Description: endopeptidase Clp ATP-binding chain C -
  misc_feature (1)..(137): Homolog of NCBI NO: 11465497 NR Description: Clp protease ATP binding subunit [Cyanidium
  misc_feature (1)..(137): Homolog of NCBI NO: 17230491 NR Description: endopeptidase Clp ATP-binding chain [Nostoc sp.
  misc_feature (1)..(132): Homolog of NCBI NO: 23039549 NR Description: hypothetical protein [Trichodesmium erythraeum
  misc_feature (1)..(128): Homolog of NCBI NO: 7485569 NR Description: hypothetical protein F16J13.130 - Arabidopsis
  misc_feature (1)..(132): Homolog of NCBI NO: 21592785 NR Description: unknown [Arabidopsis thaliana]
  misc_feature (1)..(132): Homolog of NCBI NO: 18413740 NR Description: expressed protein [Arabidopsis thaliana]
  misc_feature (1)..(131): Homolog of NCBI NO: 7487579 NR Description: hypothetical protein T30C3.40 - Arabidopsis
  misc_feature (1)..(143): Homolog of NCBI NO: 18416540 NR Description: expressed protein [Arabidopsis thaliana]
MGELEARKLKYPSTGTEAILMGILVEGTSTVAKFLRGNGVTLFKVRDETLSLLGKSDMYFFSPEHPPLTEPAQKAIAWAIDEKNKSDVDGELTTAYLLLGVWSQKDSAGRQILEKLGFNEDKAKEVEKSMNEDVDLSFKKQGQ

SEQ ID NO: 21017 - DNA, 878 bp, Arabidopsis thaliana
  misc_feature (1)..(878): Ceres Seq. ID no. 13489013
  misc_feature: MA Experiment ID: 108435 Result: Up-regulated in Transcription
  misc_feature: MA Experiment 108435 PARAMETER Experiment Name: At_stm_Mutants_cDNA_P Parameter: Plant Line Value: wt Landsburg vs stm
  misc_feature: MA Experiment 108435 PARAMETER Experiment Name: At_stm_Mutants_cDNA_P Parameter: Tissue Value: Shoot Apical Meristem Region
  misc_feature: MA Experiment ID: 108473 Result: Down-regulated in Transcription
  misc_feature: MA Experiment 108473 PARAMETER Experiment Name: At_Drought_Flowers_cDNA_P Parameter: Timepoint (hr) Value: 7 d
  misc_feature: MA Experiment 108473 PARAMETER Experiment Name: At_Drought_Flowers_cDNA_P Parameter: Tissue Value: Flower
  misc_feature: MA Experiment 108473 PARAMETER Experiment Name: At_Drought_Flowers_cDNA_P Parameter: Treatment Value: Drought vs. No Drought
  misc_feature: MA Experiment ID: 108501 Result: Up-regulated in Transcription
  misc_feature: MA Experiment 108501 PARAMETER Experiment Name: At_ap2_floral_buds_cDNA_P Parameter: Plant Line Value: ap2 (Ler.)
  misc_feature: MA Experiment 108501 PARAMETER Experiment Name: At_ap2_floral_buds_cDNA_P Parameter: Tissue Value: Closed Flower
  misc_feature: MA Experiment ID: 108561 Result: Down-regulated in Transcription
  misc_feature: MA Experiment 108561 PARAMETER Experiment Name: At_100uM_ABA_cDNA_P Parameter: Timepoint (hr) Value: 6
  misc_feature: MA Experiment 108561 PARAMETER Experiment Name: At_100uM_ABA_cDNA_P Parameter: Tissue Value: Aerial
  misc_feature: MA Experiment 108561 PARAMETER Experiment Name: At_100uM_ABA_cDNA_P Parameter: Treatment Value: 100uM ABA vs. No Treatment
  misc_feature: MA Experiment ID: 108595 Result: Up-regulated in Transcription
  misc_feature: MA Experiment 108595 PARAMETER Experiment Name: At_Ler-pi_Ovule_cDNA_P Parameter: Plant Line Value: null
  misc_feature: MA Experiment ID: 20000069 Result: Down-regulated in Transcription
  misc_feature: MA Experiment 20000069 PARAMETER Experiment Name: At_100uM_ABA_Mutants_cDNA_P Parameter: Plant Line Value: CS23
  misc_feature: MA Experiment 20000069 PARAMETER Experiment Name: At_100uM_ABA_Mutants_cDNA_P Parameter: Timepoint (hr) Value: 6
  misc_feature: MA Experiment 20000069 PARAMETER Experiment Name: At_100uM_ABA_Mutants_cDNA_P Parameter: Tissue Value: Aerial
  misc_feature: MA Experiment 20000069 PARAMETER Experiment Name: At_100uM_ABA_Mutants_cDNA_P Parameter: Treatment Value: 100uM ABA vs. No Treatment
  misc_feature: MA Experiment ID: 20000071 Result: Down-regulated in Transcription
  misc_feature: MA Experiment 20000071 PARAMETER Experiment Name: At_100uM_ABA_Mutants_cDNA_P Parameter: Plant Line Value: CS8104
  misc_feature: MA Experiment 20000071 PARAMETER Experiment Name: At_100uM_ABA_Mutants_cDNA_P Parameter: Timepoint (hr) Value: 6
  misc_feature: MA Experiment 20000071 PARAMETER Experiment Name: At_100uM_ABA_Mutants_cDNA_P Parameter: Tissue Value: Aerial
  misc_feature: MA Experiment 20000071 PARAMETER Experiment Name: At_100uM_ABA_Mutants_cDNA_P Parameter: Treatment Value: 100uM ABA vs. No Treatment
  misc_feature: MA Experiment ID: 20000089 Result: Down-regulated in Transcription
  misc_feature: MA Experiment ID: 20000093 Result: Down-regulated in Transcription
  misc_feature: MA Experiment 20000093 PARAMETER Experiment Name: At_42deg_Heat_cDNA_P Parameter: Temperature (deg C) Value: 42 vs. 22
  misc_feature: MA Experiment 20000093 PARAMETER Experiment Name: At_42deg_Heat_cDNA_P Parameter: Timepoint (hr) Value: 0.5
  misc_feature: MA Experiment 20000093 PARAMETER Experiment Name: At_42deg_Heat_cDNA_P Parameter: Tissue Value: Aerial
  misc_feature: MA Experiment ID: 20000112 Result: Down-regulated in Transcription
  misc_feature: MA Experiment 20000112 PARAMETER Experiment Name: At_42deg_Heat_cDNA_P Parameter: Temperature (deg C) Value: 42 vs. 22
  misc_feature: MA Experiment 20000112 PARAMETER Experiment Name: At_42deg_Heat_cDNA_P Parameter: Timepoint (hr) Value: 2
  misc_feature: MA Experiment 20000112 PARAMETER Experiment Name: At_42deg_Heat_cDNA_P Parameter: Tissue Value: Aerial
  misc_feature: MA Experiment ID: 20000117 Result: Down-regulated in Transcription
  misc_feature: MA Experiment 20000117 PARAMETER Experiment Name: At_100uM_ABA_Mutants_cDNA_P Parameter: Plant Line Value: Columbia
  misc_feature: MA Experiment 20000117 PARAMETER Experiment Name: At_100uM_ABA_Mutants_cDNA_P Parameter: Timepoint (hr) Value: 6
  misc_feature: MA Experiment 20000117 PARAMETER Experiment Name: At_100uM_ABA_Mutants_cDNA_P Parameter: Tissue Value: Aerial
  misc_feature: MA Experiment 20000117 PARAMETER Experiment Name: At_100uM_ABA_Mutants_cDNA_P Parameter: Treatment Value: 100uM ABA vs. No Treatment
  misc_feature: MA Experiment ID: 20000144 Result: Down-regulated in Transcription
  misc_feature: MA Experiment 20000144 PARAMETER Experiment Name: At_42deg_Heat_cDNA_P Parameter: Temperature (deg C) Value: 42 vs. 22
  misc_feature: MA Experiment 20000144 PARAMETER Experiment Name: At_42deg_Heat_cDNA_P Parameter: Timepoint (hr) Value: 1
  misc_feature: MA Experiment 20000144 PARAMETER Experiment Name: At_42deg_Heat_cDNA_P Parameter: Tissue Value: Aerial
  misc_feature: MA Experiment ID: 20000234 Result: Up-regulated in Transcription
  misc_feature: MA Experiment 20000234 PARAMETER Experiment Name: At_Siliques_P Parameter: Age (day) Value: 21
  misc_feature: MA Experiment 20000234 PARAMETER Experiment Name: At_Siliques_P Parameter: Organism Value: A. thaliana
  misc_feature: MA Experiment 20000234 PARAMETER Experiment Name: At_Siliques_P Parameter: Plant Line Value: WS
  misc_feature: MA Experiment 20000234 PARAMETER Experiment Name: At_Siliques_P Parameter: Tissue Value: Less Than 5mm Siliques vs. Whole Plant
  misc_feature: MA Experiment ID: 20000264 Result: Up-regulated in Transcription
  misc_feature: MA Experiment 20000264 PARAMETER Experiment Name: At_Open_Flower_P Parameter: Age (day) Value: 21
  misc_feature: MA Experiment 20000264 PARAMETER Experiment Name: At_Open_Flower_P Parameter: Plant Line Value: WS
  misc_feature: MA Experiment 20000264 PARAMETER Experiment Name: At_Open_Flower_P Parameter: Tissue Value: Open Flower vs. Whole Plant
  misc_feature: MA Experiment ID: 20000265 Result: Up-regulated in Transcription
  misc_feature: MA Experiment 20000265 PARAMETER Experiment Name: At_Open_Flower_P Parameter: Age (day) Value: 21
  misc_feature: MA Experiment 20000265 PARAMETER Experiment Name: At_Open_Flower_P Parameter: Plant Line Value: WS
  misc_feature: MA Experiment 20000265 PARAMETER Experiment Name: At_Open_Flower_P Parameter: Tissue Value: Closed Flower vs. Whole Plant
  misc_feature: MA Experiment ID: 20000286 Result: Up-regulated in Transcription
  misc_feature: MA Experiment 20000286 PARAMETER Experiment Name: At_Open_Flower_P Parameter: Age (day) Value: 21
  misc_feature: MA Experiment 20000286 PARAMETER Experiment Name: At_Open_Flower_P Parameter: Plant Line Value: WS
  misc_feature: MA Experiment 20000286 PARAMETER Experiment Name: At_Open_Flower_P Parameter: Tissue Value: Half Open vs. Whole Plant
  misc_feature: MA Experiment ID: 20000439 Result: Down-regulated in Transcription
  misc_feature: MA Experiment 20000439 PARAMETER Experiment Name: At_Roots__P Parameter: Age (day) Value: 14 vs. 21
  misc_feature: MA Experiment 20000439 PARAMETER Experiment Name: At_Roots__P Parameter: Organism Value: A. thaliana
  misc_feature: MA Experiment 20000439 PARAMETER Experiment Name: At_Roots__P Parameter: Tissue Value: Roots vs. Whole Plant
  misc_feature: MA Experiment ID: 20000441 Result: Down-regulated in Transcription
  misc_feature: MA Experiment 20000441 PARAMETER Experiment Name: At_1uM_BR-BRZ__P Parameter: Tissue Value: Shoot Apices
  misc_feature: MA Experiment 20000441 PARAMETER Experiment Name: At_1uM_BR-BRZ__P Parameter: Treatment Value: 1uM BR vs. No Treatment
  misc_feature: MA Experiment ID: 20000443 Result: Down-regulated in Transcription
  misc_feature: MA Experiment 20000443 PARAMETER Experiment Name: At_1uM_BR-BRZ__P Parameter: Tissue Value: Shoot Apices
  misc_feature: MA Experiment 20000443 PARAMETER Experiment Name: At_1uM_BR-BRZ__P Parameter: Treatment Value: 1uM BRZ vs. No Treatment
  misc_feature: MA Experiment ID: 20000451 Result: Up-regulated in Transcription
  misc_feature: MA Experiment 20000451 PARAMETER Experiment Name: At_CS6879_Shoots-Roots_P Parameter: Age (day) Value: 14
  misc_feature: MA Experiment 20000451 PARAMETER Experiment Name: At_CS6879_Shoots-Roots_P Parameter: Organism Value: A. thaliana
  misc_feature: MA Experiment 20000451 PARAMETER Experiment Name: At_CS6879_Shoots-Roots_P Parameter: Plant Line Value: CS6879 vs. WS
  misc_feature: MA Experiment 20000451 PARAMETER Experiment Name: At_CS6879_Shoots-Roots_P Parameter: Tissue Value: Roots
  misc_feature: MA Experiment ID: 20001248 Result: Down-regulated in Transcription
  misc_feature: MA Experiment 20001248 PARAMETER Experiment Name: At_Far-red-induction_P Parameter: Age (day) Value: 7
  misc_feature: MA Experiment 20001248 PARAMETER Experiment Name: At_Far-red-induction_P Parameter: Light Value: Far-red vs. White
  misc_feature: MA Experiment 20001248 PARAMETER Experiment Name: At_Far-red-induction_P Parameter: Organism Value: A. thaliana
  misc_feature: MA Experiment 20001248 PARAMETER Experiment Name: At_Far-red-induction_P Parameter: Plant Line Value: Columbia
  misc_feature: MA Experiment 20001248 PARAMETER Experiment Name: At_Far-red-induction_P Parameter: Timepoint (hr) Value: 4
  misc_feature: MA Experiment 20001248 PARAMETER Experiment Name: At_Far-red-induction_P Parameter: Tissue Value: Whole Plant
  misc_feature: MA Experiment ID: 20001504 Result: Up-regulated in Transcription
  misc_feature: MA Experiment 20001504 PARAMETER Experiment Name: At_Far-red-enriched_P Parameter: Age (day) Value: 10
  misc_feature: MA Experiment 20001504 PARAMETER Experiment Name: At_Far-red-enriched_P Parameter: Light Value: Far-red enriched vs. White
  misc_feature: MA Experiment 20001504 PARAMETER Experiment Name: At_Far-red-enriched_P Parameter: Organism Value: A. thaliana
  misc_feature: MA Experiment 20001504 PARAMETER Experiment Name: At_Far-red-enriched_P Parameter: Plant Line Value: Columbia
  misc_feature: MA Experiment 20001504 PARAMETER Experiment Name: At_Far-red-enriched_P Parameter: Timepoint (day) Value: 6
  misc_feature: MA Experiment 20001504 PARAMETER Experiment Name: At_Far-red-enriched_P Parameter: Tissue Value: Whole Plant
  misc_feature: MA Experiment ID: 20001554 Result: Up-regulated in Transcription
  misc_feature: MA Experiment 20001554 PARAMETER Experiment Name: At_Drought_Soil_Dry_P Parameter: Age (day) Value: 21
  misc_feature: MA Experiment 20001554 PARAMETER Experiment Name: At_Drought_Soil_Dry_P Parameter: Organism Value: A. thaliana
  misc_feature: MA Experiment 20001554 PARAMETER Experiment Name: At_Drought_Soil_Dry_P Parameter: Plant Line Value: WS
  misc_feature: MA Experiment 20001554 PARAMETER Experiment Name: At_Drought_Soil_Dry_P Parameter: Post Timepoint (hr) Value: None
  misc_feature: MA Experiment 20001554 PARAMETER Experiment Name: At_Drought_Soil_Dry_P Parameter: Post-Treatment Value: None
  misc_feature: MA Experiment 20001554 PARAMETER Experiment Name: At_Drought_Soil_Dry_P Parameter: Timepoint (day) Value: 7
  misc_feature: MA Experiment 20001554 PARAMETER Experiment Name: At_Drought_Soil_Dry_P Parameter: Treatment Value: Drought vs. No Drought
  misc_feature: MA Experiment ID: 20001555 Result: Up-regulated in Transcription
  misc_feature: MA Experiment 20001555 PARAMETER Experiment Name: At_Drought_Soil_Dry_P Parameter: Age (day) Value: 24
  misc_feature: MA Experiment 20001555 PARAMETER Experiment Name: At_Drought_Soil_Dry_P Parameter: Organism Value: A. thaliana
  misc_feature: MA Experiment 20001555 PARAMETER Experiment Name: At_Drought_Soil_Dry_P Parameter: Plant Line Value: WS
  misc_feature: MA Experiment 20001555 PARAMETER Experiment Name: At_Drought_Soil_Dry_P Parameter: Post Timepoint (hr) Value: None
  misc_feature: MA Experiment 20001555 PARAMETER Experiment Name: At_Drought_Soil_Dry_P Parameter: Post-Treatment Value: None
  misc_feature: MA Experiment 20001555 PARAMETER Experiment Name: At_Drought_Soil_Dry_P Parameter: Timepoint (day) Value: 10
  misc_feature: MA Experiment 20001555 PARAMETER Experiment Name: At_Drought_Soil_Dry_P Parameter: Treatment Value: Drought vs. No Drought
  misc_feature: MA Experiment ID: 20001556 Result: Up-regulated in Transcription
  misc_feature: MA Experiment 20001556 PARAMETER Experiment Name: At_Drought_Soil_Dry_P Parameter: Age (day) Value: 26
  misc_feature: MA Experiment 20001556 PARAMETER Experiment Name: At_Drought_Soil_Dry_P Parameter: Organism Value: A. thaliana
  misc_feature: MA Experiment 20001556 PARAMETER Experiment Name: At_Drought_Soil_Dry_P Parameter: Plant Line Value: WS
  misc_feature: MA Experiment 20001556 PARAMETER Experiment Name: At_Drought_Soil_Dry_P Parameter: Post Timepoint (hr) Value: None
  misc_feature: MA Experiment 20001556 PARAMETER Experiment Name: At_Drought_Soil_Dry_P Parameter: Post-Treatment Value: None
  misc_feature: MA Experiment 20001556 PARAMETER Experiment Name: At_Drought_Soil_Dry_P Parameter: Timepoint (day) Value: 12
  misc_feature: MA Experiment 20001556 PARAMETER Experiment Name: At_Drought_Soil_Dry_P Parameter: Treatment Value: Drought vs. No Drought
  misc_feature: MA Experiment ID: 20001557 Result: Up-regulated in Transcription
  misc_feature: MA Experiment 20001557 PARAMETER Experiment Name: At_Drought_Soil_Dry_P Parameter: Age (day) Value: 27
  misc_feature: MA Experiment 20001557 PARAMETER Experiment Name: At_Drought_Soil_Dry_P Parameter: Organism Value: A. thaliana
  misc_feature: MA Experiment 20001557 PARAMETER Experiment Name: At_Drought_Soil_Dry_P Parameter: Plant Line Value: WS
  misc_feature: MA Experiment 20001557 PARAMETER Experiment Name: At_Drought_Soil_Dry_P Parameter: Post Timepoint (hr) Value: 3
  misc_feature: MA Experiment 20001557 PARAMETER Experiment Name: At_Drought_Soil_Dry_P Parameter: Post-Treatment Value: Re-Water vs. No Drought
  misc_feature: MA Experiment 20001557 PARAMETER Experiment Name: At_Drought_Soil_Dry_P Parameter: Timepoint (day) Value: 13
  misc_feature: MA Experiment 20001557 PARAMETER Experiment Name: At_Drought_Soil_Dry_P Parameter: Treatment Value: Drought vs. No Drought
  misc_feature: MA Experiment ID: 20001558 Result: Up-regulated in Transcription
  misc_feature: MA Experiment 20001558 PARAMETER Experiment Name: At_Drought_Soil_Dry_P Parameter: Age (day) Value: 27
  misc_feature: MA Experiment 20001558 PARAMETER Experiment Name: At_Drought_Soil_Dry_P Parameter: Organism Value: A. thaliana
  misc_feature: MA Experiment 20001558 PARAMETER Experiment Name: At_Drought_Soil_Dry_P Parameter: Plant Line Value: WS
  misc_feature: MA Experiment 20001558 PARAMETER Experiment Name: At_Drought_Soil_Dry_P Parameter: Post Timepoint (hr) Value: 6
  misc_feature: MA Experiment 20001558 PARAMETER Experiment Name: At_Drought_Soil_Dry_P Parameter: Post-Treatment Value: Re-Water vs. No Drought
  misc_feature: MA Experiment 20001558 PARAMETER Experiment Name: At_Drought_Soil_Dry_P Parameter: Timepoint (day) Value: 13
  misc_feature: MA Experiment 20001558 PARAMETER Experiment Name: At_Drought_Soil_Dry_P Parameter: Treatment Value: Drought vs. No Drought
  misc_feature: MA Experiment ID: 20001559 Result: Up-regulated in Transcription
  misc_feature: MA Experiment 20001559 PARAMETER Experiment Name: At_Drought_Soil_Dry_P Parameter: Age (day) Value: 28
  misc_feature: MA Experiment 20001559 PARAMETER Experiment Name: At_Drought_Soil_Dry_P Parameter: Organism Value: A. thaliana
  misc_feature: MA Experiment 20001559 PARAMETER Experiment Name: At_Drought_Soil_Dry_P Parameter: Plant Line Value: WS
  misc_feature: MA Experiment 20001559 PARAMETER Experiment Name: At_Drought_Soil_Dry_P Parameter: Post Timepoint (hr) Value: 29
  misc_feature: MA Experiment 20001559 PARAMETER Experiment Name: At_Drought_Soil_Dry_P Parameter: Post-Treatment Value: Re-Water vs. No Drought
  misc_feature: MA Experiment 20001559 PARAMETER Experiment Name: At_Drought_Soil_Dry_P Parameter: Timepoint (day) Value: 14
  misc_feature: MA Experiment 20001559 PARAMETER Experiment Name: At_Drought_Soil_Dry_P Parameter: Treatment Value: Drought vs. No Drought
  misc_feature: MA Experiment ID: 20001761 Result: Down-regulated in Transcription
  misc_feature: MA Experiment 20001761 PARAMETER Experiment Name: At_50mM_NH4NO3_L-to-H_P Parameter: Timepoint (hr) Value: 4
  misc_feature: MA Experiment 20001761 PARAMETER Experiment Name: At_50mM_NH4NO3_L-to-H_P Parameter: Tissue Value: Siliques
  misc_feature: MA Experiment 20001761 PARAMETER Experiment Name: At_50mM_NH4NO3_L-to-H_P Parameter: Treatment Value: 50mM NH4NO3 vs 100mM Mannitol
  misc_feature: MA Experiment ID: 20001905 Result: Up-regulated in Transcription
  misc_feature: MA Experiment 20001905 PARAMETER Experiment Name: At_Drought_Reproduction_P Parameter: Age (day) Value: 40
  misc_feature: MA Experiment 20001905 PARAMETER Experiment Name: At_Drought_Reproduction_P Parameter: Organism Value: A. thaliana
  misc_feature: MA Experiment 20001905 PARAMETER Experiment Name: At_Drought_Reproduction_P Parameter: Plant Line Value: WS
  misc_feature: MA Experiment 20001905 PARAMETER Experiment Name: At_Drought_Reproduction_P Parameter: Timepoint (day) Value: 10
  misc_feature: MA Experiment 20001905 PARAMETER Experiment Name: At_Drought_Reproduction_P Parameter: Tissue Value: Rosettes
  misc_feature: MA Experiment 20001905 PARAMETER Experiment Name: At_Drought_Reproduction_P Parameter: Treatment Value: Drought vs. No Drought
  misc_feature: MA Experiment ID: 20001911 Result: Down-regulated in Transcription
  misc_feature: MA Experiment 20001911 PARAMETER Experiment Name: At_Drought_Reproduction_P Parameter: Age (day) Value: 40
  misc_feature: MA Experiment 20001911 PARAMETER Experiment Name: At_Drought_Reproduction_P Parameter: Organism Value: A. thaliana
  misc_feature: MA Experiment 20001911 PARAMETER Experiment Name: At_Drought_Reproduction_P Parameter: Plant Line Value: WS
  misc_feature: MA Experiment 20001911 PARAMETER Experiment Name: At_Drought_Reproduction_P Parameter: Timepoint (day) Value: 10
  misc_feature: MA Experiment 20001911 PARAMETER Experiment Name: At_Drought_Reproduction_P Parameter: Tissue Value: Flowers
  misc_feature: MA Experiment 20001911 PARAMETER Experiment Name: At_Drought_Reproduction_P Parameter: Treatment Value: Drought vs. No Drought
atgaagacaacaatggagtgctctctctcatccatcctccttctccttgtactctgcttcactcatcccattccttctctaaccttcgagccactaatctcttctcttgatcttcatgaagaagaaagctgcccttacactgtaattgttaccacaagctgtttctctcctgattggtctagagatcaggtcactatcgctttgggtgacgccgacgataaccaggtggtcgcaccgagactagacaaaccgctaagtggaggaggtggttttgagaaatgttcatcggacacattccaagtcaaaggtaaatgtctcaacactatctgctccgtctacatctaccgttccggtaccgacggctggatcccggagaccgtcgagatatacaaggaaggttccaaatccgtgaaattcgatttcaacaagaacgtccctgaaaacatttggtacggaaacaactattgtaacaacaccgatttgccaccgccttccccggatttccctccgttttctccatccatcccaccgccttcaccaccttattttcctcctgaaccaccttcaatcccgccgccaccaccaccatcaccgccgtctgctgcctctggacgtggaagtggtcagagtttggttgttgcgtttgctgcgtttgtgtttgcgtttgcggctgtggttgtttgagttattttgttaagaattaagagttgtctcaataagtaacgagtatcgtgtaatccctctgttttgtctttgactctttgtagttgaacattgacaatttcatattgtggtaacattaattagttaactaatgtatgagttcgagtttttaacgtactattccttataaattctgcatcaatgttttgtatgtg

SEQ ID NO: 21018 - protein, 227 aa, Arabidopsis thaliana
  peptide (1)..(227): Ceres Seq. ID no. 13489014
  misc_feature (27)..(156): Pfam Name: Embryo-specific protein 3, (ATS3) Pfam Description: Embryo-specific protein 3, (ATS3)
  misc_feature (155)..(220): Homolog of NCBI NO: 38344072 NR Description: OSJNBa0006B20.16 [Oryza sativa (japonica
  misc_feature (23)..(156): Homolog of NCBI NO: 34910236 NR Description: OSJNBa0089K24.2 [Oryza sativa (japonica
  misc_feature (21)..(157): Homolog of NCBI NO: 15227355 NR Description: hypothetical protein [Arabidopsis thaliana]
  misc_feature (43)..(158): Homolog of NCBI NO: 15241727 NR Description: expressed protein [Arabidopsis thaliana]
  misc_feature (43)..(158): Homolog of NCBI NO: 8809633 NR Description: contains similarity to embryo-specific protein
  misc_feature (40)..(226): Homolog of NCBI NO: 13877521 NR Description: embryo-specific protein 3; ATS3 [Arabidopsis
  misc_feature (40)..(226): Homolog of NCBI NO: 15240721 NR Description: embryo-specific protein 3 (ATS3) [Arabidopsis
  misc_feature (40)..(226): Homolog of NCBI NO: 3335171 NR Description: embryo-specific protein 3 [Arabidopsis thaliana]
  misc_feature (5)..(227): Homolog of NCBI NO: 15241758 NR Description: embryo-specific protein - like [Arabidopsis
  misc_feature (1)..(227): Homolog of NCBI NO: 26450767 NR Description: embryo-specific protein like [Arabidopsis
MKTTMECSLSSILLLLVLCFTHPIPSLTFEPLISSLDLHEEESCPYTVIVTTSCFSPDWSRDQVTIALGDADDNQVVAPRLDKPLSGGGGFEKCSSDTFQVKGKCLNTICSVYIYRSGTDGWIPETVEIYKEGSKSVKFDFNKNVPENIWYGNNYCNNTDLPPPSPDFPPFSPSIPPPSPPYFPPEPPSIPPPPPPSPPSAASGRGSGQSLVVAFAAFVFAFAAVVV

SEQ ID NO: 21019 - protein, 223 aa, Arabidopsis thaliana
  peptide (1)..(223): Ceres Seq. ID no. 13489015
  misc_feature (23)..(152): Pfam Name: Embryo-specific protein 3, (ATS3) Pfam Description: Embryo-specific protein 3, (ATS3)
  misc_feature (151)..(216): Homolog of NCBI NO: 38344072 NR Description: OSJNBa0006B20.16 [Oryza sativa (japonica
  misc_feature (19)..(152): Homolog of NCBI NO: 34910236 NR Description: OSJNBa0089K24.2 [Oryza sativa (japonica
  misc_feature (17)..(153): Homolog of NCBI NO: 15227355 NR Description: hypothetical protein [Arabidopsis thaliana]
  misc_feature (39)..(154): Homolog of NCBI NO: 15241727 NR Description: expressed protein [Arabidopsis thaliana]
  misc_feature (39)..(154): Homolog of NCBI NO: 8809633 NR Description: contains similarity to embryo-specific protein
  misc_feature (36)..(222): Homolog of NCBI NO: 13877521 NR Description: embryo-specific protein 3; ATS3 [Arabidopsis
  misc_feature (36)..(222): Homolog of NCBI NO: 15240721 NR Description: embryo-specific protein 3 (ATS3) [Arabidopsis
  misc_feature (36)..(222): Homolog of NCBI NO: 3335171 NR Description: embryo-specific protein 3 [Arabidopsis thaliana]
  misc_feature (1)..(223): Homolog of NCBI NO: 15241758 NR Description: embryo-specific protein - like [Arabidopsis
  misc_feature (1)..(223): Homolog of NCBI NO: 26450767 NR Description: embryo-specific protein like [Arabidopsis
MECSLSSILLLLVLCFTHPIPSLTFEPLISSLDLHEEESCPYTVIVTTSCFSPDWSRDQVTIALGDADDNQVVAPRLDKPLSGGGGFEKCSSDTFQVKGKCLNTICSVYIYRSGTDGWIPETVEIYKEGSKSVKFDFNKNVPENIWYGNNYCNNTDLPPPSPDFPPFSPSIPPPSPPYFPPEPPSIPPPPPPSPPSAASGRGSGQSLVVAFAAFVFAFAAVVV

SEQ ID NO: 21020 - DNA, 1536 bp, Arabidopsis thaliana
  misc_feature (1)..(1536): Ceres Seq. ID no. 13490062
  misc_feature: MA Experiment ID: 108434 Result: Down-regulated in Transcription
  misc_feature: MA Experiment 108434 PARAMETER Experiment Name: At_Root_Tips_cDNA_P Parameter: Tissue Value: Root Tips
  misc_feature: MA Experiment ID: 108462 Result: Up-regulated in Transcription
  misc_feature: MA Experiment 108462 PARAMETER Experiment Name: At_Germinating_Seeds_cDNA_P Parameter: Age (day) Value: 2 vs. 0
  misc_feature: MA Experiment 108462 PARAMETER Experiment Name: At_Germinating_Seeds_cDNA_P Parameter: Tissue Value: Germinating Seeds
  misc_feature: MA Experiment ID: 108463 Result: Up-regulated in Transcription
  misc_feature: MA Experiment 108463 PARAMETER Experiment Name: At_Germinating_Seeds_cDNA_P Parameter: Age (day) Value: 3 vs. 0
  misc_feature: MA Experiment 108463 PARAMETER Experiment Name: At_Germinating_Seeds_cDNA_P Parameter: Tissue Value: Germinating Seeds
  misc_feature: MA Experiment ID: 108464 Result: Up-regulated in Transcription
  misc_feature: MA Experiment 108464 PARAMETER Experiment Name: At_Germinating_Seeds_cDNA_P Parameter: Age (day) Value: 4 vs. 0
  misc_feature: MA Experiment 108464 PARAMETER Experiment Name: At_Germinating_Seeds_cDNA_P Parameter: Tissue Value: Germinating Seeds
  misc_feature: MA Experiment ID: 108469 Result: Up-regulated in Transcription
  misc_feature: MA Experiment ID: 108573 Result: Up-regulated in Transcription
  misc_feature: MA Experiment 108573 PARAMETER Experiment Name: At_Drought_cDNA_P Parameter: Timepoint (hr) Value: 6
  misc_feature: MA Experiment 108573 PARAMETER Experiment Name: At_Drought_cDNA_P Parameter: Tissue Value: Aerial
  misc_feature: MA Experiment 108573 PARAMETER Experiment Name: At_Drought_cDNA_P Parameter: Treatment Value: Drought vs. No Drought
  misc_feature: MA Experiment ID: 108585 Result: Up-regulated in Transcription
  misc_feature: MA Experiment 108585 PARAMETER Experiment Name: At_5mM_NaNP_cDNA_P Parameter: Timepoint (hr) Value: 6
  misc_feature: MA Experiment 108585 PARAMETER Experiment Name: At_5mM_NaNP_cDNA_P Parameter: Tissue Value: Aerial
  misc_feature: MA Experiment 108585 PARAMETER Experiment Name: At_5mM_NaNP_cDNA_P Parameter: Treatment Value: null
  misc_feature: MA Experiment ID: 20000111 Result: Down-regulated in Transcription
  misc_feature: MA Experiment 20000111 PARAMETER Experiment Name: At_42deg_Heat_cDNA_P Parameter: Temperature (deg C) Value: 42 vs. 22
  misc_feature: MA Experiment 20000111 PARAMETER Experiment Name: At_42deg_Heat_cDNA_P Parameter: Timepoint (hr) Value: 6
  misc_feature: MA Experiment 20000111 PARAMETER Experiment Name: At_42deg_Heat_cDNA_P Parameter: Tissue Value: Aerial
  misc_feature: MA Experiment ID: 20000182 Result: Up-regulated in Transcription
  misc_feature: MA Experiment 20000182 PARAMETER Experiment Name: At_2mM_SA_P Parameter: Age (day) Value: 14
  misc_feature: MA Experiment 20000182 PARAMETER Experiment Name: At_2mM_SA_P Parameter: Organism Value: A. thaliana
  misc_feature: MA Experiment 20000182 PARAMETER Experiment Name: At_2mM_SA_P Parameter: Plant Line Value: WS
  misc_feature: MA Experiment 20000182 PARAMETER Experiment Name: At_2mM_SA_P Parameter: Timepoint (hr) Value: 6
  misc_feature: MA Experiment 20000182 PARAMETER Experiment Name: At_2mM_SA_P Parameter: Tissue Value: Aerial
  misc_feature: MA Experiment 20000182 PARAMETER Experiment Name: At_2mM_SA_P Parameter: Treatment Value: 2mM SA vs. No Treatment
  misc_feature: MA Experiment ID: 20000184 Result: Down-regulated in Transcription
  misc_feature: MA Experiment 20000184 PARAMETER Experiment Name: At_Shoots__P Parameter: Age (day) Value: 7
  misc_feature: MA Experiment 20000184 PARAMETER Experiment Name: At_Shoots__P Parameter: Tissue Value: Shoots vs. Whole Plant
  misc_feature: MA Experiment ID: 20000436 Result: Up-regulated in Transcription
  misc_feature: MA Experiment 20000436 PARAMETER Experiment Name: At_Drought_P Parameter: Age (day) Value: 7
  misc_feature: MA Experiment 20000436 PARAMETER Experiment Name: At_Drought_P Parameter: Organism Value: A. thaliana
  misc_feature: MA Experiment 20000436 PARAMETER Experiment Name: At_Drought_P Parameter: Plant Line Value: WS
  misc_feature: MA Experiment 20000436 PARAMETER Experiment Name: At_Drought_P Parameter: Timepoint (hr) Value: 12
  misc_feature: MA Experiment 20000436 PARAMETER Experiment Name: At_Drought_P Parameter: Tissue Value: Whole Plant
  misc_feature: MA Experiment 20000436 PARAMETER Experiment Name: At_Drought_P Parameter: Treatment Value: Drought vs. No Drought
  misc_feature: MA Experiment ID: 20000437 Result: Up-regulated in Transcription
  misc_feature: MA Experiment 20000437 PARAMETER Experiment Name: At_Drought_P Parameter: Age (day) Value: 8
  misc_feature: MA Experiment 20000437 PARAMETER Experiment Name: At_Drought_P Parameter: Organism Value: A. thaliana
  misc_feature: MA Experiment 20000437 PARAMETER Experiment Name: At_Drought_P Parameter: Plant Line Value: WS
  misc_feature: MA Experiment 20000437 PARAMETER Experiment Name: At_Drought_P Parameter: Timepoint (hr) Value: 24
  misc_feature: MA Experiment 20000437 PARAMETER Experiment Name: At_Drought_P Parameter: Tissue Value: Whole Plant
  misc_feature: MA Experiment 20000437 PARAMETER Experiment Name: At_Drought_P Parameter: Treatment Value: Drought vs. No Drought
  misc_feature: MA Experiment ID: 20000438 Result: Down-regulated in Transcription
  misc_feature: MA Experiment 20000438 PARAMETER Experiment Name: At_Shoots__P Parameter: Age (day) Value: 14
  misc_feature: MA Experiment 20000438 PARAMETER Experiment Name: At_Shoots__P Parameter: Tissue Value: Shoots vs. Whole Plant
  misc_feature: MA Experiment ID: 20000445 Result: Up-regulated in Transcription
  misc_feature: MA Experiment 20000445 PARAMETER Experiment Name: At_100uM_NAA__P Parameter: Age (day) Value: 14
  misc_feature: MA Experiment 20000445 PARAMETER Experiment Name: At_100uM_NAA__P Parameter: Organism Value: A. thaliana
  misc_feature: MA Experiment 20000445 PARAMETER Experiment Name: At_100uM_NAA__P Parameter: Plant Line Value: WS
  misc_feature: MA Experiment 20000445 PARAMETER Experiment Name: At_100uM_NAA__P Parameter: Timepoint (hr) Value: 6
  misc_feature: MA Experiment 20000445 PARAMETER Experiment Name: At_100uM_NAA__P Parameter: Tissue Value: Aerial
  misc_feature: MA Experiment 20000445 PARAMETER Experiment Name: At_100uM_NAA__P Parameter: Treatment Value: 100uM NAA vs. No Treatment
  misc_feature: MA Experiment ID: 20000495 Result: Down-regulated in Transcription
  misc_feature: MA Experiment 20000495 PARAMETER Experiment Name: At_Guard_Cells_P Parameter: Harvest Date Value: 8/2/2002
  misc_feature: MA Experiment 20000495 PARAMETER Experiment Name: At_Guard_Cells_P Parameter: Organism Value: A. thaliana
  misc_feature: MA Experiment 20000495 PARAMETER Experiment Name: At_Guard_Cells_P Parameter: Tissue Value: Guard Cells vs. Leaves
  misc_feature: MA Experiment ID: 20001451 Result: Down-regulated in Transcription
  misc_feature: MA Experiment 20001451 PARAMETER Experiment Name: At_Far-red-induction_P Parameter: Age (day) Value: 7
  misc_feature: MA Experiment 20001451 PARAMETER Experiment Name: At_Far-red-induction_P Parameter: Light Value: Far-red vs. White
  misc_feature: MA Experiment 20001451 PARAMETER Experiment Name: At_Far-red-induction_P Parameter: Organism Value: A. thaliana
  misc_feature: MA Experiment 20001451 PARAMETER Experiment Name: At_Far-red-induction_P Parameter: Plant Line Value: Columbia
  misc_feature: MA Experiment 20001451 PARAMETER Experiment Name: At_Far-red-induction_P Parameter: Timepoint (hr) Value: 24
  misc_feature: MA Experiment 20001451 PARAMETER Experiment Name: At_Far-red-induction_P Parameter: Tissue Value: Whole Plant
aaaacagactttttctcttcttcttctttttggggctacgacaatctgaatttgatcccaaatcaaaactttcttcttcttcgtcttcctctaatcaaaactgtctcctaccaaaggtctttcctttctccagccagatatgtgatgtgagaaaaccaagcttctcgtacaacttcatcacctacttccttttgacgttttcaaatcttgagagagatgggtatatatctaagtactccaaaaacagacaagttctcagaagatggcgaaaatcataaactcagatatggtttatcctctatgcaaggttggcgtgcgtccatggaagatgctcatgctgcaatacttgatctcgatgataacacttccttcttgggtgtctatgatggtcatggaggtaaagttgtttctaagttctgtgccaagtatctacaccagcaggttcttagtgatgaggcgtatgcagctggagacgtagggacttctcttcaaaaagcatttttcagaatggatgagatgatgcaaggacaaagagggtggcgagagttagcagtacttggtgacaaaatcaataagttcagtgggatgattgaagggcttatatggtcaccaagaagtggggacagtgctaataaacctgatgcttgggcgtttgaggaaggtcctcattctgattttgctggacctaattctgggagcacggcatgcgtagctgttgttagagacaagcagctatttgttgcaaatgcaggtgactcacgttgtgtgatatccagaaagaatcaggcttataatctttctagagatcacaaaccagatcttgaagctgagaaagaaaggatattgaaagctggtggctttatacatgcagggcgagtcaatggaagcttaaatctatcacgagctatcggtgacatggaattcaagcagaataagtttttgccatctgaaaagcaaatagttaccgctagtccagatgttaacactgttgaactctgtgatgatgatgatttccttgttcttgcctgcgatggaatttgggattgcatgacaagccaacaactcgttgatttcatacatgaacaattgaattcagagaccaaactctcggtggtatgtgaaaaagttctcgatagatgtctggctccaaacacttcaggtggtgaaggctgtgataacatgaccatgatattggttcgattcaagaaccctactccatcagagaccgaactaaaaccagaagcaagccaggcagaaggaaaccacgatgagccgagctcatcaaactaggcccatcctcagagtcacggaagatccctctagatctagtattttggttcagattgtaaatcattttgaaagacagttatatatctcaacctgacgttgatttcagtatatcaccatttcctccgtgtgcagacttttgtctcatgagctcccataatgtagaaaggaataattggtgtaaaaatgttgttggccttaaaagaacatatcatcatgtaaataaacaaaacaataagacatttacac

SEQ ID NO: 21021 - protein, 357 aa, Arabidopsis thaliana
  peptide (1)..(357): Ceres Seq. ID no. 13490063
  misc_feature (22)..(322): Pfam Name: Protein phosphatase 2C Pfam Description: Protein phosphatase 2C
  misc_feature (1)..(119): Homolog of NCBI NO: 31216428 NR Description: ENSANGP00000017684 [Anopheles gambiae]
  misc_feature (135)..(357): Homolog of NCBI NO: 31216428 NR Description: ENSANGP00000017684 [Anopheles gambiae]
  misc_feature (1)..(120): Homolog of NCBI NO: 27697184 NR Description: Similar to protein phosphatase 1G (formerly 2C),
  misc_feature (156)..(330): Homolog of NCBI NO: 27697184 NR Description: Similar to protein phosphatase 1G (formerly 2C),
  misc_feature (1)..(117): Homolog of NCBI NO: 4505999 NR Description: protein phosphatase 1G
  misc_feature (156)..(345): Homolog of NCBI NO: 4505999 NR Description: protein phosphatase 1G
  misc_feature (156)..(345): Homolog of NCBI NO: 22219444 NR Description: protein phosphatase 1G (formerly 2C),
  misc_feature (1)..(347): Homolog of NCBI NO: 12003990 NR Description: protein phosphatase type-2C [Zea mays]
  misc_feature (1)..(357): Homolog of NCBI NO: 15224677 NR Description: protein phosphatase 2C (PP2C), putative
  misc_feature (1)..(357): Homolog of NCBI NO: 15236548 NR Description: protein phosphatase 2C (PP2C), putative
MGIYLSTPKTDKFSEDGENHKLRYGLSSMQGWRASMEDAHAAILDLDDNTSFLGVYDGHGGKVVSKFCAKYLHQQVLSDEAYAAGDVGTSLQKAFFRMDEMMQGQRGWRELAVLGDKINKFSGMIEGLIWSPRSGDSANKPDAWAFEEGPHSDFAGPNSGSTACVAVVRDKQLFVANAGDSRCVISRKNQAYNLSRDHKPDLEAEKERILKAGGFIHAGRVNGSLNLSRAIGDMEFKQNKFLPSEKQIVTASPDVNTVELCDDDDFLVLACDGIWDCMTSQQLVDFIHEQLNSETKLSVVCEKVLDRCLAPNTSGGEGCDNMTMILVRFKNPTPSETELKPEASQAEGNHDEPSSSN

SEQ ID NO: 21022 - protein, 329 aa, Arabidopsis thaliana
  peptide (1)..(329): Ceres Seq. ID no. 13490064
  misc_feature (1)..(294): Pfam Name: Protein phosphatase 2C Pfam Description: Protein phosphatase 2C
  misc_feature (128)..(317): Homolog of NCBI NO: 22219444 NR Description: protein phosphatase 1G (formerly 2C),
  misc_feature (1)..(89): Homolog of NCBI NO: 4505999 NR Description: protein phosphatase 1G
  misc_feature (128)..(317): Homolog of NCBI NO: 4505999 NR Description: protein phosphatase 1G
  misc_feature (1)..(91): Homolog of NCBI NO: 31216428 NR Description: ENSANGP00000017684 [Anopheles gambiae]
  misc_feature (107)..(329): Homolog of NCBI NO: 31216428 NR Description: ENSANGP00000017684 [Anopheles gambiae]
  misc_feature (1)..(92): Homolog of NCBI NO: 27697184 NR Description: Similar to protein phosphatase 1G (formerly 2C),
  misc_feature (128)..(302): Homolog of NCBI NO: 27697184 NR Description: Similar to protein phosphatase 1G (formerly 2C),
  misc_feature (1)..(319): Homolog of NCBI NO: 12003990 NR Description: protein phosphatase type-2C [Zea mays]
  misc_feature (1)..(329): Homolog of NCBI NO: 15224677 NR Description: protein phosphatase 2C (PP2C), putative
  misc_feature (1)..(329): Homolog of NCBI NO: 15236548 NR Description: protein phosphatase 2C (PP2C), putative
MQGWRASMEDAHAAILDLDDNTSFLGVYDGHGGKVVSKFCAKYLHQQVLSDEAYAAGDVGTSLQKAFFRMDEMMQGQRGWRELAVLGDKINKFSGMIEGLIWSPRSGDSANKPDAWAFEEGPHSDFAGPNSGSTACVAVVRDKQLFVANAGDSRCVISRKNQAYNLSRDHKPDLEAEKERILKAGGFIHAGRVNGSLNLSRAIGDMEFKQNKFLPSEKQIVTASPDVNTVELCDDDDFLVLACDGIWDCMTSQQLVDFIHEQLNSETKLSVVCEKVLDRCLAPNTSGGEGCDNMTMILVRFKNPTPSETELKPEASQAEGNHDEPSSSN

SEQ ID NO: 21023 - protein, 322 aa, Arabidopsis thaliana
  peptide (1)..(322): Ceres Seq. ID no. 13490065
  misc_feature (1)..(287): Pfam Name: Protein phosphatase 2C Pfam Description: Protein phosphatase 2C
  misc_feature (121)..(310): Homolog of NCBI NO: 22219444 NR Description: protein phosphatase 1G (formerly 2C),
  misc_feature (1)..(82): Homolog of NCBI NO: 4505999 NR Description: protein phosphatase 1G
  misc_feature (121)..(310): Homolog of NCBI NO: 4505999 NR Description: protein phosphatase 1G
  misc_feature (1)..(84): Homolog of NCBI NO: 31216428 NR Description: ENSANGP00000017684 [Anopheles gambiae]
  misc_feature (100)..(322): Homolog of NCBI NO: 31216428 NR Description: ENSANGP00000017684 [Anopheles gambiae]
  misc_feature (1)..(85): Homolog of NCBI NO: 27697184 NR Description: Similar to protein phosphatase 1G (formerly 2C),
  misc_feature (121)..(295): Homolog of NCBI NO: 27697184 NR Description: Similar to protein phosphatase 1G (formerly 2C),
  misc_feature (1)..(312): Homolog of NCBI NO: 12003990 NR Description: protein phosphatase type-2C [Zea mays]
  misc_feature (1)..(322): Homolog of NCBI NO: 15224677 NR Description: protein phosphatase 2C (PP2C), putative
  misc_feature (1)..(322): Homolog of NCBI NO: 15236548 NR Description: protein phosphatase 2C (PP2C), putative
MEDAHAAILDLDDNTSFLGVYDGHGGKVVSKFCAKYLHQQVLSDEAYAAGDVGTSLQKAFFRMDEMMQGQRGWRELAVLGDKINKFSGMIEGLIWSPRSGDSANKPDAWAFEEGPHSDFAGPNSGSTACVAVVRDKQLFVANAGDSRCVISRKNQAYNLSRDHKPDLEAEKERILKAGGFIHAGRVNGSLNLSRAIGDMEFKQNKFLPSEKQIVTASPDVNTVELCDDDDFLVLACDGIWDCMTSQQLVDFIHEQLNSETKLSVVCEKVLDRCLAPNTSGGEGCDNMTMILVRFKNPTPSETELKPEASQAEGNHDEPSSSN

SEQ ID NO: 21024 - DNA, 801 bp, Arabidopsis thaliana
  misc_feature (1)..(801): Ceres Seq. ID no. 12369931
  misc_feature: MA Experiment ID: 20000069 Result: Down-regulated in Transcription
  misc_feature: MA Experiment 20000069 PARAMETER Experiment Name: At_100uM_ABA_Mutants_cDNA_P Parameter: Plant Line Value: CS23
  misc_feature: MA Experiment 20000069 PARAMETER Experiment Name: At_100uM_ABA_Mutants_cDNA_P Parameter: Timepoint (hr) Value: 6
  misc_feature: MA Experiment 20000069 PARAMETER Experiment Name: At_100uM_ABA_Mutants_cDNA_P Parameter: Tissue Value: Aerial
  misc_feature: MA Experiment 20000069 PARAMETER Experiment Name: At_100uM_ABA_Mutants_cDNA_P Parameter: Treatment Value: 100uM ABA vs. No Treatment
  misc_feature: MA Experiment ID: 20000070 Result: Down-regulated in Transcription
  misc_feature: MA Experiment 20000070 PARAMETER Experiment Name: At_100uM_ABA_Mutants_cDNA_P Parameter: Plant Line Value: CS24
  misc_feature: MA Experiment 20000070 PARAMETER Experiment Name: At_100uM_ABA_Mutants_cDNA_P Parameter: Timepoint (hr) Value: 6
  misc_feature: MA Experiment 20000070 PARAMETER Experiment Name: At_100uM_ABA_Mutants_cDNA_P Parameter: Tissue Value: Aerial
  misc_feature: MA Experiment 20000070 PARAMETER Experiment Name: At_100uM_ABA_Mutants_cDNA_P Parameter: Treatment Value: 100uM ABA vs. No Treatment
  misc_feature: MA Experiment ID: 20000072 Result: Down-regulated in Transcription
  misc_feature: MA Experiment 20000072 PARAMETER Experiment Name: At_100uM_ABA_Mutants_cDNA_P Parameter: Plant Line Value: CS8105
  misc_feature: MA Experiment 20000072 PARAMETER Experiment Name: At_100uM_ABA_Mutants_cDNA_P Parameter: Timepoint (hr) Value: 6
  misc_feature: MA Experiment 20000072 PARAMETER Experiment Name: At_100uM_ABA_Mutants_cDNA_P Parameter: Tissue Value: Aerial
  misc_feature: MA Experiment 20000072 PARAMETER Experiment Name: At_100uM_ABA_Mutants_cDNA_P Parameter: Treatment Value: 100uM ABA vs. No Treatment
  misc_feature: MA Experiment ID: 20000184 Result: Up-regulated in Transcription
  misc_feature: MA Experiment 20000184 PARAMETER Experiment Name: At_Shoots__P Parameter: Age (day) Value: 7
  misc_feature: MA Experiment 20000184 PARAMETER Experiment Name: At_Shoots__P Parameter: Tissue Value: Shoots vs. Whole Plant
  misc_feature: MA Experiment ID: 20000185 Result: Down-regulated in Transcription
  misc_feature: MA Experiment 20000185 PARAMETER Experiment Name: At_Roots__P Parameter: Age (day) Value: 7 vs. 21
  misc_feature: MA Experiment 20000185 PARAMETER Experiment Name: At_Roots__P Parameter: Organism Value: A. thaliana
  misc_feature: MA Experiment 20000185 PARAMETER Experiment Name: At_Roots__P Parameter: Tissue Value: Roots vs. Whole Plant
  misc_feature: MA Experiment ID: 20000437 Result: Down-regulated in Transcription
  misc_feature: MA Experiment 20000437 PARAMETER Experiment Name: At_Drought_P Parameter: Age (day) Value: 8
  misc_feature: MA Experiment 20000437 PARAMETER Experiment Name: At_Drought_P Parameter: Organism Value: A. thaliana
  misc_feature: MA Experiment 20000437 PARAMETER Experiment Name: At_Drought_P Parameter: Plant Line Value: WS
  misc_feature: MA Experiment 20000437 PARAMETER Experiment Name: At_Drought_P Parameter: Timepoint (hr) Value: 24
  misc_feature: MA Experiment 20000437 PARAMETER Experiment Name: At_Drought_P Parameter: Tissue Value: Whole Plant
  misc_feature: MA Experiment 20000437 PARAMETER Experiment Name: At_Drought_P Parameter: Treatment Value: Drought vs. No Drought
  misc_feature: MA Experiment ID: 20000439 Result: Down-regulated in Transcription
  misc_feature: MA Experiment 20000439 PARAMETER Experiment Name: At_Roots__P Parameter: Age (day) Value: 14 vs. 21
  misc_feature: MA Experiment 20000439 PARAMETER Experiment Name: At_Roots__P Parameter: Organism Value: A. thaliana
  misc_feature: MA Experiment 20000439 PARAMETER Experiment Name: At_Roots__P Parameter: Tissue Value: Roots vs. Whole Plant
atttttctctcagaatccataaaaagagagagagataaataaagagaaaactaaagaagctagaagatggagaaaagtaatgatcatgacaaggctagccacggcggctccggtggtggtgccacggagaagtgggaggagactagcctcggaatccgaactgccgagacaatgctccggttagctccggtgggcctttgtgttgcagcacttgttgtcatgcttaaggactctgagactaatgagttcggttcaatttcttactccaatctcacagcctttaggtacttggtgcacgcaaatggaatatgtgcaggctactctcttctatcagcagccattgcagcgatgcctcgttcttcttcgacaatgcctcgtgtttggaccttcttttgtctcgaccagcttctgacctacctggttcttgctgctggagctgtatcagctgaggttctatacttggcttacaatggagactcagccattacttggagcgatgcatgtagctcctatggcggtttctgtcatagagccactgcttctgttataatcacattctttgtggtttgtttctacatcgttctctctctaatctcctcttataagctctttactcgctttgatcctccttccattgttgactccgccaagaatctcgaagtcgctgtcttcggaagttagatcctccatttgctcttcaagtacatctagtttgtcatgtttcaaatgttgtgtgtttttaactttggtcaagagaaagaatgcttatgtgtttgctcttgtttcattgcttttcttcct

SEQ ID NO: 21025 - protein, 204 aa, Arabidopsis thaliana
  peptide (1)..(204): Ceres Seq. ID no. 12369932
  misc_feature (27)..(169): Pfam Name: Domain of unknown function (DUF588) Pfam Description: Domain of unknown function (DUF588)
  misc_feature (12)..(181): Homolog of NCBI NO: 15239955 NR Description: putative protein; protein id: At5g06200.1
  misc_feature (61)..(114): Homolog of NCBI NO: 16973322 NR Description: hypothetical protein [Gossypium hirsutum]
  misc_feature (29)..(181): Homolog of NCBI NO: 15227576 NR Description: unknown protein; protein id: At2g36100.1
  misc_feature (3)..(196): Homolog of NCBI NO: 15240435 NR Description: putative protein; protein id: At5g54980.1
  misc_feature (31)..(188): Homolog of NCBI NO: 15231842 NR Description: unknown protein; protein id: At3g14380.1
  misc_feature (61)..(204): Homolog of NCBI NO: 14030504 NR Description: salicylic acid-induced fragment 1 protein
  misc_feature (13)..(202): Homolog of NCBI NO: 38344646 NR Description: OSJNBa0094P09.18 [Oryza sativa (japonica
  misc_feature (1)..(202): Homolog of NCBI NO: 16973324 NR Description: hypothetical protein [Gossypium hirsutum]
  misc_feature (1)..(204): Homolog of NCBI NO: 17380964 NR Description: unknown protein [Arabidopsis thaliana]
  misc_feature (1)..(204): Homolog of NCBI NO: 18394453 NR Description: expressed protein
MEKSNDHDKASHGGSGGGATEKWEETSLGIRTAETMLRLAPVGLCVAALVVMLKDSETNEFGSISYSNLTAFRYLVHANGICAGYSLLSAAIAAMPRSSSTMPRVWTFFCLDQLLTYLVLAAGAVSAEVLYLAYNGDSAITWSDACSSYGGFCHRATASVIITFFVVCFYIVLSLISSYKLFTRFDPPSIVDSAKNLEVAVFGS

SEQ ID NO: 21026 - protein, 169 aa, Arabidopsis thaliana
  peptide (1)..(169): Ceres Seq. ID no. 12369933
  misc_feature (1)..(134): Pfam Name: Domain of unknown function (DUF588) Pfam Description: Domain of unknown function (DUF588)
  misc_feature (1)..(146): Homolog of NCBI NO: 15239955 NR Description: putative protein; protein id: At5g06200.1
  misc_feature (26)..(79): Homolog of NCBI NO: 16973322 NR Description: hypothetical protein [Gossypium hirsutum]
  misc_feature (1)..(146): Homolog of NCBI NO: 15227576 NR Description: unknown protein; protein id: At2g36100.1
  misc_feature (1)..(161): Homolog of NCBI NO: 15240435 NR Description: putative protein; protein id: At5g54980.1
  misc_feature (1)..(153): Homolog of NCBI NO: 15231842 NR Description: unknown protein; protein id: At3g14380.1
  misc_feature (26)..(169): Homolog of NCBI NO: 14030504 NR Description: salicylic acid-induced fragment 1 protein
  misc_feature (1)..(167): Homolog of NCBI NO: 38344646 NR Description: OSJNBa0094P09.18 [Oryza sativa (japonica
  misc_feature (1)..(167): Homolog of NCBI NO: 16973324 NR Description: hypothetical protein [Gossypium hirsutum]
  misc_feature (1)..(169): Homolog of NCBI NO: 17380964 NR Description: unknown protein [Arabidopsis thaliana]
  misc_feature (1)..(169): Homolog of NCBI NO: 18394453 NR Description: expressed protein
MLRLAPVGLCVAALVVMLKDSETNEFGSISYSNLTAFRYLVHANGICAGYSLLSAAIAAMPRSSSTMPRVWTFFCLDQLLTYLVLAAGAVSAEVLYLAYNGDSAITWSDACSSYGGFCHRATASVIITFFVVCFYIVLSLISSYKLFTRFDPPSIVDSAKNLEVAVFGS

SEQ ID NO: 21027 - protein, 153 aa, Arabidopsis thaliana
  peptide (1)..(153): Ceres Seq. ID no. 12369934
  misc_feature (1)..(118): Pfam Name: Domain of unknown function (DUF588) Pfam Description: Domain of unknown function (DUF588)
  misc_feature (1)..(130): Homolog of NCBI NO: 15239955 NR Description: putative protein; protein id: At5g06200.1
  misc_feature (10)..(63): Homolog of NCBI NO: 16973322 NR Description: hypothetical protein [Gossypium hirsutum]
  misc_feature (1)..(130): Homolog of NCBI NO: 15227576 NR Description: unknown protein; protein id: At2g36100.1
  misc_feature (1)..(145): Homolog of NCBI NO: 15240435 NR Description: putative protein; protein id: At5g54980.1
  misc_feature (1)..(137): Homolog of NCBI NO: 15231842 NR Description: unknown protein; protein id: At3g14380.1
  misc_feature (10)..(153): Homolog of NCBI NO: 14030504 NR Description: salicylic acid-induced fragment 1 protein
  misc_feature (1)..(151): Homolog of NCBI NO: 38344646 NR Description: OSJNBa0094P09.18 [Oryza sativa (japonica
  misc_feature (1)..(151): Homolog of NCBI NO: 16973324 NR Description: hypothetical protein [Gossypium hirsutum]
  misc_feature (1)..(153): Homolog of NCBI NO: 17380964 NR Description: unknown protein [Arabidopsis thaliana]
  misc_feature (1)..(153): Homolog of NCBI NO: 18394453 NR Description: expressed protein
MLKDSETNEFGSISYSNLTAFRYLVHANGICAGYSLLSAAIAAMPRSSSTMPRVWTFFCLDQLLTYLVLAAGAVSAEVLYLAYNGDSAITWSDACSSYGGFCHRATASVIITFFVVCFYIVLSLISSYKLFTRFDPPSIVDSAKNLEVAVFGS

SEQ ID NO: 21028 - DNA, 1214 bp, Arabidopsis thaliana
  misc_feature (1)..(1214): Ceres Seq. ID no. 12334524
  misc_feature: MA Experiment ID: 108433 Result: Up-regulated in Transcription
  misc_feature: MA Experiment 108433 PARAMETER Experiment Name: At_rhl_Mutant2_cDNA_P Parameter: Age (day) Value: 7
  misc_feature: MA Experiment 108433 PARAMETER Experiment Name: At_rhl_Mutant2_cDNA_P Parameter: Organism Value: A. thaliana
  misc_feature: MA Experiment 108433 PARAMETER Experiment Name: At_rhl_Mutant2_cDNA_P Parameter: Plant Line Value: rhl Mutant vs. wt landsburg
  misc_feature: MA Experiment 108433 PARAMETER Experiment Name: At_rhl_Mutant2_cDNA_P Parameter: Tissue Value: Roots
  misc_feature: MA Experiment ID: 108585 Result: Up-regulated in Transcription
  misc_feature: MA Experiment 108585 PARAMETER Experiment Name: At_5mM_NaNP_cDNA_P Parameter: Timepoint (hr) Value: 6
  misc_feature: MA Experiment 108585 PARAMETER Experiment Name: At_5mM_NaNP_cDNA_P Parameter: Tissue Value: Aerial
  misc_feature: MA Experiment 108585 PARAMETER Experiment Name: At_5mM_NaNP_cDNA_P Parameter: Treatment Value: null
  misc_feature: MA Experiment ID: 108668 Result: Up-regulated in Transcription
  misc_feature: MA Experiment 108668 PARAMETER Experiment Name: At_2mM_SA_cDNA_P Parameter: Plant Line Value: WS
  misc_feature: MA Experiment 108668 PARAMETER Experiment Name: At_2mM_SA_cDNA_P Parameter: Timepoint (hr) Value: 6
  misc_feature: MA Experiment 108668 PARAMETER Experiment Name: At_2mM_SA_cDNA_P Parameter: Treatment Value: 2mM SA vs. No Treatment
  misc_feature: MA Experiment ID: 20000180 Result: Up-regulated in Transcription
  misc_feature: MA Experiment 20000180 PARAMETER Experiment Name: At_Germinating_Seeds_P Parameter: Age (hr) Value: 24 vs. 0
  misc_feature: MA Experiment 20000180 PARAMETER Experiment Name: At_Germinating_Seeds_P Parameter: Tissue Value: Germinating Seeds
  misc_feature: MA Experiment ID: 20000182 Result: Up-regulated in Transcription
  misc_feature: MA Experiment 20000182 PARAMETER Experiment Name: At_2mM_SA_P Parameter: Age (day) Value: 14
  misc_feature: MA Experiment 20000182 PARAMETER Experiment Name: At_2mM_SA_P Parameter: Organism Value: A. thaliana
  misc_feature: MA Experiment 20000182 PARAMETER Experiment Name: At_2mM_SA_P Parameter: Plant Line Value: WS
  misc_feature: MA Experiment 20000182 PARAMETER Experiment Name: At_2mM_SA_P Parameter: Timepoint (hr) Value: 6
  misc_feature: MA Experiment 20000182 PARAMETER Experiment Name: At_2mM_SA_P Parameter: Tissue Value: Aerial
  misc_feature: MA Experiment 20000182 PARAMETER Experiment Name: At_2mM_SA_P Parameter: Treatment Value: 2mM SA vs. No Treatment
  misc_feature: MA Experiment ID: 20000185 Result: Up-regulated in Transcription
  misc_feature: MA Experiment 20000185 PARAMETER Experiment Name: At_Roots__P Parameter: Age (day) Value: 7 vs. 21
  misc_feature: MA Experiment 20000185 PARAMETER Experiment Name: At_Roots__P Parameter: Organism Value: A. thaliana
  misc_feature: MA Experiment 20000185 PARAMETER Experiment Name: At_Roots__P Parameter: Tissue Value: Roots vs. Whole Plant
agtttcctttggatttcagatttcgtgagcttattcttacctttctctcgaaggaagctctcatcttttcactcagatcacgttccctgggcttattcgcttgtatctgttgatatacaagatggcatctgcgactctgagaaggcggcttcatcacggtgatgtagatgggaggaagtatgaacgctatgatgcaacagactctgaaactttaagtgaacccttgttaggaagtagtagtactgataatagtagaaatgagtacattgaggagcgtactctggaggatatttgggaagaagaacggaagagacagcaagttcactggacgttaatcttttctcagttgattgcacagtgggctcagtggatagccaaaatagtctttggatctggctcacttgttgggaggtttctttctctgcctacatttggtcaaataggtactggtgggaggcttctgccaccacctcttagtatgttgcaggaagaaaggctgagaaatattaagcgaagaatagaaatcccatttgatggatctcgaatggagcatcaagatgctcttagacaactatggaggctagcttatccacagagagaactaccacctcttaaatctgaactctggaaggaaatgggttggcaaggaacagacccttcaacagattttcgaggtggagggtatatatcactggagaatctaatcttctttgcgaagacctatccggaatcattccagagattgttacataaacaagatggaactagagcggaatgggaatatcctttcgcggtggctggcatcaatatctcattcatgctggcacaaatgttagatcttcaatcaggtaaaccatcaacaatagccgggataagattcttgggatttctggaagaagacgaaatggcattcgataatctctactgtatagctttccaaatgatggatgcacaatggcttgctagacgagcttcttacatggaattcaatgacgtcctgaaatcgacgagagcacaattggaacgtgagctggcactggatgatgtttcaagcatcacagacttgcctgctttcaatcttttgtacaaataaattgttaaatttcctacaatttctatctgtatttagataataattatctgagaaattcagtgtaacaaataatcagtttttgctgaaattgctcggcaagtataatttcatcagaagattt

SEQ ID NO: 21029 - protein, 323 aa, Arabidopsis thaliana
  peptide (1)..(323): Ceres Seq. ID no. 12334525
  misc_feature (142)..(303): Pfam Name: Protein of unknown function, DUF609 Pfam Description: Protein of unknown function, DUF609
  misc_feature (85)..(321): Homolog of NCBI NO: 15810014 NR Description: At2g44770/F16B22.26 [Arabidopsis thaliana]
  misc_feature (118)..(321): Homolog of NCBI NO: 18408759 NR Description: hypothetical protein; protein id: At1g67400.1
  misc_feature (85)..(321): Homolog of NCBI NO: 18406626 NR Description: expressed protein
  misc_feature (85)..(321): Homolog of NCBI NO: 14140119 NR Description: putative protein [Oryza sativa]
  misc_feature (85)..(321): Homolog of NCBI NO: 18411543 NR Description: putative protein
  misc_feature (118)..(323): Homolog of NCBI NO: 38344760 NR Description: OSJNBa0068L06.3 [Oryza sativa (japonica
  misc_feature (118)..(323): Homolog of NCBI NO: 15218859 NR Description: hypothetical protein; protein id: At1g03620.1
  misc_feature (142)..(323): Homolog of NCBI NO: 6091761 NR Description: hypothetical protein [Arabidopsis thaliana]
  misc_feature (1)..(323): Homolog of NCBI NO: 21555509 NR Description: unknown [Arabidopsis thaliana]
  misc_feature (1)..(323): Homolog of NCBI NO: 18396599 NR Description: expressed protein
MASATLRRRLHHGDVDGRKYERYDATDSETLSEPLLGSSSTDNSRNEYIEERTLEDIWEEERKRQQVHWTLIFSQLIAQWAQWIAKIVFGSGSLVGRFLSLPTFGQIGTGGRLLPPPLSMLQEERLRNIKRRIEIPFDGSRMEHQDALRQLWRLAYPQRELPPLKSELWKEMGWQGTDPSTDFRGGGYISLENLIFFAKTYPESFQRLLHKQDGTRAEWEYPFAVAGINISFMLAQMLDLQSGKPSTIAGIRFLGFLEEDEMAFDNLYCIAFQMMDAQWLARRASYMEFNDVLKSTRAQLERELALDDVSSITDLPAFNLLYK

SEQ ID NO: 21030 - protein, 204 aa, Arabidopsis thaliana
  peptide (1)..(204): Ceres Seq. ID no. 12334526
  misc_feature (23)..(184): Pfam Name: Protein of unknown function, DUF609 Pfam Description: Protein of unknown function, DUF609
  misc_feature (1)..(202): Homolog of NCBI NO: 15810014 NR Description: At2g44770/F16B22.26 [Arabidopsis thaliana]
  misc_feature (1)..(202): Homolog of NCBI NO: 18408759 NR Description: hypothetical protein; protein id: At1g67400.1
  misc_feature (1)..(202): Homolog of NCBI NO: 18406626 NR Description: expressed protein
  misc_feature (1)..(202): Homolog of NCBI NO: 14140119 NR Description: putative protein [Oryza sativa]
  misc_feature (1)..(202): Homolog of NCBI NO: 18411543 NR Description: putative protein
  misc_feature (1)..(204): Homolog of NCBI NO: 38344760 NR Description: OSJNBa0068L06.3 [Oryza sativa (japonica
  misc_feature (1)..(204): Homolog of NCBI NO: 15218859 NR Description: hypothetical protein; protein id: At1g03620.1
  misc_feature (23)..(204): Homolog of NCBI NO: 6091761 NR Description: hypothetical protein [Arabidopsis thaliana]
  misc_feature (1)..(204): Homolog of NCBI NO: 21555509 NR Description: unknown [Arabidopsis thaliana]
  misc_feature (1)..(204): Homolog of NCBI NO: 18396599 NR Description: expressed protein
MLQEERLRNIKRRIEIPFDGSRMEHQDALRQLWRLAYPQRELPPLKSELWKEMGWQGTDPSTDFRGGGYISLENLIFFAKTYPESFQRLLHKQDGTRAEWEYPFAVAGINISFMLAQMLDLQSGKPSTIAGIRFLGFLEEDEMAFDNLYCIAFQMMDAQWLARRASYMEFNDVLKSTRAQLERELALDDVSSITDLPAFNLLYK

SEQ ID NO: 21031 - protein, 182 aa, Arabidopsis thaliana
  peptide (1)..(182): Ceres Seq. ID no. 12334527
  misc_feature (1)..(162): Pfam Name: Protein of unknown function, DUF609 Pfam Description: Protein of unknown function, DUF609
  misc_feature (1)..(180): Homolog of NCBI NO: 14140119 NR Description: putative protein [Oryza sativa]
  misc_feature (1)..(180): Homolog of NCBI NO: 18411543 NR Description: putative protein
  misc_feature (1)..(182): Homolog of NCBI NO: 38344760 NR Description: OSJNBa0068L06.3 [Oryza sativa (japonica
  misc_feature (1)..(182): Homolog of NCBI NO: 15218859 NR Description: hypothetical protein; protein id: At1g03620.1
  misc_feature (1)..(180): Homolog of NCBI NO: 18408759 NR Description: hypothetical protein; protein id: At1g67400.1
  misc_feature (1)..(180): Homolog of NCBI NO: 18406626 NR Description: expressed protein
  misc_feature (1)..(180): Homolog of NCBI NO: 15810014 NR Description: At2g44770/F16B22.26 [Arabidopsis thaliana]
  misc_feature (1)..(182): Homolog of NCBI NO: 6091761 NR Description: hypothetical protein [Arabidopsis thaliana]
  misc_feature (1)..(182): Homolog of NCBI NO: 21555509 NR Description: unknown [Arabidopsis thaliana]
  misc_feature (1)..(182): Homolog of NCBI NO: 18396599 NR Description: expressed protein
MEHQDALRQLWRLAYPQRELPPLKSELWKEMGWQGTDPSTDFRGGGYISLENLIFFAKTYPESFQRLLHKQDGTRAEWEYPFAVAGINISFMLAQMLDLQSGKPSTIAGIRFLGFLEEDEMAFDNLYCIAFQMMDAQWLARRASYMEFNDVLKSTRAQLERELALDDVSSITDLPAFNLLYK

SEQ ID NO: 21032 - DNA, 1104 bp, Arabidopsis thaliana
  misc_feature (1)..(1104): Ceres Seq. ID no. 12483988
  misc_feature: MA Experiment ID: 108561 Result: Up-regulated in Transcription
  misc_feature: MA Experiment 108561 PARAMETER Experiment Name: At_100uM_ABA_cDNA_P Parameter: Timepoint (hr) Value: 6
  misc_feature: MA Experiment 108561 PARAMETER Experiment Name: At_100uM_ABA_cDNA_P Parameter: Tissue Value: Aerial
  misc_feature: MA Experiment 108561 PARAMETER Experiment Name: At_100uM_ABA_cDNA_P Parameter: Treatment Value: 100uM ABA vs. No Treatment
  misc_feature: MA Experiment ID: 108572 Result: Down-regulated in Transcription
  misc_feature: MA Experiment 108572 PARAMETER Experiment Name: At_Drought_cDNA_P Parameter: Timepoint (hr) Value: 1
  misc_feature: MA Experiment 108572 PARAMETER Experiment Name: At_Drought_cDNA_P Parameter: Tissue Value: Aerial
  misc_feature: MA Experiment 108572 PARAMETER Experiment Name: At_Drought_cDNA_P Parameter: Treatment Value: Drought vs. No Drought
  misc_feature: MA Experiment ID: 108573 Result: Down-regulated in Transcription
  misc_feature: MA Experiment 108573 PARAMETER Experiment Name: At_Drought_cDNA_P Parameter: Timepoint (hr) Value: 6
  misc_feature: MA Experiment 108573 PARAMETER Experiment Name: At_Drought_cDNA_P Parameter: Tissue Value: Aerial
  misc_feature: MA Experiment 108573 PARAMETER Experiment Name: At_Drought_cDNA_P Parameter: Treatment Value: Drought vs. No Drought
  misc_feature: MA Experiment ID: 108579 Result: Up-regulated in Transcription
  misc_feature: MA Experiment 108579 PARAMETER Experiment Name: At_4deg_Cold_cDNA_P Parameter: Temperature (deg C) Value: 4 vs. 22
  misc_feature: MA Experiment 108579 PARAMETER Experiment Name: At_4deg_Cold_cDNA_P Parameter: Timepoint (hr) Value: 6
  misc_feature: MA Experiment 108579 PARAMETER Experiment Name: At_4deg_Cold_cDNA_P Parameter: Tissue Value: Aerial
  misc_feature: MA Experiment ID: 108585 Result: Up-regulated in Transcription
  misc_feature: MA Experiment 108585 PARAMETER Experiment Name: At_5mM_NaNP_cDNA_P Parameter: Timepoint (hr) Value: 6
  misc_feature: MA Experiment 108585 PARAMETER Experiment Name: At_5mM_NaNP_cDNA_P Parameter: Tissue Value: Aerial
  misc_feature: MA Experiment 108585 PARAMETER Experiment Name: At_5mM_NaNP_cDNA_P Parameter: Treatment Value: null
  misc_feature: MA Experiment ID: 108594 Result: Down-regulated in Transcription
  misc_feature: MA Experiment 108594 PARAMETER Experiment Name: At_Ler-rhl_Root_cDNA_P Parameter: Plant Line Value: null
  misc_feature: MA Experiment ID: 20000169 Result: Up-regulated in Transcription
  misc_feature: MA Experiment 20000169 PARAMETER Experiment Name: At_100uM_ABA_P Parameter: Age (day) Value: 14
  misc_feature: MA Experiment 20000169 PARAMETER Experiment Name: At_100uM_ABA_P Parameter: Organism Value: A. thaliana
  misc_feature: MA Experiment 20000169 PARAMETER Experiment Name: At_100uM_ABA_P Parameter: Plant Line Value: WS
  misc_feature: MA Experiment 20000169 PARAMETER Experiment Name: At_100uM_ABA_P Parameter: Timepoint (hr) Value: 6
  misc_feature: MA Experiment 20000169 PARAMETER Experiment Name: At_100uM_ABA_P Parameter: Tissue Value: Aerial
  misc_feature: MA Experiment 20000169 PARAMETER Experiment Name: At_100uM_ABA_P Parameter: Treatment Value: 100uM ABA vs. No Treatment
  misc_feature: MA Experiment ID: 20000179 Result: Up-regulated in Transcription
  misc_feature: MA Experiment 20000179 PARAMETER Experiment Name: At_Germinating_Seeds_P Parameter: Age (hr) Value: 6 vs. 0
  misc_feature: MA Experiment 20000179 PARAMETER Experiment Name: At_Germinating_Seeds_P Parameter: Tissue Value: Germinating Seeds
  misc_feature: MA Experiment ID: 20000180 Result: Up-regulated in Transcription
  misc_feature: MA Experiment 20000180 PARAMETER Experiment Name: At_Germinating_Seeds_P Parameter: Age (hr) Value: 24 vs. 0
  misc_feature: MA Experiment 20000180 PARAMETER Experiment Name: At_Germinating_Seeds_P Parameter: Tissue Value: Germinating Seeds
  misc_feature: MA Experiment ID: 20000184 Result: Down-regulated in Transcription
  misc_feature: MA Experiment 20000184 PARAMETER Experiment Name: At_Shoots__P Parameter: Age (day) Value: 7
  misc_feature: MA Experiment 20000184 PARAMETER Experiment Name: At_Shoots__P Parameter: Tissue Value: Shoots vs. Whole Plant
  misc_feature: MA Experiment ID: 20000185 Result: Down-regulated in Transcription
  misc_feature: MA Experiment 20000185 PARAMETER Experiment Name: At_Roots__P Parameter: Age (day) Value: 7 vs. 21
  misc_feature: MA Experiment 20000185 PARAMETER Experiment Name: At_Roots__P Parameter: Organism Value: A. thaliana
  misc_feature: MA Experiment 20000185 PARAMETER Experiment Name: At_Roots__P Parameter: Tissue Value: Roots vs. Whole Plant
  misc_feature: MA Experiment ID: 20000234 Result: Down-regulated in Transcription
  misc_feature: MA Experiment 20000234 PARAMETER Experiment Name: At_Siliques_P Parameter: Age (day) Value: 21
  misc_feature: MA Experiment 20000234 PARAMETER Experiment Name: At_Siliques_P Parameter: Organism Value: A. thaliana
  misc_feature: MA Experiment 20000234 PARAMETER Experiment Name: At_Siliques_P Parameter: Plant Line Value: WS
  misc_feature: MA Experiment 20000234 PARAMETER Experiment Name: At_Siliques_P Parameter: Tissue Value: Less Than 5mm Siliques vs. Whole Plant
  misc_feature: MA Experiment ID: 20000235 Result: Down-regulated in Transcription
  misc_feature: MA Experiment 20000235 PARAMETER Experiment Name: At_Siliques_P Parameter: Age (day) Value: 21
  misc_feature: MA Experiment 20000235 PARAMETER Experiment Name: At_Siliques_P Parameter: Organism Value: A. thaliana
  misc_feature: MA Experiment 20000235 PARAMETER Experiment Name: At_Siliques_P Parameter: Plant Line Value: WS
  misc_feature: MA Experiment 20000235 PARAMETER Experiment Name: At_Siliques_P Parameter: Tissue Value: 5-10mm Siliques vs. Whole Plant
  misc_feature: MA Experiment ID: 20000264 Result: Up-regulated in Transcription
  misc_feature: MA Experiment 20000264 PARAMETER Experiment Name: At_Open_Flower_P Parameter: Age (day) Value: 21
  misc_feature: MA Experiment 20000264 PARAMETER Experiment Name: At_Open_Flower_P Parameter: Plant Line Value: WS
  misc_feature: MA Experiment 20000264 PARAMETER Experiment Name: At_Open_Flower_P Parameter: Tissue Value: Open Flower vs. Whole Plant
  misc_feature: MA Experiment ID: 20000265 Result: Down-regulated in Transcription
  misc_feature: MA Experiment 20000265 PARAMETER Experiment Name: At_Open_Flower_P Parameter: Age (day) Value: 21
  misc_feature: MA Experiment 20000265 PARAMETER Experiment Name: At_Open_Flower_P Parameter: Plant Line Value: WS
  misc_feature: MA Experiment 20000265 PARAMETER Experiment Name: At_Open_Flower_P Parameter: Tissue Value: Closed Flower vs. Whole Plant
  misc_feature: MA Experiment ID: 20000268 Result: Down-regulated in Transcription
  misc_feature: MA Experiment 20000268 PARAMETER Experiment Name: At_100mM_NaCl__P Parameter: Age (day) Value: 14
  misc_feature: MA Experiment 20000268 PARAMETER Experiment Name: At_100mM_NaCl__P Parameter: Organism Value: A. thaliana
  misc_feature: MA Experiment 20000268 PARAMETER Experiment Name: At_100mM_NaCl__P Parameter: Plant Line Value: WS
  misc_feature: MA Experiment 20000268 PARAMETER Experiment Name: At_100mM_NaCl__P Parameter: Timepoint (hr) Value: 6
  misc_feature: MA Experiment 20000268 PARAMETER Experiment Name: At_100mM_NaCl__P Parameter: Tissue Value: Whole Plant
  misc_feature: MA Experiment 20000268 PARAMETER Experiment Name: At_100mM_NaCl__P Parameter: Treatment Value: 100mM NaCl vs. No Treatment
  misc_feature: MA Experiment ID: 20000286 Result: Down-regulated in Transcription
  misc_feature: MA Experiment 20000286 PARAMETER Experiment Name: At_Open_Flower_P Parameter: Age (day) Value: 21
  misc_feature: MA Experiment 20000286 PARAMETER Experiment Name: At_Open_Flower_P Parameter: Plant Line Value: WS
  misc_feature: MA Experiment 20000286 PARAMETER Experiment Name: At_Open_Flower_P Parameter: Tissue Value: Half Open vs. Whole Plant
  misc_feature: MA Experiment ID: 20000436 Result: Down-regulated in Transcription
  misc_feature: MA Experiment 20000436 PARAMETER Experiment Name: At_Drought_P Parameter: Age (day) Value: 7
  misc_feature: MA Experiment 20000436 PARAMETER Experiment Name: At_Drought_P Parameter: Organism Value: A. thaliana
  misc_feature: MA Experiment 20000436 PARAMETER Experiment Name: At_Drought_P Parameter: Plant Line Value: WS
  misc_feature: MA Experiment 20000436 PARAMETER Experiment Name: At_Drought_P Parameter: Timepoint (hr) Value: 12
  misc_feature: MA Experiment 20000436 PARAMETER Experiment Name: At_Drought_P Parameter: Tissue Value: Whole Plant
  misc_feature: MA Experiment 20000436 PARAMETER Experiment Name: At_Drought_P Parameter: Treatment Value: Drought vs. No Drought
  misc_feature: MA Experiment ID: 20000437 Result: Down-regulated in Transcription
  misc_feature: MA Experiment 20000437 PARAMETER Experiment Name: At_Drought_P Parameter: Age (day) Value: 8
  misc_feature: MA Experiment 20000437 PARAMETER Experiment Name: At_Drought_P Parameter: Organism Value: A. thaliana
  misc_feature: MA Experiment 20000437 PARAMETER Experiment Name: At_Drought_P Parameter: Plant Line Value: WS
  misc_feature: MA Experiment 20000437 PARAMETER Experiment Name: At_Drought_P Parameter: Timepoint (hr) Value: 24
  misc_feature: MA Experiment 20000437 PARAMETER Experiment Name: At_Drought_P Parameter: Tissue Value: Whole Plant
  misc_feature: MA Experiment 20000437 PARAMETER Experiment Name: At_Drought_P Parameter: Treatment Value: Drought vs. No Drought
  misc_feature: MA Experiment ID: 20000438 Result: Down-regulated in Transcription
  misc_feature: MA Experiment 20000438 PARAMETER Experiment Name: At_Shoots__P Parameter: Age (day) Value: 14
  misc_feature: MA Experiment 20000438 PARAMETER Experiment Name: At_Shoots__P Parameter: Tissue Value: Shoots vs. Whole Plant
  misc_feature: MA Experiment ID: 20000441 Result: Up-regulated in Transcription
  misc_feature: MA Experiment 20000441 PARAMETER Experiment Name: At_1uM_BR-BRZ__P Parameter: Tissue Value: Shoot Apices
  misc_feature: MA Experiment 20000441 PARAMETER Experiment Name: At_1uM_BR-BRZ__P Parameter: Treatment Value: 1uM BR vs. No Treatment
  misc_feature: MA Experiment ID: 20000443 Result: Up-regulated in Transcription
  misc_feature: MA Experiment 20000443 PARAMETER Experiment Name: At_1uM_BR-BRZ__P Parameter: Tissue Value: Shoot Apices
  misc_feature: MA Experiment 20000443 PARAMETER Experiment Name: At_1uM_BR-BRZ__P Parameter: Treatment Value: 1uM BRZ vs. No Treatment
  misc_feature: MA Experiment ID: 20000453 Result: Up-regulated in Transcription
  misc_feature: MA Experiment 20000453 PARAMETER Experiment Name: At_100uM_ABA_P Parameter: Age (day) Value: 15
  misc_feature: MA Experiment 20000453 PARAMETER Experiment Name: At_100uM_ABA_P Parameter: Organism Value: A. thaliana
  misc_feature: MA Experiment 20000453 PARAMETER Experiment Name: At_100uM_ABA_P Parameter: Plant Line Value: WS
  misc_feature: MA Experiment 20000453 PARAMETER Experiment Name: At_100uM_ABA_P Parameter: Timepoint (hr) Value: 24
  misc_feature: MA Experiment 20000453 PARAMETER Experiment Name: At_100uM_ABA_P Parameter: Tissue Value: Aerial
  misc_feature: MA Experiment 20000453 PARAMETER Experiment Name: At_100uM_ABA_P Parameter: Treatment Value: 100uM ABA vs. No Treatment
  misc_feature: MA Experiment ID: 20000495 Result: Down-regulated in Transcription
  misc_feature: MA Experiment 20000495 PARAMETER Experiment Name: At_Guard_Cells_P Parameter: Harvest Date Value: 8/2/2002
  misc_feature: MA Experiment 20000495 PARAMETER Experiment Name: At_Guard_Cells_P Parameter: Organism Value: A. thaliana
  misc_feature: MA Experiment 20000495 PARAMETER Experiment Name: At_Guard_Cells_P Parameter: Tissue Value: Guard Cells vs. Leaves
  misc_feature: MA Experiment ID: 20000573 Result: Up-regulated in Transcription
  misc_feature: MA Experiment 20000573 PARAMETER Experiment Name: At_100uM_ABA_Mutants__P Parameter: Organism Value: A. thaliana
  misc_feature: MA Experiment 20000573 PARAMETER Experiment Name: At_100uM_ABA_Mutants__P Parameter: Plant Line Value: CS22 vs. Ler wt
  misc_feature: MA Experiment 20000573 PARAMETER Experiment Name: At_100uM_ABA_Mutants__P Parameter: Timepoint (hr) Value: N/A
  misc_feature: MA Experiment 20000573 PARAMETER Experiment Name: At_100uM_ABA_Mutants__P Parameter: Tissue Value: Whole Plant
  misc_feature: MA Experiment 20000573 PARAMETER Experiment Name: At_100uM_ABA_Mutants__P Parameter: Treatment Value: None
  misc_feature: MA Experiment ID: 20000574 Result: Up-regulated in Transcription
  misc_feature: MA Experiment 20000574 PARAMETER Experiment Name: At_100uM_ABA_Mutants__P Parameter: Organism Value: A. thaliana
  misc_feature: MA Experiment 20000574 PARAMETER Experiment Name: At_100uM_ABA_Mutants__P Parameter: Plant Line Value: CS23 vs. Ler wt
  misc_feature: MA Experiment 20000574 PARAMETER Experiment Name: At_100uM_ABA_Mutants__P Parameter: Timepoint (hr) Value: N/A
  misc_feature: MA Experiment 20000574 PARAMETER Experiment Name: At_100uM_ABA_Mutants__P Parameter: Tissue Value: Whole Plant
  misc_feature: MA Experiment 20000574 PARAMETER Experiment Name: At_100uM_ABA_Mutants__P Parameter: Treatment Value: None
  misc_feature: MA Experiment ID: 20000794 Result: Up-regulated in Transcription
  misc_feature: MA Experiment 20000794 PARAMETER Experiment Name: At_Petals_P Parameter: Age (day) Value: 23-25 days
  misc_feature: MA Experiment 20000794 PARAMETER Experiment Name: At_Petals_P Parameter: Plant Line Value: WS
  misc_feature: MA Experiment 20000794 PARAMETER Experiment Name: At_Petals_P Parameter: Tissue Value: Petals vs. Whole plant
  misc_feature: MA Experiment ID: 20001248 Result: Up-regulated in Transcription
  misc_feature: MA Experiment 20001248 PARAMETER Experiment Name: At_Far-red-induction_P Parameter: Age (day) Value: 7
  misc_feature: MA Experiment 20001248 PARAMETER Experiment Name: At_Far-red-induction_P Parameter: Light Value: Far-red vs. White
  misc_feature: MA Experiment 20001248 PARAMETER Experiment Name: At_Far-red-induction_P Parameter: Organism Value: A. thaliana
  misc_feature: MA Experiment 20001248 PARAMETER Experiment Name: At_Far-red-induction_P Parameter: Plant Line Value: Columbia
  misc_feature: MA Experiment 20001248 PARAMETER Experiment Name: At_Far-red-induction_P Parameter: Timepoint (hr) Value: 4
  misc_feature: MA Experiment 20001248 PARAMETER Experiment Name: At_Far-red-induction_P Parameter: Tissue Value: Whole Plant
  misc_feature: MA Experiment ID: 20001450 Result: Up-regulated in Transcription
  misc_feature: MA Experiment 20001450 PARAMETER Experiment Name: At_Far-red-induction_P Parameter: Age (day) Value: 7
  misc_feature: MA Experiment 20001450 PARAMETER Experiment Name: At_Far-red-induction_P Parameter: Light Value: Far-red vs. White
  misc_feature: MA Experiment 20001450 PARAMETER Experiment Name: At_Far-red-induction_P Parameter: Organism Value: A. thaliana
  misc_feature: MA Experiment 20001450 PARAMETER Experiment Name: At_Far-red-induction_P Parameter: Plant Line Value: Columbia
  misc_feature: MA Experiment 20001450 PARAMETER Experiment Name: At_Far-red-induction_P Parameter: Timepoint (hr) Value: 8
  misc_feature: MA Experiment 20001450 PARAMETER Experiment Name: At_Far-red-induction_P Parameter: Tissue Value: Whole Plant
  misc_feature: MA Experiment ID: 20001451 Result: Up-regulated in Transcription
  misc_feature: MA Experiment 20001451 PARAMETER Experiment Name: At_Far-red-induction_P Parameter: Age (day) Value: 7
  misc_feature: MA Experiment 20001451 PARAMETER Experiment Name: At_Far-red-induction_P Parameter: Light Value: Far-red vs. White
  misc_feature: MA Experiment 20001451 PARAMETER Experiment Name: At_Far-red-induction_P Parameter: Organism Value: A. thaliana
  misc_feature: MA Experiment 20001451 PARAMETER Experiment Name: At_Far-red-induction_P Parameter: Plant Line Value: Columbia
  misc_feature: MA Experiment 20001451 PARAMETER Experiment Name: At_Far-red-induction_P Parameter: Timepoint (hr) Value: 24
  misc_feature: MA Experiment 20001451 PARAMETER Experiment Name: At_Far-red-induction_P Parameter: Tissue Value: Whole Plant
  misc_feature: MA Experiment ID: 20001554 Result: Down-regulated in Transcription
  misc_feature: MA Experiment 20001554 PARAMETER Experiment Name: At_Drought_Soil_Dry_P Parameter: Age (day) Value: 21
  misc_feature: MA Experiment 20001554 PARAMETER Experiment Name: At_Drought_Soil_Dry_P Parameter: Organism Value: A. thaliana
  misc_feature: MA Experiment 20001554 PARAMETER Experiment Name: At_Drought_Soil_Dry_P Parameter: Plant Line Value: WS
  misc_feature: MA Experiment 20001554 PARAMETER Experiment Name: At_Drought_Soil_Dry_P Parameter: Post Timepoint (hr) Value: None
  misc_feature: MA Experiment 20001554 PARAMETER Experiment Name: At_Drought_Soil_Dry_P Parameter: Post-Treatment Value: None
  misc_feature: MA Experiment 20001554 PARAMETER Experiment Name: At_Drought_Soil_Dry_P Parameter: Timepoint (day) Value: 7
  misc_feature: MA Experiment 20001554 PARAMETER Experiment Name: At_Drought_Soil_Dry_P Parameter: Treatment Value: Drought vs. No Drought
  misc_feature: MA Experiment ID: 20001555 Result: Down-regulated in Transcription
  misc_feature: MA Experiment 20001555 PARAMETER Experiment Name: At_Drought_Soil_Dry_P Parameter: Age (day) Value: 24
  misc_feature: MA Experiment 20001555 PARAMETER Experiment Name: At_Drought_Soil_Dry_P Parameter: Organism Value: A. thaliana
  misc_feature: MA Experiment 20001555 PARAMETER Experiment Name: At_Drought_Soil_Dry_P Parameter: Plant Line Value: WS
  misc_feature: MA Experiment 20001555 PARAMETER Experiment Name: At_Drought_Soil_Dry_P Parameter: Post Timepoint (hr) Value: None
  misc_feature: MA Experiment 20001555 PARAMETER Experiment Name: At_Drought_Soil_Dry_P Parameter: Post-Treatment Value: None
  misc_feature: MA Experiment 20001555 PARAMETER Experiment Name: At_Drought_Soil_Dry_P Parameter: Timepoint (day) Value: 10
  misc_feature: MA Experiment 20001555 PARAMETER Experiment Name: At_Drought_Soil_Dry_P Parameter: Treatment Value: Drought vs. No Drought
  misc_feature: MA Experiment ID: 20001556 Result: Down-regulated in Transcription
  misc_feature: MA Experiment 20001556 PARAMETER Experiment Name: At_Drought_Soil_Dry_P Parameter: Age (day) Value: 26
  misc_feature: MA Experiment 20001556 PARAMETER Experiment Name: At_Drought_Soil_Dry_P Parameter: Organism Value: A. thaliana
  misc_feature: MA Experiment 20001556 PARAMETER Experiment Name: At_Drought_Soil_Dry_P Parameter: Plant Line Value: WS
  misc_feature: MA Experiment 20001556 PARAMETER Experiment Name: At_Drought_Soil_Dry_P Parameter: Post Timepoint (hr) Value: None
  misc_feature: MA Experiment 20001556 PARAMETER Experiment Name: At_Drought_Soil_Dry_P Parameter: Post-Treatment Value: None
  misc_feature: MA Experiment 20001556 PARAMETER Experiment Name: At_Drought_Soil_Dry_P Parameter: Timepoint (day) Value: 12
  misc_feature: MA Experiment 20001556 PARAMETER Experiment Name: At_Drought_Soil_Dry_P Parameter: Treatment Value: Drought vs. No Drought
  misc_feature: MA Experiment ID: 20001557 Result: Down-regulated in Transcription
  misc_feature: MA Experiment 20001557 PARAMETER Experiment Name: At_Drought_Soil_Dry_P Parameter: Age (day) Value: 27
  misc_feature: MA Experiment 20001557 PARAMETER Experiment Name: At_Drought_Soil_Dry_P Parameter: Organism Value: A. thaliana
  misc_feature: MA Experiment 20001557 PARAMETER Experiment Name: At_Drought_Soil_Dry_P Parameter: Plant Line Value: WS
  misc_feature: MA Experiment 20001557 PARAMETER Experiment Name: At_Drought_Soil_Dry_P Parameter: Post Timepoint (hr) Value: 3
  misc_feature: MA Experiment 20001557 PARAMETER Experiment Name: At_Drought_Soil_Dry_P Parameter: Post-Treatment Value: Re-Water vs. No Drought
  misc_feature: MA Experiment 20001557 PARAMETER Experiment Name: At_Drought_Soil_Dry_P Parameter: Timepoint (day) Value: 13
  misc_feature: MA Experiment 20001557 PARAMETER Experiment Name: At_Drought_Soil_Dry_P Parameter: Treatment Value: Drought vs. No Drought
  misc_feature: MA Experiment ID: 20001559 Result: Down-regulated in Transcription
  misc_feature: MA Experiment 20001559 PARAMETER Experiment Name: At_Drought_Soil_Dry_P Parameter: Age (day) Value: 28
  misc_feature: MA Experiment 20001559 PARAMETER Experiment Name: At_Drought_Soil_Dry_P Parameter: Organism Value: A. thaliana
  misc_feature: MA Experiment 20001559 PARAMETER Experiment Name: At_Drought_Soil_Dry_P Parameter: Plant Line Value: WS
  misc_feature: MA Experiment 20001559 PARAMETER Experiment Name: At_Drought_Soil_Dry_P Parameter: Post Timepoint (hr) Value: 29
  misc_feature: MA Experiment 20001559 PARAMETER Experiment Name: At_Drought_Soil_Dry_P Parameter: Post-Treatment Value: Re-Water vs. No Drought
  misc_feature: MA Experiment 20001559 PARAMETER Experiment Name: At_Drought_Soil_Dry_P Parameter: Timepoint (day) Value: 14
  misc_feature: MA Experiment 20001559 PARAMETER Experiment Name: At_Drought_Soil_Dry_P Parameter: Treatment Value: Drought vs. No Drought
  misc_feature: MA Experiment ID: 20001904 Result: Down-regulated in Transcription
  misc_feature: MA Experiment 20001904 PARAMETER Experiment Name: At_Drought_Reproduction_P Parameter: Age (day) Value: 37
  misc_feature: MA Experiment 20001904 PARAMETER Experiment Name: At_Drought_Reproduction_P Parameter: Organism Value: A. thaliana
  misc_feature: MA Experiment 20001904 PARAMETER Experiment Name: At_Drought_Reproduction_P Parameter: Plant Line Value: WS
  misc_feature: MA Experiment 20001904 PARAMETER Experiment Name: At_Drought_Reproduction_P Parameter: Timepoint (day) Value: 7
  misc_feature: MA Experiment 20001904 PARAMETER Experiment Name: At_Drought_Reproduction_P Parameter: Tissue Value: Rosettes
  misc_feature: MA Experiment 20001904 PARAMETER Experiment Name: At_Drought_Reproduction_P Parameter: Treatment Value: Drought vs. No Drought
  misc_feature: MA Experiment ID: 20001905 Result: Down-regulated in Transcription
  misc_feature: MA Experiment 20001905 PARAMETER Experiment Name: At_Drought_Reproduction_P Parameter: Age (day) Value: 40
  misc_feature: MA Experiment 20001905 PARAMETER Experiment Name: At_Drought_Reproduction_P Parameter: Organism Value: A. thaliana
  misc_feature: MA Experiment 20001905 PARAMETER Experiment Name: At_Drought_Reproduction_P Parameter: Plant Line Value: WS
  misc_feature: MA Experiment 20001905 PARAMETER Experiment Name: At_Drought_Reproduction_P Parameter: Timepoint (day) Value: 10
  misc_feature: MA Experiment 20001905 PARAMETER Experiment Name: At_Drought_Reproduction_P Parameter: Tissue Value: Rosettes
  misc_feature: MA Experiment 20001905 PARAMETER Experiment Name: At_Drought_Reproduction_P Parameter: Treatment Value: Drought vs. No Drought
  misc_feature: MA Experiment ID: 20001906 Result: Down-regulated in Transcription
  misc_feature: MA Experiment 20001906 PARAMETER Experiment Name: At_Drought_Reproduction_P Parameter: Age (day) Value: 35
  misc_feature: MA Experiment 20001906 PARAMETER Experiment Name: At_Drought_Reproduction_P Parameter: Organism Value: A. thaliana
  misc_feature: MA Experiment 20001906 PARAMETER Experiment Name: At_Drought_Reproduction_P Parameter: Plant Line Value: WS
  misc_feature: MA Experiment 20001906 PARAMETER Experiment Name: At_Drought_Reproduction_P Parameter: Timepoint (day) Value: 5
  misc_feature: MA Experiment 20001906 PARAMETER Experiment Name: At_Drought_Reproduction_P Parameter: Tissue Value: Siliques
  misc_feature: MA Experiment 20001906 PARAMETER Experiment Name: At_Drought_Reproduction_P Parameter: Treatment Value: Drought vs. No Drought
  misc_feature: MA Experiment ID: 20001907 Result: Down-regulated in Transcription
  misc_feature: MA Experiment 20001907 PARAMETER Experiment Name: At_Drought_Reproduction_P Parameter: Age (day) Value: 37
  misc_feature: MA Experiment 20001907 PARAMETER Experiment Name: At_Drought_Reproduction_P Parameter: Organism Value: A. thaliana
  misc_feature: MA Experiment 20001907 PARAMETER Experiment Name: At_Drought_Reproduction_P Parameter: Plant Line Value: WS
  misc_feature: MA Experiment 20001907 PARAMETER Experiment Name: At_Drought_Reproduction_P Parameter: Timepoint (day) Value: 7
  misc_feature: MA Experiment 20001907 PARAMETER Experiment Name: At_Drought_Reproduction_P Parameter: Tissue Value: Siliques
  misc_feature: MA Experiment 20001907 PARAMETER Experiment Name: At_Drought_Reproduction_P Parameter: Treatment Value: Drought vs. No Drought
  misc_feature: MA Experiment ID: 20001908 Result: Down-regulated in Transcription
  misc_feature: MA Experiment 20001908 PARAMETER Experiment Name: At_Drought_Reproduction_P Parameter: Age (day) Value: 40
  misc_feature: MA Experiment 20001908 PARAMETER Experiment Name: At_Drought_Reproduction_P Parameter: Organism Value: A. thaliana
  misc_feature: MA Experiment 20001908 PARAMETER Experiment Name: At_Drought_Reproduction_P Parameter: Plant Line Value: WS
  misc_feature: MA Experiment 20001908 PARAMETER Experiment Name: At_Drought_Reproduction_P Parameter: Timepoint (day) Value: 10
  misc_feature: MA Experiment 20001908 PARAMETER Experiment Name: At_Drought_Reproduction_P Parameter: Tissue Value: Siliques
  misc_feature: MA Experiment 20001908 PARAMETER Experiment Name: At_Drought_Reproduction_P Parameter: Treatment Value: Drought vs. No Drought
  misc_feature: MA Experiment ID: 20001910 Result: Down-regulated in Transcription
  misc_feature: MA Experiment 20001910 PARAMETER Experiment Name: At_Drought_Reproduction_P Parameter: Age (day) Value: 37
  misc_feature: MA Experiment 20001910 PARAMETER Experiment Name: At_Drought_Reproduction_P Parameter: Organism Value: A. thaliana
  misc_feature: MA Experiment 20001910 PARAMETER Experiment Name: At_Drought_Reproduction_P Parameter: Plant Line Value: WS
  misc_feature: MA Experiment 20001910 PARAMETER Experiment Name: At_Drought_Reproduction_P Parameter: Timepoint (day) Value: 7
  misc_feature: MA Experiment 20001910 PARAMETER Experiment Name: At_Drought_Reproduction_P Parameter: Tissue Value: Flowers
  misc_feature: MA Experiment 20001910 PARAMETER Experiment Name: At_Drought_Reproduction_P Parameter: Treatment Value: Drought vs. No Drought
  misc_feature: MA Experiment ID: 20001911 Result: Down-regulated in Transcription
  misc_feature: MA Experiment 20001911 PARAMETER Experiment Name: At_Drought_Reproduction_P Parameter: Age (day) Value: 40
  misc_feature: MA Experiment 20001911 PARAMETER Experiment Name: At_Drought_Reproduction_P Parameter: Organism Value: A. thaliana
  misc_feature: MA Experiment 20001911 PARAMETER Experiment Name: At_Drought_Reproduction_P Parameter: Plant Line Value: WS
  misc_feature: MA Experiment 20001911 PARAMETER Experiment Name: At_Drought_Reproduction_P Parameter: Timepoint (day) Value: 10
  misc_feature: MA Experiment 20001911 PARAMETER Experiment Name: At_Drought_Reproduction_P Parameter: Tissue Value: Flowers
  misc_feature: MA Experiment 20001911 PARAMETER Experiment Name: At_Drought_Reproduction_P Parameter: Treatment Value: Drought vs. No Drought
caaaaaacattcctcaccaaaccctctccaaaacacacccacacgtacgcacacacacaaagacaatgtctcctttcaaaatattcttcttcacgactcttctcgtggcggcgttttcagtgtcggctgctgatttcaacactgacgtcaacgtagcttggggaaatggccgtgggaagatactcaacaacggccagcttcttactctctccttagacaaatcctctggttccggttttcaatccaaaacagagtatttgtttggaaagattgatatgcagattaagcttgttcctggtaactctgcaggaacagtcacaactttttacctaaaatccgaaggatccacttgggatgagattgattttgagttcttgggtaatatgagtggagatccttatactttacacactaatgtttacactcaaggtaaaggtgacaaagagcaacaattccatctctggttcgacccaaccgccaatttccacacttactcaatcctctggaaccctcaaagaatcatattgaccgtcgatgacacacccattagagagtttaaaaactatgagtctctcggtgtcttgtttccaaagaacaagccgatgaggatgtacgcgagtttatggaacgcagacgattgggcaacaagaggcggtcttgttaaaactgattggtctaaagctccattcatggcttcttacagaaacattaagattgactcgaaaccaaactccaattggtacactcaagaaatggattcaacaagccaagctagactcaaatgggttcagaagaattacatgatctacaattattgtactgaccataggaggtttccacagggagctcctaaggaatgcacaacaagctcatagaatctcaaattatattctatttatttatctacacttcctctctttcttttatgtgaaaattgtgaatgctctgtttctagcttgtctattatgtccgagaatttctttttctgtttttgattcttttcgttgtatatctttgtccaataaaggaaatgatgtgtctttactcttatagatatgtataaaaagatgtccctgttttatttgttaaaaaaaattgtttatg

SEQ ID NO: 21033 - protein, 290 aa, Arabidopsis thaliana
  peptide (1)..(290): Ceres Seq. ID no. 12483989
  misc_feature (45)..(226): Pfam Name: Glycosyl hydrolases family 16 Pfam Description: Glycosyl hydrolases family 16
  misc_feature (246)..(286): Homolog of NCBI NO: 29500893 NR Description: putative xyloglucan endotransglycosylase [Cucumis
  misc_feature (23)..(235): Homolog of NCBI NO: 29500893 NR Description: putative xyloglucan endotransglycosylase [Cucumis
  misc_feature (30)..(286): Homolog of NCBI NO: 29500891 NR Description: putative xyloglucan endotransglycosylase [Cucumis
  misc_feature (224)..(286): Homolog of NCBI NO: 15242781 NR Description: xyloglucan endotransglycosylase (TCH4)
  misc_feature (30)..(245): Homolog of NCBI NO: 15242781 NR Description: xyloglucan endotransglycosylase (TCH4)
  misc_feature (22)..(290): Homolog of NCBI NO: 21553999 NR Description: xyloglucan endo-1,4-beta-D-glucanase precursor
  misc_feature (22)..(290): Homolog of NCBI NO: 15234678 NR Description: xyloglucan endotransglycosylase (meri5B)
KNIPHQTLSKTHPHVRTHTKTMSPFKIFFFTTLLVAAFSVSAADFNTDVNVAWGNGRGKILNNGQLLTLSLDKSSGSGFQSKTEYLFGKIDMQIKLVPGNSAGTVTTFYLKSEGSTWDEIDFEFLGNMSGDPYTLHTNVYTQGKGDKEQQFHLWFDPTANFHTYSILWNPQRIILTVDDTPIREFKNYESLGVLFPKNKPMRMYASLWNADDWATRGGLVKTDWSKAPFMASYRNIKIDSKPNSNWYTQEMDSTSQARLKWVQKNYMIYNYCTDHRRFPQGAPKECTTSS

SEQ ID NO: 21034 - protein, 269 aa, Arabidopsis thaliana
  peptide (1)..(269): Ceres Seq. ID no. 12483990
  misc_feature (24)..(205): Pfam Name: Glycosyl hydrolases family 16 Pfam Description: Glycosyl hydrolases family 16
  misc_feature (225)..(265): Homolog of NCBI NO: 29500893 NR Description: putative xyloglucan endotransglycosylase [Cucumis
  misc_feature (2)..(214): Homolog of NCBI NO: 29500893 NR Description: putative xyloglucan endotransglycosylase [Cucumis
  misc_feature (9)..(265): Homolog of NCBI NO: 29500891 NR Description: putative xyloglucan endotransglycosylase [Cucumis
  misc_feature (203)..(265): Homolog of NCBI NO: 15242781 NR Description: xyloglucan endotransglycosylase (TCH4)
  misc_feature (9)..(224): Homolog of NCBI NO: 15242781 NR Description: xyloglucan endotransglycosylase (TCH4)
  misc_feature (1)..(269): Homolog of NCBI NO: 21553999 NR Description: xyloglucan endo-1,4-beta-D-glucanase precursor
  misc_feature (1)..(269): Homolog of NCBI NO: 15234678 NR Description: xyloglucan endotransglycosylase (meri5B)
MSPFKIFFFTTLLVAAFSVSAADFNTDVNVAWGNGRGKILNNGQLLTLSLDKSSGSGFQSKTEYLFGKIDMQIKLVPGNSAGTVTTFYLKSEGSTWDEIDFEFLGNMSGDPYTLHTNVYTQGKGDKEQQFHLWFDPTANFHTYSILWNPQRIILTVDDTPIREFKNYESLGVLFPKNKPMRMYASLWNADDWATRGGLVKTDWSKAPFMASYRNIKIDSKPNSNWYTQEMDSTSQARLKWVQKNYMIYNYCTDHRRFPQGAPKECTTSS

SEQ ID NO: 21035 - protein, 199 aa, Arabidopsis thaliana
  peptide (1)..(199): Ceres Seq. ID no. 12483991
  misc_feature (1)..(135): Pfam Name: Glycosyl hydrolases family 16 Pfam Description: Glycosyl hydrolases family 16
  misc_feature (155)..(195): Homolog of NCBI NO: 29500893 NR Description: putative xyloglucan endotransglycosylase [Cucumis
  misc_feature (1)..(144): Homolog of NCBI NO: 29500893 NR Description: putative xyloglucan endotransglycosylase [Cucumis
  misc_feature (1)..(195): Homolog of NCBI NO: 29500891 NR Description: putative xyloglucan endotransglycosylase [Cucumis
  misc_feature (133)..(195): Homolog of NCBI NO: 15242781 NR Description: xyloglucan endotransglycosylase (TCH4)
  misc_feature (1)..(154): Homolog of NCBI NO: 15242781 NR Description: xyloglucan endotransglycosylase (TCH4)
  misc_feature (1)..(199): Homolog of NCBI NO: 21553999 NR Description: xyloglucan endo-1,4-beta-D-glucanase precursor
  misc_feature (1)..(199): Homolog of NCBI NO: 15234678 NR Description: xyloglucan endotransglycosylase (meri5B)
MQIKLVPGNSAGTVTTFYLKSEGSTWDEIDFEFLGNMSGDPYTLHTNVYTQGKGDKEQQFHLWFDPTANFHTYSILWNPQRIILTVDDTPIREFKNYESLGVLFPKNKPMRMYASLWNADDWATRGGLVKTDWSKAPFMASYRNIKIDSKPNSNWYTQEMDSTSQARLKWVQKNYMIYNYCTDHRRFPQGAPKECTTSS

SEQ ID NO: 21036 - DNA, 1577 bp, Arabidopsis thaliana
  misc_feature (1)..(1577): Ceres Seq. ID no. 12357758
  misc_feature: MA Experiment ID: 108434 Result: Down-regulated in Transcription
  misc_feature: MA Experiment 108434 PARAMETER Experiment Name: At_Root_Tips_cDNA_P Parameter: Tissue Value: Root Tips
  misc_feature: MA Experiment ID: 108488 Result: Down-regulated in Transcription
  misc_feature: MA Experiment ID: 20000184 Result: Down-regulated in Transcription
  misc_feature: MA Experiment 20000184 PARAMETER Experiment Name: At_Shoots__P Parameter: Age (day) Value: 7
  misc_feature: MA Experiment 20000184 PARAMETER Experiment Name: At_Shoots__P Parameter: Tissue Value: Shoots vs. Whole Plant
aatcaatcataatgttttcgaattttttggaaagcttatacgatggaatcggagacgatgacgccgccgacgacgacgaagacaacaacaacgacgagaaaaccccgaaagcctcaacggaaagacacgatttctcgagaaacgccgttcgtttgtcaccggaagaggaggctcaagcgcgtggggttaaagatgatttgacggaacttggtcataccctcacgcgtcaatttcgtggtgtggctaactttctcgctccgttacctgatggatcttcttcttcttcctccgatctatcgaaccatcccaggtttaaccaatctcggtcttcagatcctggattgaatcaatcgcgttcttcagatcgggacgaatcgtgtgttggaagtgatacgccggagactggaattaggtttaggagctgggatttagaagaaaaattggcagaaggcaatgatccggaggatgaggaagaagaagaagaggaaacagatgaagaagaagaagaagaagaagagatcgctgcggttgctcttacagacgaagtgctagcatttgcgaggaacatagcaatgcatccagaaacttggttggattttcctcttgatcctgacgaagatcttgatgatttggaaatgagtgatgctcaaagaggtcatgctttagctattgagcgtcttgctccgaggttagctgcattgagaatagagctttgtccatgtcatatgagtgttggttacttctggaaagtctattttgttcttcttctttcaaggctcaataaacacgatgctcatcttttgtcttctccacaggtgatggaagctagagcattgtggatgaaagagcttcagaatcagacacattcttcaaaagaaagtagagatatgattcttgaggaagaagatattacaccatcaacttctaattactacaaccatgctcctcctgagtttctttctccaagaatatatgcttttgaacctccttcgattatgtatcgcgattttgaacacgggtttgaaaacgctcagttcatcgataaagctgttattgaggaaaaaccaatccagaagaacgacaaaaatagtgcaagccttagccaaacatctaaagatgttgttgatgatgatgatgatgattggccagaagaagaagattctgctaattcttgggctccaatgtttacagtgaatgaggatgatgtttctttcagtgatcttgaaggagacgacgatataagtagcttagcactcaagtctaagattacatcaaagggcacagaccaaaaaggaacatgaaacatcatctggcttgttgctttgccctgcctcacgagatcgaatcaatagaattgaacataagtactgtgtgctgagtcaaatcgtggaagtcttttgggtgagtttgattgttttgtggatttatgatgtttgctctcaaagagaaggaagaaagaaagaaaaaggttttgattgaaacatgtacagaagatttactttgacactgcaatttcattgtaatgttctctctcgccaaatgtaatgaaatattgaaaagcactatttcattcgcgt

SEQ ID NO: 21037 - protein, 432 aa, Arabidopsis thaliana
  peptide (1)..(432): Ceres Seq. ID no. 12357759
  misc_feature (209)..(255): Pfam Name: BSD domain Pfam Description: BSD domain
  misc_feature (61)..(429): Homolog of NCBI NO: 34909848 NR Description: OSJNBb0053G03.5 [Oryza sativa (japonica
  misc_feature (52)..(211): Homolog of NCBI NO: 7486518 NR Description: hypothetical protein F6H11.10 - Arabidopsis
  misc_feature (209)..(432): Homolog of NCBI NO: 7486518 NR Description: hypothetical protein F6H11.10 - Arabidopsis
  misc_feature (25)..(390): Homolog of NCBI NO: 15229611 NR Description: putative protein
  misc_feature (52)..(432): Homolog of NCBI NO: 18425006 NR Description: expressed protein
  misc_feature (121)..(411): Homolog of NCBI NO: 28273391 NR Description: putative BSD domain containing protein
  misc_feature (4)..(208): Homolog of NCBI NO: 6573740 NR Description: F20B24.15 [Arabidopsis thaliana]
  misc_feature (25)..(432): Homolog of NCBI NO: 6573740 NR Description: F20B24.15 [Arabidopsis thaliana]
  misc_feature (4)..(432): Homolog of NCBI NO: 21555533 NR Description: unknown [Arabidopsis thaliana]
  misc_feature (4)..(432): Homolog of NCBI NO: 18391195 NR Description: expressed protein
SIIMFSNFLESLYDGIGDDDAADDDEDNNNDEKTPKASTERHDFSRNAVRLSPEEEAQARGVKDDLTELGHTLTRQFRGVANFLAPLPDGSSSSSSDLSNHPRFNQSRSSDPGLNQSRSSDRDESCVGSDTPETGIRFRSWDLEEKLAEGNDPEDEEEEEEETDEEEEEEEEIAAVALTDEVLAFARNIAMHPETWLDFPLDPDEDLDDLEMSDAQRGHALAIERLAPRLAALRIELCPCHMSVGYFWKVYFVLLLSRLNKHDAHLLSSPQVMEARALWMKELQNQTHSSKESRDMILEEEDITPSTSNYYNHAPPEFLSPRIYAFEPPSIMYRDFEHGFENAQFIDKAVIEEKPIQKNDKNSASLSQTSKDVVDDDDDDWPEEEDSANSWAPMFTVNEDDVSFSDLEGDDDISSLALKSKITSKGTDQKGT

SEQ ID NO: 21038 - protein, 429 aa, Arabidopsis thaliana
  peptide (1)..(429): Ceres Seq. ID no. 12357760
  misc_feature (206)..(252): Pfam Name: BSD domain Pfam Description: BSD domain
  misc_feature (58)..(426): Homolog of NCBI NO: 34909848 NR Description: OSJNBb0053G03.5 [Oryza sativa (japonica
  misc_feature (49)..(208): Homolog of NCBI NO: 7486518 NR Description: hypothetical protein F6H11.10 - Arabidopsis
  misc_feature (206)..(429): Homolog of NCBI NO: 7486518 NR Description: hypothetical protein F6H11.10 - Arabidopsis
  misc_feature (22)..(387): Homolog of NCBI NO: 15229611 NR Description: putative protein
  misc_feature (49)..(429): Homolog of NCBI NO: 18425006 NR Description: expressed protein
  misc_feature (118)..(408): Homolog of NCBI NO: 28273391 NR Description: putative BSD domain containing protein
  misc_feature (1)..(205): Homolog of NCBI NO: 6573740 NR Description: F20B24.15 [Arabidopsis thaliana]
  misc_feature (22)..(429): Homolog of NCBI NO: 6573740 NR Description: F20B24.15 [Arabidopsis thaliana]
  misc_feature (1)..(429): Homolog of NCBI NO: 21555533 NR Description: unknown [Arabidopsis thaliana]
  misc_feature (1)..(429): Homolog of NCBI NO: 18391195 NR Description: expressed protein
MFSNFLESLYDGIGDDDAADDDEDNNNDEKTPKASTERHDFSRNAVRLSPEEEAQARGVKDDLTELGHTLTRQFRGVANFLAPLPDGSSSSSSDLSNHPRFNQSRSSDPGLNQSRSSDRDESCVGSDTPETGIRFRSWDLEEKLAEGNDPEDEEEEEEETDEEEEEEEEIAAVALTDEVLAFARNIAMHPETWLDFPLDPDEDLDDLEMSDAQRGHALAIERLAPRLAALRIELCPCHMSVGYFWKVYFVLLLSRLNKHDAHLLSSPQVMEARALWMKELQNQTHSSKESRDMILEEEDITPSTSNYYNHAPPEFLSPRIYAFEPPSIMYRDFEHGFENAQFIDKAVIEEKPIQKNDKNSASLSQTSKDVVDDDDDDWPEEEDSANSWAPMFTVNEDDVSFSDLEGDDDISSLALKSKITSKGTDQKGT

SEQ ID NO: 21039 - protein, 242 aa, Arabidopsis thaliana
  peptide (1)..(242): Ceres Seq. ID no. 12357761
  misc_feature (19)..(65): Pfam Name: BSD domain Pfam Description: BSD domain
  misc_feature (1)..(239): Homolog of NCBI NO: 34909848 NR Description: OSJNBb0053G03.5 [Oryza sativa (japonica
  misc_feature (1)..(21): Homolog of NCBI NO: 7486518 NR Description: hypothetical protein F6H11.10 - Arabidopsis
  misc_feature (19)..(242): Homolog of NCBI NO: 7486518 NR Description: hypothetical protein F6H11.10 - Arabidopsis
  misc_feature (1)..(200): Homolog of NCBI NO: 15229611 NR Description: putative protein
  misc_feature (1)..(242): Homolog of NCBI NO: 18425006 NR Description: expressed protein
  misc_feature (1)..(221): Homolog of NCBI NO: 28273391 NR Description: putative BSD domain containing protein
  misc_feature (1)..(18): Homolog of NCBI NO: 6573740 NR Description: F20B24.15 [Arabidopsis thaliana]
  misc_feature (1)..(242): Homolog of NCBI NO: 6573740 NR Description: F20B24.15 [Arabidopsis thaliana]
  misc_feature (1)..(242): Homolog of NCBI NO: 21555533 NR Description: unknown [Arabidopsis thaliana]
  misc_feature (1)..(242): Homolog of NCBI NO: 18391195 NR Description: expressed protein
MHPETWLDFPLDPDEDLDDLEMSDAQRGHALAIERLAPRLAALRIELCPCHMSVGYFWKVYFVLLLSRLNKHDAHLLSSPQVMEARALWMKELQNQTHSSKESRDMILEEEDITPSTSNYYNHAPPEFLSPRIYAFEPPSIMYRDFEHGFENAQFIDKAVIEEKPIQKNDKNSASLSQTSKDVVDDDDDDWPEEEDSANSWAPMFTVNEDDVSFSDLEGDDDISSLALKSKITSKGTDQKGT

SEQ ID NO: 21040 - DNA, 1431 bp, Arabidopsis thaliana
  misc_feature (1)..(1431): Ceres Seq. ID no. 13591669
  misc_feature: MA Experiment ID: 20000180 Result: Up-regulated in Transcription
  misc_feature: MA Experiment 20000180 PARAMETER Experiment Name: At_Germinating_Seeds_P Parameter: Age (hr) Value: 24 vs. 0
  misc_feature: MA Experiment 20000180 PARAMETER Experiment Name: At_Germinating_Seeds_P Parameter: Tissue Value: Germinating Seeds
  misc_feature: MA Experiment ID: 20000184 Result: Up-regulated in Transcription
  misc_feature: MA Experiment 20000184 PARAMETER Experiment Name: At_Shoots__P Parameter: Age (day) Value: 7
  misc_feature: MA Experiment 20000184 PARAMETER Experiment Name: At_Shoots__P Parameter: Tissue Value: Shoots vs. Whole Plant
  misc_feature: MA Experiment ID: 20000185 Result: Down-regulated in Transcription
  misc_feature: MA Experiment 20000185 PARAMETER Experiment Name: At_Roots__P Parameter: Age (day) Value: 7 vs. 21
  misc_feature: MA Experiment 20000185 PARAMETER Experiment Name: At_Roots__P Parameter: Organism Value: A. thaliana
  misc_feature: MA Experiment 20000185 PARAMETER Experiment Name: At_Roots__P Parameter: Tissue Value: Roots vs. Whole Plant
  misc_feature: MA Experiment ID: 20000437 Result: Down-regulated in Transcription
  misc_feature: MA Experiment 20000437 PARAMETER Experiment Name: At_Drought_P Parameter: Age (day) Value: 8
  misc_feature: MA Experiment 20000437 PARAMETER Experiment Name: At_Drought_P Parameter: Organism Value: A. thaliana
  misc_feature: MA Experiment 20000437 PARAMETER Experiment Name: At_Drought_P Parameter: Plant Line Value: WS
  misc_feature: MA Experiment 20000437 PARAMETER Experiment Name: At_Drought_P Parameter: Timepoint (hr) Value: 24
  misc_feature: MA Experiment 20000437 PARAMETER Experiment Name: At_Drought_P Parameter: Tissue Value: Whole Plant
  misc_feature: MA Experiment 20000437 PARAMETER Experiment Name: At_Drought_P Parameter: Treatment Value: Drought vs. No Drought
  misc_feature: MA Experiment ID: 20000438 Result: Up-regulated in Transcription
  misc_feature: MA Experiment 20000438 PARAMETER Experiment Name: At_Shoots__P Parameter: Age (day) Value: 14
  misc_feature: MA Experiment 20000438 PARAMETER Experiment Name: At_Shoots__P Parameter: Tissue Value: Shoots vs. Whole Plant
  misc_feature: MA Experiment ID: 20000439 Result: Down-regulated in Transcription
  misc_feature: MA Experiment 20000439 PARAMETER Experiment Name: At_Roots__P Parameter: Age (day) Value: 14 vs. 21
  misc_feature: MA Experiment 20000439 PARAMETER Experiment Name: At_Roots__P Parameter: Organism Value: A. thaliana
  misc_feature: MA Experiment 20000439 PARAMETER Experiment Name: At_Roots__P Parameter: Tissue Value: Roots vs. Whole Plant
  misc_feature: MA Experiment ID: 20000794 Result: Down-regulated in Transcription
  misc_feature: MA Experiment 20000794 PARAMETER Experiment Name: At_Petals_P Parameter: Age (day) Value: 23-25 days
  misc_feature: MA Experiment 20000794 PARAMETER Experiment Name: At_Petals_P Parameter: Plant Line Value: WS
  misc_feature: MA Experiment 20000794 PARAMETER Experiment Name: At_Petals_P Parameter: Tissue Value: Petals vs. Whole plant
  misc_feature: MA Experiment ID: 20001450 Result: Down-regulated in Transcription
  misc_feature: MA Experiment 20001450 PARAMETER Experiment Name: At_Far-red-induction_P Parameter: Age (day) Value: 7
  misc_feature: MA Experiment 20001450 PARAMETER Experiment Name: At_Far-red-induction_P Parameter: Light Value: Far-red vs. White
  misc_feature: MA Experiment 20001450 PARAMETER Experiment Name: At_Far-red-induction_P Parameter: Organism Value: A. thaliana
  misc_feature: MA Experiment 20001450 PARAMETER Experiment Name: At_Far-red-induction_P Parameter: Plant Line Value: Columbia
  misc_feature: MA Experiment 20001450 PARAMETER Experiment Name: At_Far-red-induction_P Parameter: Timepoint (hr) Value: 8
  misc_feature: MA Experiment 20001450 PARAMETER Experiment Name: At_Far-red-induction_P Parameter: Tissue Value: Whole Plant
  misc_feature: MA Experiment ID: 20001557 Result: Down-regulated in Transcription
  misc_feature: MA Experiment 20001557 PARAMETER Experiment Name: At_Drought_Soil_Dry_P Parameter: Age (day) Value: 27
  misc_feature: MA Experiment 20001557 PARAMETER Experiment Name: At_Drought_Soil_Dry_P Parameter: Organism Value: A. thaliana
  misc_feature: MA Experiment 20001557 PARAMETER Experiment Name: At_Drought_Soil_Dry_P Parameter: Plant Line Value: WS
  misc_feature: MA Experiment 20001557 PARAMETER Experiment Name: At_Drought_Soil_Dry_P Parameter: Post Timepoint (hr) Value: 3
  misc_feature: MA Experiment 20001557 PARAMETER Experiment Name: At_Drought_Soil_Dry_P Parameter: Post-Treatment Value: Re-Water vs. No Drought
  misc_feature: MA Experiment 20001557 PARAMETER Experiment Name: At_Drought_Soil_Dry_P Parameter: Timepoint (day) Value: 13
  misc_feature: MA Experiment 20001557 PARAMETER Experiment Name: At_Drought_Soil_Dry_P Parameter: Treatment Value: Drought vs. No Drought
  misc_feature: MA Experiment ID: 20001558 Result: Down-regulated in Transcription
  misc_feature: MA Experiment 20001558 PARAMETER Experiment Name: At_Drought_Soil_Dry_P Parameter: Age (day) Value: 27
  misc_feature: MA Experiment 20001558 PARAMETER Experiment Name: At_Drought_Soil_Dry_P Parameter: Organism Value: A. thaliana
  misc_feature: MA Experiment 20001558 PARAMETER Experiment Name: At_Drought_Soil_Dry_P Parameter: Plant Line Value: WS
  misc_feature: MA Experiment 20001558 PARAMETER Experiment Name: At_Drought_Soil_Dry_P Parameter: Post Timepoint (hr) Value: 6
  misc_feature: MA Experiment 20001558 PARAMETER Experiment Name: At_Drought_Soil_Dry_P Parameter: Post-Treatment Value: Re-Water vs. No Drought
  misc_feature: MA Experiment 20001558 PARAMETER Experiment Name: At_Drought_Soil_Dry_P Parameter: Timepoint (day) Value: 13
  misc_feature: MA Experiment 20001558 PARAMETER Experiment Name: At_Drought_Soil_Dry_P Parameter: Treatment Value: Drought vs. No Drought
  misc_feature: MA Experiment ID: 20001559 Result: Down-regulated in Transcription
  misc_feature: MA Experiment 20001559 PARAMETER Experiment Name: At_Drought_Soil_Dry_P Parameter: Age (day) Value: 28
  misc_feature: MA Experiment 20001559 PARAMETER Experiment Name: At_Drought_Soil_Dry_P Parameter: Organism Value: A. thaliana
  misc_feature: MA Experiment 20001559 PARAMETER Experiment Name: At_Drought_Soil_Dry_P Parameter: Plant Line Value: WS
  misc_feature: MA Experiment 20001559 PARAMETER Experiment Name: At_Drought_Soil_Dry_P Parameter: Post Timepoint (hr) Value: 29
  misc_feature: MA Experiment 20001559 PARAMETER Experiment Name: At_Drought_Soil_Dry_P Parameter: Post-Treatment Value: Re-Water vs. No Drought
  misc_feature: MA Experiment 20001559 PARAMETER Experiment Name: At_Drought_Soil_Dry_P Parameter: Timepoint (day) Value: 14
  misc_feature: MA Experiment 20001559 PARAMETER Experiment Name: At_Drought_Soil_Dry_P Parameter: Treatment Value: Drought vs. No Drought
aggtacaagagccttacaaaattcttctggttctctgaggatcaaaccaccacaagtcagaacagagtgaggtaatcattaccaacaaaaaatggcggctttatcatcctcctctctgtttttctcttccaagacaacttctccgatcagcaatctcctgatcccgccatctctccaccgcttctctctaccctcttcatcttcctccttttcctctctctcttcttcttcttcttcttcttcttctctcttgacattctctctgaggacttctcgaaggttatctcctcaaaaatttaccgttaaggccagctccgtcggtgagaagaagaatgtacttatagtcaacaccaacagtggcggtcacgccgtgatcgggttttacttcgccaaagagcttctctccgccggccacgccgtcaccatcttgaccgtcggcgatgaatcttccgaaaagatgaagaaacctcctttcaaccgattctccgaaattgttagcggcggaggaaagacggtgtgggggaacccggccaatgttgccaatgtggtcggaggtgaaacatttgacgttgtccttgacaacaatggcaaggatttggatactgttaggccagtggtggattgggctaaaagctccggcgtcaagcaattcttgttcataagtagcgccgggatctacaagtccaccgaacaacctcctcacgttgaaggggacgcagttaaagccgacgctggtcacgtggtggtggagaagtacttagccgaaacattcgggaactgggcctcctttcgaccgcagtacatgatcggctctggcaacaacaaagactgcgaagaatggttcttcgaccggattgtgagggacagagcagtgccaatcccaggatcaggattgcagctaaccaacatatcccacgtgagggacttgtcttccatgcttacttctgccgttgccaacccagaggctgcttccggcaacatcttcaactgcgttagcgacagagccgttactcttgacggtatggccaagctctgtgctgccgctgctggcaaaactgttgagatcgttcattatgaccctaaagccattggggttgacgccaagaaggcttttctattcagaaacatgcatttctacgcagagccaagagccgctaaggacttattagggtgggagagtaaaacgaatctgcctgaagatctcaaggagagattcgaagagtatgtgaagattggcagagacaagaaagagattaagtttgagttagacgataagatactcgaagccctcaaaactccagtggccgcttgatcaaatacgccataaagtttgttcttcatttgtaacttcttatgctacactgtgctctttcatttcccacggctcatatgagatgaacatgatttcagctaaaagatcatttaaatatc

SEQ ID NO: 21041 - protein, 406 aa, Arabidopsis thaliana
  peptide (1)..(406): Ceres Seq. ID no. 15221056
  misc_feature (89)..(376): Pfam Name: NAD dependent epimerase/dehydratase family Pfam Description: NAD dependent epimerase/dehydratase family
  misc_feature (89)..(376): Pfam Name: NAD dependent epimerase/dehydratase family Pfam Description: NAD dependent epimerase/dehydratase family
  misc_feature (90)..(398): Homolog of NCBI NO: 23040971 NR Description: hypothetical protein [Trichodesmium erythraeum
  misc_feature (67)..(406): Homolog of NCBI NO: 34398358 NR Description: 41 kDa ribosome-associated protein precursor
  misc_feature (62)..(132): Homolog of NCBI NO: 34900052 NR Description: putative mRNA binding protein precursor
  misc_feature (133)..(399): Homolog of NCBI NO: 34900052 NR Description: putative mRNA binding protein precursor
  misc_feature (62)..(399): Homolog of NCBI NO: 34393296 NR Description: putative mRNA binding protein precursor
  misc_feature (90)..(398): Homolog of NCBI NO: 23040971 NR Description: hypothetical protein [Trichodesmium erythraeum
  misc_feature (62)..(132): Homolog of NCBI NO: 34900052 NR Description: putative mRNA binding protein precursor
  misc_feature (62)..(399): Homolog of NCBI NO: 34393296 NR Description: putative mRNA binding protein precursor
  misc_feature (1)..(406): Homolog of NCBI NO: 15229384 NR Description: mRNA binding protein precursor - like
  misc_feature (20)..(406): Homolog of NCBI NO: 32746733 NR Description: mRNA-binding protein precursor [Nicotiana tabacum]
  misc_feature (1)..(406): Homolog of NCBI NO: 25457656 NR Description: mRNA-binding protein precursor [imported] -
  misc_feature (1)..(406): Homolog of NCBI NO: 26453355 NR Description: mRNA binding protein precursor [Lycopersicon
  misc_feature (2)..(405): Homolog of NCBI NO: 7484674 NR Description: mRNA-binding protein CSP41 precursor, chloroplast
  misc_feature (133)..(399): Homolog of NCBI NO: 34900052 NR Description: putative mRNA binding protein precursor
  misc_feature (67)..(406): Homolog of NCBI NO: 34398358 NR Description: 41 kDa ribosome-associated protein precursor
  misc_feature (2)..(405): Homolog of NCBI NO: 7484674 NR Description: mRNA-binding protein CSP41 precursor, chloroplast
  misc_feature (1)..(406): Homolog of NCBI NO: 26453355 NR Description: mRNA binding protein precursor [Lycopersicon
  misc_feature (1)..(406): Homolog of NCBI NO: 25457656 NR Description: mRNA-binding protein precursor [imported] -
  misc_feature (20)..(406): Homolog of NCBI NO: 32746733 NR Description: mRNA-binding protein precursor [Nicotiana tabacum]
  misc_feature (1)..(406): Homolog of NCBI NO: 15229384 NR Description: mRNA binding protein precursor - like
MAALSSSSLFFSSKTTSPISNLLIPPSLHRFSLPSSSSSFSSLSSSSSSSSSLLTFSLRTSRRLSPQKFTVKASSVGEKKNVLIVNTNSGGHAVIGFYFAKELLSAGHAVTILTVGDESSEKMKKPPFNRFSEIVSGGGKTVWGNPANVANVVGGETFDVVLDNNGKDLDTVRPVVDWAKSSGVKQFLFISSAGIYKSTEQPPHVEGDAVKADAGHVVVEKYLAETFGNWASFRPQYMIGSGNNKDCEEWFFDRIVRDRAVPIPGSGLQLTNISHVRDLSSMLTSAVANPEAASGNIFNCVSDRAVTLDGMAKLCAAAAGKTVEIVHYDPKAIGVDAKKAFLFRNMHFYAEPRAAKDLLGWESKTNLPEDLKERFEEYVKIGRDKKEIKFELDDKILEALKTPVAA

SEQ ID NO: 21042 - protein, 284 aa, Arabidopsis thaliana
  peptide (1)..(284): Ceres Seq. ID no. 15221057
  misc_feature (1)..(254): Pfam Name: NAD dependent epimerase/dehydratase family Pfam Description: NAD dependent epimerase/dehydratase family
  misc_feature (1)..(254): Pfam Name: NAD dependent epimerase/dehydratase family Pfam Description: NAD dependent epimerase/dehydratase family
  misc_feature (1)..(277): Homolog of NCBI NO: 17232323 NR Description: mRNA-binding protein [Nostoc sp. PCC 7120]
  misc_feature (1)..(276): Homolog of NCBI NO: 23040971 NR Description: hypothetical protein [Trichodesmium erythraeum
  misc_feature (1)..(284): Homolog of NCBI NO: 34398358 NR Description: 41 kDa ribosome-associated protein precursor
  misc_feature (11)..(277): Homolog of NCBI NO: 34900052 NR Description: putative mRNA binding protein precursor
  misc_feature (1)..(277): Homolog of NCBI NO: 34393296 NR Description: putative mRNA binding protein precursor
  misc_feature (1)..(277): Homolog of NCBI NO: 17232323 NR Description: mRNA-binding protein [Nostoc sp. PCC 7120]
  misc_feature (1)..(284): Homolog of NCBI NO: 34398358 NR Description: 41 kDa ribosome-associated protein precursor
  misc_feature (1)..(277): Homolog of NCBI NO: 34393296 NR Description: putative mRNA binding protein precursor
  misc_feature (1)..(284): Homolog of NCBI NO: 15229384 NR Description: mRNA binding protein precursor - like
  misc_feature (1)..(284): Homolog of NCBI NO: 32746733 NR Description: mRNA-binding protein precursor [Nicotiana tabacum]
  misc_feature (1)..(284): Homolog of NCBI NO: 25457656 NR Description: mRNA-binding protein precursor [imported] -
  misc_feature (1)..(284): Homolog of NCBI NO: 26453355 NR Description: mRNA binding protein precursor [Lycopersicon
  misc_feature (1)..(283): Homolog of NCBI NO: 7484674 NR Description: mRNA-binding protein CSP41 precursor, chloroplast
  misc_feature (11)..(277): Homolog of NCBI NO: 34900052 NR Description: putative mRNA binding protein precursor
  misc_feature (1)..(276): Homolog of NCBI NO: 23040971 NR Description: hypothetical protein [Trichodesmium erythraeum
  misc_feature (1)..(283): Homolog of NCBI NO: 7484674 NR Description: mRNA-binding protein CSP41 precursor, chloroplast
  misc_feature (1)..(284): Homolog of NCBI NO: 26453355 NR Description: mRNA binding protein precursor [Lycopersicon
  misc_feature (1)..(284): Homolog of NCBI NO: 25457656 NR Description: mRNA-binding protein precursor [imported] -
  misc_feature (1)..(284): Homolog of NCBI NO: 32746733 NR Description: mRNA-binding protein precursor [Nicotiana tabacum]
  misc_feature (1)..(284): Homolog of NCBI NO: 15229384 NR Description: mRNA binding protein precursor - like
MKKPPFNRFSEIVSGGGKTVWGNPANVANVVGGETFDVVLDNNGKDLDTVRPVVDWAKSSGVKQFLFISSAGIYKSTEQPPHVEGDAVKADAGHVVVEKYLAETFGNWASFRPQYMIGSGNNKDCEEWFFDRIVRDRAVPIPGSGLQLTNISHVRDLSSMLTSAVANPEAASGNIFNCVSDRAVTLDGMAKLCAAAAGKTVEIVHYDPKAIGVDAKKAFLFRNMHFYAEPRAAKDLLGWESKTNLPEDLKERFEEYVKIGRDKKEIKFELDDKILEALKTPVAA

SEQ ID NO: 21043 - DNA, 1185 bp, Arabidopsis thaliana
  misc_feature (1)..(1185): Ceres Seq. ID no. 13487853
  misc_feature: MA Experiment ID: 108462 Result: Down-regulated in Transcription
  misc_feature: MA Experiment 108462 PARAMETER Experiment Name: At_Germinating_Seeds_cDNA_P Parameter: Age (day) Value: 2 vs. 0
  misc_feature: MA Experiment 108462 PARAMETER Experiment Name: At_Germinating_Seeds_cDNA_P Parameter: Tissue Value: Germinating Seeds
  misc_feature: MA Experiment ID: 108464 Result: Down-regulated in Transcription
  misc_feature: MA Experiment 108464 PARAMETER Experiment Name: At_Germinating_Seeds_cDNA_P Parameter: Age (day) Value: 4 vs. 0
  misc_feature: MA Experiment 108464 PARAMETER Experiment Name: At_Germinating_Seeds_cDNA_P Parameter: Tissue Value: Germinating Seeds
  misc_feature: MA Experiment ID: 20000088 Result: Up-regulated in Transcription
  misc_feature: MA Experiment 20000088 PARAMETER Experiment Name: At_100uM_ABA_Mutants_cDNA_P Parameter: Plant Line Value: Landsberg
  misc_feature: MA Experiment 20000088 PARAMETER Experiment Name: At_100uM_ABA_Mutants_cDNA_P Parameter: Timepoint (hr) Value: 6
  misc_feature: MA Experiment 20000088 PARAMETER Experiment Name: At_100uM_ABA_Mutants_cDNA_P Parameter: Tissue Value: Aerial
  misc_feature: MA Experiment 20000088 PARAMETER Experiment Name: At_100uM_ABA_Mutants_cDNA_P Parameter: Treatment Value: 100uM ABA vs. No Treatment
  misc_feature: MA Experiment ID: 20000111 Result: Up-regulated in Transcription
  misc_feature: MA Experiment 20000111 PARAMETER Experiment Name: At_42deg_Heat_cDNA_P Parameter: Temperature (deg C) Value: 42 vs. 22
  misc_feature: MA Experiment 20000111 PARAMETER Experiment Name: At_42deg_Heat_cDNA_P Parameter: Timepoint (hr) Value: 6
  misc_feature: MA Experiment 20000111 PARAMETER Experiment Name: At_42deg_Heat_cDNA_P Parameter: Tissue Value: Aerial
  misc_feature: MA Experiment ID: 20000113 Result: Up-regulated in Transcription
  misc_feature: MA Experiment 20000113 PARAMETER Experiment Name: At_42deg_Heat_cDNA_P Parameter: Temperature (deg C) Value: 42 vs. 22
  misc_feature: MA Experiment 20000113 PARAMETER Experiment Name: At_42deg_Heat_cDNA_P Parameter: Timepoint (hr) Value: 8
  misc_feature: MA Experiment 20000113 PARAMETER Experiment Name: At_42deg_Heat_cDNA_P Parameter: Tissue Value: Aerial
  misc_feature: MA Experiment ID: 20000437 Result: Up-regulated in Transcription
  misc_feature: MA Experiment 20000437 PARAMETER Experiment Name: At_Drought_P Parameter: Age (day) Value: 8
  misc_feature: MA Experiment 20000437 PARAMETER Experiment Name: At_Drought_P Parameter: Organism Value: A. thaliana
  misc_feature: MA Experiment 20000437 PARAMETER Experiment Name: At_Drought_P Parameter: Plant Line Value: WS
  misc_feature: MA Experiment 20000437 PARAMETER Experiment Name: At_Drought_P Parameter: Timepoint (hr) Value: 24
  misc_feature: MA Experiment 20000437 PARAMETER Experiment Name: At_Drought_P Parameter: Tissue Value: Whole Plant
  misc_feature: MA Experiment 20000437 PARAMETER Experiment Name: At_Drought_P Parameter: Treatment Value: Drought vs. No Drought
aattttccccaatcttcataagtcataagaaaaatctcagcaattgtcaaaattttccagcaatcgagagagcagcacaagagagcatagaaggaccgattggggattagttagcgtgaaaggagatcctagtagcagctatggatagagaatggggttccaagcctggtagtggaggcgccgcctccggccaaaacgaggccatagatcgccgtgagcgtctccgtcgtcttgctcttgaaaccatagaccttgctaaagatccctatttcatgcgaaatcatcttggaagctatgagtgtaaactatgtctaacgctgcataacaatgaaggaaactacttggcacatactcaaggtaagaggcatcagacaaacttggcaaagagagctgctcgagaggctaaggacgctcctactaagccgcagccacttaagcgcaatgtctcagttcgcagaacagttaaaattggtagaccagggtaccgggttacaaaacagtatgatcccgagctgcaacaaagatctcttctgttccagattgaatatcctgagatagaggacaacataaagccaagacatcgtttcatgtcatcttatgagcagaaagttcaaccgtatgacaagagctatcaataccttctatttgcagctgaaccatatgaaatcatagctttcaaggttcctagcacagaggttgataaatcaaccccaaagtttttctctcactgggatccagactccaagatgtttacactgcaggtgtatttcaagcctaccaagccagaaccaaacaagcctcagtcagctgttggagcaaatggtcttccaccgccaccaccacccccgcctcatcaagctcaaccgccaccaccacctccatctggtttattcccaccgccaccacctccaatggctaacaatggttttaggcccatgccaccagctggaggtttcggacatcctaacatgtgaaagagaatccagcgaagcagtttaaaaacacagtactctgatcatggtttactaagagagacttgctctttgactgaaaaacaaatctgttctgacatctctacggatgtattatctctctagataccttctttgagtttcttctatctgcttctcgtatgtaccattttgacaagattgttttccgttaatagtacaattagcgttggcg

SEQ ID NO: 21044 - protein, 277 aa, Arabidopsis thaliana
  peptide (1)..(277): Ceres Seq. ID no. 13487854
  misc_feature (208)..(268): Pfam Name: Extensin-like region Pfam Description: Extensin-like region
  misc_feature (6)..(270): Homolog of NCBI NO: 627605 NR Description: spliceosome-associated protein SAP 62 - human
  misc_feature (6)..(275): Homolog of NCBI NO: 30931324 NR Description: Unknown (protein for MGC:64703) [Mus musculus]
  misc_feature (6)..(270): Homolog of NCBI NO: 21361376 NR Description: splicing factor 3a, subunit 2, 66kDa
  misc_feature (1)..(52): Homolog of NCBI NO: 34902138 NR Description: hypothetical protein [Oryza sativa (japonica
  misc_feature (6)..(268): Homolog of NCBI NO: 27371271 NR Description: Similar to splicing factor 3a, subunit 2, 66kDa
  misc_feature (6)..(275): Homolog of NCBI NO: 34862283 NR Description: similar to Splicing factor 3A subunit 2
  misc_feature (6)..(275): Homolog of NCBI NO: 10800150 NR Description: splicing factor 3a, subunit 2
  misc_feature (49)..(275): Homolog of NCBI NO: 34902138 NR Description: hypothetical protein [Oryza sativa (japonica
  misc_feature (1)..(277): Homolog of NCBI NO: 7488346 NR Description: probable spliceosome-associated protein SAP62
  misc_feature (1)..(277): Homolog of NCBI NO: 18403023 NR Description: spliceosome associated protein-family
MDREWGSKPGSGGAASGQNEAIDRRERLRRLALETIDLAKDPYFMRNHLGSYECKLCLTLHNNEGNYLAHTQGKRHQTNLAKRAAREAKDAPTKPQPLKRNVSVRRTVKIGRPGYRVTKQYDPELQQRSLLFQIEYPEIEDNIKPRHRFMSSYEQKVQPYDKSYQYLLFAAEPYEIIAFKVPSTEVDKSTPKFFSHWDPDSKMFTLQVYFKPTKPEPNKPQSAVGANGLPPPPPPPPHQAQPPPPPPSGLFPPPPPPMANNGFRPMPPAGGFGHPNM

SEQ ID NO: 21045 - protein, 233 aa, Arabidopsis thaliana
  peptide (1)..(233): Ceres Seq. ID no. 13487855
  misc_feature (164)..(224): Pfam Name: Extensin-like region Pfam Description: Extensin-like region
  misc_feature (1)..(167): Homolog of NCBI NO: 7498869 NR Description: hypothetical protein F11A10.2 - Caenorhabditis
  misc_feature (1)..(231): Homolog of NCBI NO: 10800150 NR Description: splicing factor 3a, subunit 2
  misc_feature (1)..(224): Homolog of NCBI NO: 27371271 NR Description: Similar to splicing factor 3a, subunit 2, 66kDa
  misc_feature (1)..(231): Homolog of NCBI NO: 34862283 NR Description: similar to Splicing factor 3A subunit 2
  misc_feature (1)..(226): Homolog of NCBI NO: 627605 NR Description: spliceosome-associated protein SAP 62 - human
  misc_feature (1)..(231): Homolog of NCBI NO: 30931324 NR Description: Unknown (protein for MGC:64703) [Mus musculus]
  misc_feature (1)..(226): Homolog of NCBI NO: 21361376 NR Description: splicing factor 3a, subunit 2, 66kDa
  misc_feature (5)..(231): Homolog of NCBI NO: 34902138 NR Description: hypothetical protein [Oryza sativa (japonica
  misc_feature (1)..(233): Homolog of NCBI NO: 7488346 NR Description: probable spliceosome-associated protein SAP62
  misc_feature (1)..(233): Homolog of NCBI NO: 18403023 NR Description: spliceosome associated protein-family
MRNHLGSYECKLCLTLHNNEGNYLAHTQGKRHQTNLAKRAAREAKDAPTKPQPLKRNVSVRRTVKIGRPGYRVTKQYDPELQQRSLLFQIEYPEIEDNIKPRHRFMSSYEQKVQPYDKSYQYLLFAAEPYEIIAFKVPSTEVDKSTPKFFSHWDPDSKMFTLQVYFKPTKPEPNKPQSAVGANGLPPPPPPPPHQAQPPPPPPSGLFPPPPPPMANNGFRPMPPAGGFGHPNM

SEQ ID NO: 21046 - DNA, 525 bp, Arabidopsis thaliana
  misc_feature (1)..(525): Ceres Seq. ID no. 12393413
  misc_feature: MA Experiment ID: 20000437 Result: Up-regulated in Transcription
  misc_feature: MA Experiment 20000437 PARAMETER Experiment Name: At_Drought_P Parameter: Age (day) Value: 8
  misc_feature: MA Experiment 20000437 PARAMETER Experiment Name: At_Drought_P Parameter: Organism Value: A. thaliana
  misc_feature: MA Experiment 20000437 PARAMETER Experiment Name: At_Drought_P Parameter: Plant Line Value: WS
  misc_feature: MA Experiment 20000437 PARAMETER Experiment Name: At_Drought_P Parameter: Timepoint (hr) Value: 24
  misc_feature: MA Experiment 20000437 PARAMETER Experiment Name: At_Drought_P Parameter: Tissue Value: Whole Plant
  misc_feature: MA Experiment 20000437 PARAMETER Experiment Name: At_Drought_P Parameter: Treatment Value: Drought vs. No Drought
  misc_feature: MA Experiment ID: 20001905 Result: Up-regulated in Transcription
  misc_feature: MA Experiment 20001905 PARAMETER Experiment Name: At_Drought_Reproduction_P Parameter: Age (day) Value: 40
  misc_feature: MA Experiment 20001905 PARAMETER Experiment Name: At_Drought_Reproduction_P Parameter: Organism Value: A. thaliana
  misc_feature: MA Experiment 20001905 PARAMETER Experiment Name: At_Drought_Reproduction_P Parameter: Plant Line Value: WS
  misc_feature: MA Experiment 20001905 PARAMETER Experiment Name: At_Drought_Reproduction_P Parameter: Timepoint (day) Value: 10
  misc_feature: MA Experiment 20001905 PARAMETER Experiment Name: At_Drought_Reproduction_P Parameter: Tissue Value: Rosettes
  misc_feature: MA Experiment 20001905 PARAMETER Experiment Name: At_Drought_Reproduction_P Parameter: Treatment Value: Drought vs. No Drought
atcaattttcgttaagagagaaaaaggaagagaagaagaatgttacagtttccgacgttgatgacccaatttccgtcgtcgacgaagacgattccggcatcgtatttgcttccgttacaatggcctcagccgcagaacgaggagattcttctcgccatggaagaagctgagttcgaagaaaagtgcaacgagatcagaaagatgagtcctgctttaccggtaattggaaaaccagtcgtcaacaacgaacaagaagaggatgataatgaagcagaggatgatgatgcagataatgcagaggaatcagatggtgaagagtttgagcaagaaaccggataaataatcttgaggccgaaaatacacaagggttattgatggcattggcttgaaacttgaggacccttatctaaatcttcttgtgataaaacgactgtgattctgactttgtaaaccaggtttttttcttttcttaggaacgactgaaatgttcacttttggccctaaggttagtcagtggattattcg

SEQ ID NO: 21047 - protein, 99 aa, Arabidopsis thaliana
  peptide (1)..(99): Ceres Seq. ID no. 12393414
  misc_feature (1)..(99): Homolog of NCBI NO: 18424670 NR Description: Expressed protein
MLQFPTLMTQFPSSTKTIPASYLLPLQWPQPQNEEILLAMEEAEFEEKCNEIRKMSPALPVIGKPVVNNEQEEDDNEAEDDDADNAEESDGEEFEQETG

SEQ ID NO: 21048 - protein, 92 aa, Arabidopsis thaliana
  peptide (1)..(92): Ceres Seq. ID no. 12393415
  misc_feature (1)..(92): Homolog of NCBI NO: 18424670 NR Description: Expressed protein
MTQFPSSTKTIPASYLLPLQWPQPQNEEILLAMEEAEFEEKCNEIRKMSPALPVIGKPVVNNEQEEDDNEAEDDDADNAEESDGEEFEQETG

SEQ ID NO: 21049 - protein, 60 aa, Arabidopsis thaliana
  peptide (1)..(60): Ceres Seq. ID no. 12393416
  misc_feature (1)..(60): Homolog of NCBI NO: 18424670 NR Description: Expressed protein
MEEAEFEEKCNEIRKMSPALPVIGKPVVNNEQEEDDNEAEDDDADNAEESDGEEFEQETG

SEQ ID NO: 21050 - DNA, 884 bp, Arabidopsis thaliana
  misc_feature (1)..(884): Ceres Seq. ID no. 13489903
  misc_feature: MA Experiment ID: 108488 Result: Up-regulated in Transcription
  misc_feature: MA Experiment ID: 108595 Result: Down-regulated in Transcription
  misc_feature: MA Experiment 108595 PARAMETER Experiment Name: At_Ler-pi_Ovule_cDNA_P Parameter: Plant Line Value: null
  misc_feature: MA Experiment ID: 20000069 Result: Down-regulated in Transcription
  misc_feature: MA Experiment 20000069 PARAMETER Experiment Name: At_100uM_ABA_Mutants_cDNA_P Parameter: Plant Line Value: CS23
  misc_feature: MA Experiment 20000069 PARAMETER Experiment Name: At_100uM_ABA_Mutants_cDNA_P Parameter: Timepoint (hr) Value: 6
  misc_feature: MA Experiment 20000069 PARAMETER Experiment Name: At_100uM_ABA_Mutants_cDNA_P Parameter: Tissue Value: Aerial
  misc_feature: MA Experiment 20000069 PARAMETER Experiment Name: At_100uM_ABA_Mutants_cDNA_P Parameter: Treatment Value: 100uM ABA vs. No Treatment
  misc_feature: MA Experiment ID: 20000070 Result: Down-regulated in Transcription
  misc_feature: MA Experiment 20000070 PARAMETER Experiment Name: At_100uM_ABA_Mutants_cDNA_P Parameter: Plant Line Value: CS24
  misc_feature: MA Experiment 20000070 PARAMETER Experiment Name: At_100uM_ABA_Mutants_cDNA_P Parameter: Timepoint (hr) Value: 6
  misc_feature: MA Experiment 20000070 PARAMETER Experiment Name: At_100uM_ABA_Mutants_cDNA_P Parameter: Tissue Value: Aerial
  misc_feature: MA Experiment 20000070 PARAMETER Experiment Name: At_100uM_ABA_Mutants_cDNA_P Parameter: Treatment Value: 100uM ABA vs. No Treatment
  misc_feature: MA Experiment ID: 20000071 Result: Down-regulated in Transcription
  misc_feature: MA Experiment 20000071 PARAMETER Experiment Name: At_100uM_ABA_Mutants_cDNA_P Parameter: Plant Line Value: CS8104
  misc_feature: MA Experiment 20000071 PARAMETER Experiment Name: At_100uM_ABA_Mutants_cDNA_P Parameter: Timepoint (hr) Value: 6
  misc_feature: MA Experiment 20000071 PARAMETER Experiment Name: At_100uM_ABA_Mutants_cDNA_P Parameter: Tissue Value: Aerial
  misc_feature: MA Experiment 20000071 PARAMETER Experiment Name: At_100uM_ABA_Mutants_cDNA_P Parameter: Treatment Value: 100uM ABA vs. No Treatment
  misc_feature: MA Experiment ID: 20000072 Result: Down-regulated in Transcription
  misc_feature: MA Experiment 20000072 PARAMETER Experiment Name: At_100uM_ABA_Mutants_cDNA_P Parameter: Plant Line Value: CS8105
  misc_feature: MA Experiment 20000072 PARAMETER Experiment Name: At_100uM_ABA_Mutants_cDNA_P Parameter: Timepoint (hr) Value: 6
  misc_feature: MA Experiment 20000072 PARAMETER Experiment Name: At_100uM_ABA_Mutants_cDNA_P Parameter: Tissue Value: Aerial
  misc_feature: MA Experiment 20000072 PARAMETER Experiment Name: At_100uM_ABA_Mutants_cDNA_P Parameter: Treatment Value: 100uM ABA vs. No Treatment
  misc_feature: MA Experiment ID: 20000086 Result: Down-regulated in Transcription
  misc_feature: MA Experiment 20000086 PARAMETER Experiment Name: At_100uM_ABA_Mutants_cDNA_P Parameter: Plant Line Value: CS22
  misc_feature: MA Experiment 20000086 PARAMETER Experiment Name: At_100uM_ABA_Mutants_cDNA_P Parameter: Timepoint (hr) Value: 6
  misc_feature: MA Experiment 20000086 PARAMETER Experiment Name: At_100uM_ABA_Mutants_cDNA_P Parameter: Tissue Value: Aerial
  misc_feature: MA Experiment 20000086 PARAMETER Experiment Name: At_100uM_ABA_Mutants_cDNA_P Parameter: Treatment Value: 100uM ABA vs. No Treatment
  misc_feature: MA Experiment ID: 20000087 Result: Down-regulated in Transcription
  misc_feature: MA Experiment 20000087 PARAMETER Experiment Name: At_100uM_ABA_Mutants_cDNA_P Parameter: Plant Line Value: WS
  misc_feature: MA Experiment 20000087 PARAMETER Experiment Name: At_100uM_ABA_Mutants_cDNA_P Parameter: Timepoint (hr) Value: 6
  misc_feature: MA Experiment 20000087 PARAMETER Experiment Name: At_100uM_ABA_Mutants_cDNA_P Parameter: Tissue Value: Aerial
  misc_feature: MA Experiment 20000087 PARAMETER Experiment Name: At_100uM_ABA_Mutants_cDNA_P Parameter: Treatment Value: 100uM ABA vs. No Treatment
  misc_feature: MA Experiment ID: 20000088 Result: Down-regulated in Transcription
  misc_feature: MA Experiment 20000088 PARAMETER Experiment Name: At_100uM_ABA_Mutants_cDNA_P Parameter: Plant Line Value: Landsberg
  misc_feature: MA Experiment 20000088 PARAMETER Experiment Name: At_100uM_ABA_Mutants_cDNA_P Parameter: Timepoint (hr) Value: 6
  misc_feature: MA Experiment 20000088 PARAMETER Experiment Name: At_100uM_ABA_Mutants_cDNA_P Parameter: Tissue Value: Aerial
  misc_feature: MA Experiment 20000088 PARAMETER Experiment Name: At_100uM_ABA_Mutants_cDNA_P Parameter: Treatment Value: 100uM ABA vs. No Treatment
  misc_feature: MA Experiment ID: 20000089 Result: Down-regulated in Transcription
  misc_feature: MA Experiment ID: 20000090 Result: Down-regulated in Transcription
  misc_feature: MA Experiment ID: 20000111 Result: Up-regulated in Transcription
  misc_feature: MA Experiment 20000111 PARAMETER Experiment Name: At_42deg_Heat_cDNA_P Parameter: Temperature (deg C) Value: 42 vs. 22
  misc_feature: MA Experiment 20000111 PARAMETER Experiment Name: At_42deg_Heat_cDNA_P Parameter: Timepoint (hr) Value: 6
  misc_feature: MA Experiment 20000111 PARAMETER Experiment Name: At_42deg_Heat_cDNA_P Parameter: Tissue Value: Aerial
  misc_feature: MA Experiment ID: 20000112 Result: Up-regulated in Transcription
  misc_feature: MA Experiment 20000112 PARAMETER Experiment Name: At_42deg_Heat_cDNA_P Parameter: Temperature (deg C) Value: 42 vs. 22
  misc_feature: MA Experiment 20000112 PARAMETER Experiment Name: At_42deg_Heat_cDNA_P Parameter: Timepoint (hr) Value: 2
  misc_feature: MA Experiment 20000112 PARAMETER Experiment Name: At_42deg_Heat_cDNA_P Parameter: Tissue Value: Aerial
  misc_feature: MA Experiment ID: 20000113 Result: Up-regulated in Transcription
  misc_feature: MA Experiment 20000113 PARAMETER Experiment Name: At_42deg_Heat_cDNA_P Parameter: Temperature (deg C) Value: 42 vs. 22
  misc_feature: MA Experiment 20000113 PARAMETER Experiment Name: At_42deg_Heat_cDNA_P Parameter: Timepoint (hr) Value: 8
  misc_feature: MA Experiment 20000113 PARAMETER Experiment Name: At_42deg_Heat_cDNA_P Parameter: Tissue Value: Aerial
  misc_feature: MA Experiment ID: 20000117 Result: Down-regulated in Transcription
  misc_feature: MA Experiment 20000117 PARAMETER Experiment Name: At_100uM_ABA_Mutants_cDNA_P Parameter: Plant Line Value: Columbia
  misc_feature: MA Experiment 20000117 PARAMETER Experiment Name: At_100uM_ABA_Mutants_cDNA_P Parameter: Timepoint (hr) Value: 6
  misc_feature: MA Experiment 20000117 PARAMETER Experiment Name: At_100uM_ABA_Mutants_cDNA_P Parameter: Tissue Value: Aerial
  misc_feature: MA Experiment 20000117 PARAMETER Experiment Name: At_100uM_ABA_Mutants_cDNA_P Parameter: Treatment Value: 100uM ABA vs. No Treatment
  misc_feature: MA Experiment ID: 20000173 Result: Up-regulated in Transcription
  misc_feature: MA Experiment 20000173 PARAMETER Experiment Name: At_42deg_Heat_P Parameter: Age (day) Value: 14
  misc_feature: MA Experiment 20000173 PARAMETER Experiment Name: At_42deg_Heat_P Parameter: Organism Value: A. thaliana
  misc_feature: MA Experiment 20000173 PARAMETER Experiment Name: At_42deg_Heat_P Parameter: Plant Line Value: WS
  misc_feature: MA Experiment 20000173 PARAMETER Experiment Name: At_42deg_Heat_P Parameter: Temperature (deg C) Value: 42 vs. 22
  misc_feature: MA Experiment 20000173 PARAMETER Experiment Name: At_42deg_Heat_P Parameter: Timepoint (hr) Value: 6
  misc_feature: MA Experiment 20000173 PARAMETER Experiment Name: At_42deg_Heat_P Parameter: Tissue Value: Aerial
  misc_feature: MA Experiment ID: 20000179 Result: Up-regulated in Transcription
  misc_feature: MA Experiment 20000179 PARAMETER Experiment Name: At_Germinating_Seeds_P Parameter: Age (hr) Value: 6 vs. 0
  misc_feature: MA Experiment 20000179 PARAMETER Experiment Name: At_Germinating_Seeds_P Parameter: Tissue Value: Germinating Seeds
  misc_feature: MA Experiment ID: 20000184 Result: Up-regulated in Transcription
  misc_feature: MA Experiment 20000184 PARAMETER Experiment Name: At_Shoots__P Parameter: Age (day) Value: 7
  misc_feature: MA Experiment 20000184 PARAMETER Experiment Name: At_Shoots__P Parameter: Tissue Value: Shoots vs. Whole Plant
  misc_feature: MA Experiment ID: 20000438 Result: Up-regulated in Transcription
  misc_feature: MA Experiment 20000438 PARAMETER Experiment Name: At_Shoots__P Parameter: Age (day) Value: 14
  misc_feature: MA Experiment 20000438 PARAMETER Experiment Name: At_Shoots__P Parameter: Tissue Value: Shoots vs. Whole Plant
  misc_feature: MA Experiment ID: 20000439 Result: Down-regulated in Transcription
  misc_feature: MA Experiment 20000439 PARAMETER Experiment Name: At_Roots__P Parameter: Age (day) Value: 14 vs. 21
  misc_feature: MA Experiment 20000439 PARAMETER Experiment Name: At_Roots__P Parameter: Organism Value: A. thaliana
  misc_feature: MA Experiment 20000439 PARAMETER Experiment Name: At_Roots__P Parameter: Tissue Value: Roots vs. Whole Plant
  misc_feature: MA Experiment ID: 20000460 Result: Down-regulated in Transcription
  misc_feature: MA Experiment 20000460 PARAMETER Experiment Name: At_10percent_PEG_P Parameter: Age (day) Value: 12
  misc_feature: MA Experiment 20000460 PARAMETER Experiment Name: At_10percent_PEG_P Parameter: Organism Value: A. thaliana
  misc_feature: MA Experiment 20000460 PARAMETER Experiment Name: At_10percent_PEG_P Parameter: Plant Line Value: WS
  misc_feature: MA Experiment 20000460 PARAMETER Experiment Name: At_10percent_PEG_P Parameter: Timepoint (day) Value: 12
  misc_feature: MA Experiment 20000460 PARAMETER Experiment Name: At_10percent_PEG_P Parameter: Tissue Value: Whole Plant
  misc_feature: MA Experiment 20000460 PARAMETER Experiment Name: At_10percent_PEG_P Parameter: Treatment Value: 10percent PEG vs. No Treatment
  misc_feature: MA Experiment ID: 20000794 Result: Down-regulated in Transcription
  misc_feature: MA Experiment 20000794 PARAMETER Experiment Name: At_Petals_P Parameter: Age (day) Value: 23-25 days
  misc_feature: MA Experiment 20000794 PARAMETER Experiment Name: At_Petals_P Parameter: Plant Line Value: WS
  misc_feature: MA Experiment 20000794 PARAMETER Experiment Name: At_Petals_P Parameter: Tissue Value: Petals vs. Whole plant
  misc_feature: MA Experiment ID: 20001248 Result: Down-regulated in Transcription
  misc_feature: MA Experiment 20001248 PARAMETER Experiment Name: At_Far-red-induction_P Parameter: Age (day) Value: 7
  misc_feature: MA Experiment 20001248 PARAMETER Experiment Name: At_Far-red-induction_P Parameter: Light Value: Far-red vs. White
  misc_feature: MA Experiment 20001248 PARAMETER Experiment Name: At_Far-red-induction_P Parameter: Organism Value: A. thaliana
  misc_feature: MA Experiment 20001248 PARAMETER Experiment Name: At_Far-red-induction_P Parameter: Plant Line Value: Columbia
  misc_feature: MA Experiment 20001248 PARAMETER Experiment Name: At_Far-red-induction_P Parameter: Timepoint (hr) Value: 4
  misc_feature: MA Experiment 20001248 PARAMETER Experiment Name: At_Far-red-induction_P Parameter: Tissue Value: Whole Plant
  misc_feature: MA Experiment ID: 20001450 Result: Down-regulated in Transcription
  misc_feature: MA Experiment 20001450 PARAMETER Experiment Name: At_Far-red-induction_P Parameter: Age (day) Value: 7
  misc_feature: MA Experiment 20001450 PARAMETER Experiment Name: At_Far-red-induction_P Parameter: Light Value: Far-red vs. White
  misc_feature: MA Experiment 20001450 PARAMETER Experiment Name: At_Far-red-induction_P Parameter: Organism Value: A. thaliana
  misc_feature: MA Experiment 20001450 PARAMETER Experiment Name: At_Far-red-induction_P Parameter: Plant Line Value: Columbia
  misc_feature: MA Experiment 20001450 PARAMETER Experiment Name: At_Far-red-induction_P Parameter: Timepoint (hr) Value: 8
  misc_feature: MA Experiment 20001450 PARAMETER Experiment Name: At_Far-red-induction_P Parameter: Tissue Value: Whole Plant
  misc_feature: MA Experiment ID: 20001560 Result: Down-regulated in Transcription
  misc_feature: MA Experiment 20001560 PARAMETER Experiment Name: At_Drought_Soil_Dry_P Parameter: Age (day) Value: 28
  misc_feature: MA Experiment 20001560 PARAMETER Experiment Name: At_Drought_Soil_Dry_P Parameter: Organism Value: A. thaliana
  misc_feature: MA Experiment 20001560 PARAMETER Experiment Name: At_Drought_Soil_Dry_P Parameter: Plant Line Value: WS
  misc_feature: MA Experiment 20001560 PARAMETER Experiment Name: At_Drought_Soil_Dry_P Parameter: Post Timepoint (hr) Value: None
  misc_feature: MA Experiment 20001560 PARAMETER Experiment Name: At_Drought_Soil_Dry_P Parameter: Post-Treatment Value: None
  misc_feature: MA Experiment 20001560 PARAMETER Experiment Name: At_Drought_Soil_Dry_P Parameter: Timepoint (day) Value: 14
  misc_feature: MA Experiment 20001560 PARAMETER Experiment Name: At_Drought_Soil_Dry_P Parameter: Treatment Value: Drought vs. No Drought
aaacccgattgtttcgagcacaaacgtcacttgtggtttacatcgtcttcatcatctccataacttcatatctcctctccttccgctgccaccgttagcgatgtctttggacactgtggacaaactggtggtgttcttggccaagagagacggaatagacaagcttgtgaagacattccaatacgtggccaagctcgcgtgctggcatgttgaagccacacgacccgaagccgccgataggttcaagaagtgggaggtcgcctccggtctcagccgcaaagccttcaggaccgggagatctctcacggggttcaatgcgctgagacgaaaccccggggcaaccccgatgatccgtttcttggcggtcctagccaattcaggggaaatggtttacttcttctttgatcattttctttggttatcaagaattggttcaatagacgccaagctcgccaagaaaatgagtttcatatccgcttttggcgaatctttcggctacactttcttcatcatcattgattgcatcttcataaagcaaagactcaaatccttaaaaaagctccagcattcgaccgatgaaccgaaagaagaaatcggcgccaaaattagcgagattcggggagatatagtaatgaggttgatgggaatttcagccaacgttgcggatttacttatagcattggcagaaattcacccaaaccccttttgtaaccacaccattacactcggtataagcggtttagtttcagcttgggccggttggtataggaactggccatcgtgagatgtaataaaatcaaatgtttgttgttttgaatgaacgtatcaaacgtgtaatgtaactcacttgaatatatgaaacatttctattttacattatctat

SEQ ID NO: 21051 - protein, 260 aa, Arabidopsis thaliana
  peptide (1)..(260): Ceres Seq. ID no. 13489904
  misc_feature (39)..(258): Pfam Name: Peroxisomal biogenesis factor 11 (PEX11) Pfam Description: Peroxisomal biogenesis factor 11 (PEX11)
  misc_feature (37)..(260): Homolog of NCBI NO: 21536511 NR Description: unknown [Arabidopsis thaliana]
  misc_feature (37)..(260): Homolog of NCBI NO: 18401872 NR Description: expressed protein [Arabidopsis thaliana]
  misc_feature (37)..(260): Homolog of NCBI NO: 38605902 NR Description: OSJNBb0020O11.14 [Oryza sativa (japonica
  misc_feature (34)..(260): Homolog of NCBI NO: 15232797 NR Description: expressed protein [Arabidopsis thaliana]
NPIVSSTNVTCGLHRLHHLHNFISPLLPLPPLAMSLDTVDKLVVFLAKRDGIDKLVKTFQYVAKLACWHVEATRPEAADRFKKWEVASGLSRKAFRTGRSLTGFNALRRNPGATPMIRFLAVLANSGEMVYFFFDHFLWLSRIGSIDAKLAKKMSFISAFGESFGYTFFIIIDCIFIKQRLKSLKKLQHSTDEPKEEIGAKISEIRGDIVMRLMGISANVADLLIALAEIHPNPFCNHTITLGISGLVSAWAGWYRNWPS

SEQ ID NO: 21052 - protein, 227 aa, Arabidopsis thaliana
  peptide (1)..(227): Ceres Seq. ID no. 13489905
  misc_feature (6)..(225): Pfam Name: Peroxisomal biogenesis factor 11 (PEX11) Pfam Description: Peroxisomal biogenesis factor 11 (PEX11)
  misc_feature (4)..(227): Homolog of NCBI NO: 21536511 NR Description: unknown [Arabidopsis thaliana]
  misc_feature (4)..(227): Homolog of NCBI NO: 18401872 NR Description: expressed protein [Arabidopsis thaliana]
  misc_feature (4)..(227): Homolog of NCBI NO: 38605902 NR Description: OSJNBb0020O11.14 [Oryza sativa (japonica
  misc_feature (1)..(227): Homolog of NCBI NO: 15232797 NR Description: expressed protein [Arabidopsis thaliana]
MSLDTVDKLVVFLAKRDGIDKLVKTFQYVAKLACWHVEATRPEAADRFKKWEVASGLSRKAFRTGRSLTGFNALRRNPGATPMIRFLAVLANSGEMVYFFFDHFLWLSRIGSIDAKLAKKMSFISAFGESFGYTFFIIIDCIFIKQRLKSLKKLQHSTDEPKEEIGAKISEIRGDIVMRLMGISANVADLLIALAEIHPNPFCNHTITLGISGLVSAWAGWYRNWPS

SEQ ID NO: 21053 - protein, 145 aa, Arabidopsis thaliana
  peptide (1)..(145): Ceres Seq. ID no. 13489906
  misc_feature (1)..(143): Pfam Name: Peroxisomal biogenesis factor 11 (PEX11) Pfam Description: Peroxisomal biogenesis factor 11 (PEX11)
  misc_feature (1)..(145): Homolog of NCBI NO: 21536511 NR Description: unknown [Arabidopsis thaliana]
  misc_feature (1)..(145): Homolog of NCBI NO: 18401872 NR Description: expressed protein [Arabidopsis thaliana]
  misc_feature (1)..(145): Homolog of NCBI NO: 38605902 NR Description: OSJNBb0020O11.14 [Oryza sativa (japonica
  misc_feature (1)..(145): Homolog of NCBI NO: 15232797 NR Description: expressed protein [Arabidopsis thaliana]
MIRFLAVLANSGEMVYFFFDHFLWLSRIGSIDAKLAKKMSFISAFGESFGYTFFIIIDCIFIKQRLKSLKKLQHSTDEPKEEIGAKISEIRGDIVMRLMGISANVADLLIALAEIHPNPFCNHTITLGISGLVSAWAGWYRNWPS

SEQ ID NO: 21054 - DNA, 1200 bp, Arabidopsis thaliana
  misc_feature (1)..(1200): Ceres Seq. ID no. 12423019
  misc_feature: MA Experiment ID: 108433 Result: Up-regulated in Transcription
  misc_feature: MA Experiment 108433 PARAMETER Experiment Name: At_rhl_Mutant2_cDNA_P Parameter: Age (day) Value: 7
  misc_feature: MA Experiment 108433 PARAMETER Experiment Name: At_rhl_Mutant2_cDNA_P Parameter: Organism Value: A. thaliana
  misc_feature: MA Experiment 108433 PARAMETER Experiment Name: At_rhl_Mutant2_cDNA_P Parameter: Plant Line Value: rhl Mutant vs. wt landsburg
  misc_feature: MA Experiment 108433 PARAMETER Experiment Name: At_rhl_Mutant2_cDNA_P Parameter: Tissue Value: Roots
  misc_feature: MA Experiment ID: 108461 Result: Up-regulated in Transcription
  misc_feature: MA Experiment 108461 PARAMETER Experiment Name: At_Germinating_Seeds_cDNA_P Parameter: Age (day) Value: 1 vs. 0
  misc_feature: MA Experiment 108461 PARAMETER Experiment Name: At_Germinating_Seeds_cDNA_P Parameter: Tissue Value: Germinating Seeds
  misc_feature: MA Experiment ID: 108462 Result: Up-regulated in Transcription
  misc_feature: MA Experiment 108462 PARAMETER Experiment Name: At_Germinating_Seeds_cDNA_P Parameter: Age (day) Value: 2 vs. 0
  misc_feature: MA Experiment 108462 PARAMETER Experiment Name: At_Germinating_Seeds_cDNA_P Parameter: Tissue Value: Germinating Seeds
  misc_feature: MA Experiment ID: 108464 Result: Up-regulated in Transcription
  misc_feature: MA Experiment 108464 PARAMETER Experiment Name: At_Germinating_Seeds_cDNA_P Parameter: Age (day) Value: 4 vs. 0
  misc_feature: MA Experiment 108464 PARAMETER Experiment Name: At_Germinating_Seeds_cDNA_P Parameter: Tissue Value: Germinating Seeds
  misc_feature: MA Experiment ID: 108488 Result: Down-regulated in Transcription
  misc_feature: MA Experiment ID: 108501 Result: Up-regulated in Transcription
  misc_feature: MA Experiment 108501 PARAMETER Experiment Name: At_ap2_floral_buds_cDNA_P Parameter: Plant Line Value: ap2 (Ler.)
  misc_feature: MA Experiment 108501 PARAMETER Experiment Name: At_ap2_floral_buds_cDNA_P Parameter: Tissue Value: Closed Flower
  misc_feature: MA Experiment ID: 108579 Result: Up-regulated in Transcription
  misc_feature: MA Experiment 108579 PARAMETER Experiment Name: At_4deg_Cold_cDNA_P Parameter: Temperature (deg C) Value: 4 vs. 22
  misc_feature: MA Experiment 108579 PARAMETER Experiment Name: At_4deg_Cold_cDNA_P Parameter: Timepoint (hr) Value: 6
  misc_feature: MA Experiment 108579 PARAMETER Experiment Name: At_4deg_Cold_cDNA_P Parameter: Tissue Value: Aerial
  misc_feature: MA Experiment ID: 108595 Result: Down-regulated in Transcription
  misc_feature: MA Experiment 108595 PARAMETER Experiment Name: At_Ler-pi_Ovule_cDNA_P Parameter: Plant Line Value: null
  misc_feature: MA Experiment ID: 108668 Result: Down-regulated in Transcription
  misc_feature: MA Experiment 108668 PARAMETER Experiment Name: At_2mM_SA_cDNA_P Parameter: Plant Line Value: WS
  misc_feature: MA Experiment 108668 PARAMETER Experiment Name: At_2mM_SA_cDNA_P Parameter: Timepoint (hr) Value: 6
  misc_feature: MA Experiment 108668 PARAMETER Experiment Name: At_2mM_SA_cDNA_P Parameter: Treatment Value: 2mM SA vs. No Treatment
  misc_feature: MA Experiment ID: 20000090 Result: Down-regulated in Transcription
  misc_feature: MA Experiment ID: 20000093 Result: Down-regulated in Transcription
  misc_feature: MA Experiment 20000093 PARAMETER Experiment Name: At_42deg_Heat_cDNA_P Parameter: Temperature (deg C) Value: 42 vs. 22
  misc_feature: MA Experiment 20000093 PARAMETER Experiment Name: At_42deg_Heat_cDNA_P Parameter: Timepoint (hr) Value: 0.5
  misc_feature: MA Experiment 20000093 PARAMETER Experiment Name: At_42deg_Heat_cDNA_P Parameter: Tissue Value: Aerial
  misc_feature: MA Experiment ID: 20000111 Result: Down-regulated in Transcription
  misc_feature: MA Experiment 20000111 PARAMETER Experiment Name: At_42deg_Heat_cDNA_P Parameter: Temperature (deg C) Value: 42 vs. 22
  misc_feature: MA Experiment 20000111 PARAMETER Experiment Name: At_42deg_Heat_cDNA_P Parameter: Timepoint (hr) Value: 6
  misc_feature: MA Experiment 20000111 PARAMETER Experiment Name: At_42deg_Heat_cDNA_P Parameter: Tissue Value: Aerial
  misc_feature: MA Experiment ID: 20000144 Result: Down-regulated in Transcription
  misc_feature: MA Experiment 20000144 PARAMETER Experiment Name: At_42deg_Heat_cDNA_P Parameter: Temperature (deg C) Value: 42 vs. 22
  misc_feature: MA Experiment 20000144 PARAMETER Experiment Name: At_42deg_Heat_cDNA_P Parameter: Timepoint (hr) Value: 1
  misc_feature: MA Experiment 20000144 PARAMETER Experiment Name: At_42deg_Heat_cDNA_P Parameter: Tissue Value: Aerial
  misc_feature: MA Experiment ID: 20000171 Result: Down-regulated in Transcription
  misc_feature: MA Experiment 20000171 PARAMETER Experiment Name: At_42deg_Heat_P Parameter: Age (day) Value: 14
  misc_feature: MA Experiment 20000171 PARAMETER Experiment Name: At_42deg_Heat_P Parameter: Organism Value: A. thaliana
  misc_feature: MA Experiment 20000171 PARAMETER Experiment Name: At_42deg_Heat_P Parameter: Plant Line Value: WS
  misc_feature: MA Experiment 20000171 PARAMETER Experiment Name: At_42deg_Heat_P Parameter: Temperature (deg C) Value: 42 vs. 22
  misc_feature: MA Experiment 20000171 PARAMETER Experiment Name: At_42deg_Heat_P Parameter: Timepoint (hr) Value: 1
  misc_feature: MA Experiment 20000171 PARAMETER Experiment Name: At_42deg_Heat_P Parameter: Tissue Value: Aerial
  misc_feature: MA Experiment ID: 20000179 Result: Up-regulated in Transcription
  misc_feature: MA Experiment 20000179 PARAMETER Experiment Name: At_Germinating_Seeds_P Parameter: Age (hr) Value: 6 vs. 0
  misc_feature: MA Experiment 20000179 PARAMETER Experiment Name: At_Germinating_Seeds_P Parameter: Tissue Value: Germinating Seeds
  misc_feature: MA Experiment ID: 20000180 Result: Up-regulated in Transcription
  misc_feature: MA Experiment 20000180 PARAMETER Experiment Name: At_Germinating_Seeds_P Parameter: Age (hr) Value: 24 vs. 0
  misc_feature: MA Experiment 20000180 PARAMETER Experiment Name: At_Germinating_Seeds_P Parameter: Tissue Value: Germinating Seeds
  misc_feature: MA Experiment ID: 20000182 Result: Down-regulated in Transcription
  misc_feature: MA Experiment 20000182 PARAMETER Experiment Name: At_2mM_SA_P Parameter: Age (day) Value: 14
  misc_feature: MA Experiment 20000182 PARAMETER Experiment Name: At_2mM_SA_P Parameter: Organism Value: A. thaliana
  misc_feature: MA Experiment 20000182 PARAMETER Experiment Name: At_2mM_SA_P Parameter: Plant Line Value: WS
  misc_feature: MA Experiment 20000182 PARAMETER Experiment Name: At_2mM_SA_P Parameter: Timepoint (hr) Value: 6
  misc_feature: MA Experiment 20000182 PARAMETER Experiment Name: At_2mM_SA_P Parameter: Tissue Value: Aerial
  misc_feature: MA Experiment 20000182 PARAMETER Experiment Name: At_2mM_SA_P Parameter: Treatment Value: 2mM SA vs. No Treatment
  misc_feature: MA Experiment ID: 20000184 Result: Up-regulated in Transcription
  misc_feature: MA Experiment 20000184 PARAMETER Experiment Name: At_Shoots__P Parameter: Age (day) Value: 7
  misc_feature: MA Experiment 20000184 PARAMETER Experiment Name: At_Shoots__P Parameter: Tissue Value: Shoots vs. Whole Plant
  misc_feature: MA Experiment ID: 20000185 Result: Up-regulated in Transcription
  misc_feature: MA Experiment 20000185 PARAMETER Experiment Name: At_Roots__P Parameter: Age (day) Value: 7 vs. 21
  misc_feature: MA Experiment 20000185 PARAMETER Experiment Name: At_Roots__P Parameter: Organism Value: A. thaliana
  misc_feature: MA Experiment 20000185 PARAMETER Experiment Name: At_Roots__P Parameter: Tissue Value: Roots vs. Whole Plant
  misc_feature: MA Experiment ID: 20000224 Result: Down-regulated in Transcription
  misc_feature: MA Experiment ID: 20000438 Result: Up-regulated in Transcription
  misc_feature: MA Experiment 20000438 PARAMETER Experiment Name: At_Shoots__P Parameter: Age (day) Value: 14
  misc_feature: MA Experiment 20000438 PARAMETER Experiment Name: At_Shoots__P Parameter: Tissue Value: Shoots vs. Whole Plant
  misc_feature: MA Experiment ID: 20000439 Result: Up-regulated in Transcription
  misc_feature: MA Experiment 20000439 PARAMETER Experiment Name: At_Roots__P Parameter: Age (day) Value: 14 vs. 21
  misc_feature: MA Experiment 20000439 PARAMETER Experiment Name: At_Roots__P Parameter: Organism Value: A. thaliana
  misc_feature: MA Experiment 20000439 PARAMETER Experiment Name: At_Roots__P Parameter: Tissue Value: Roots vs. Whole Plant
  misc_feature: MA Experiment ID: 20000794 Result: Up-regulated in Transcription
  misc_feature: MA Experiment 20000794 PARAMETER Experiment Name: At_Petals_P Parameter: Age (day) Value: 23-25 days
  misc_feature: MA Experiment 20000794 PARAMETER Experiment Name: At_Petals_P Parameter: Plant Line Value: WS
  misc_feature: MA Experiment 20000794 PARAMETER Experiment Name: At_Petals_P Parameter: Tissue Value: Petals vs. Whole plant
  misc_feature: MA Experiment ID: 20001757 Result: Down-regulated in Transcription
  misc_feature: MA Experiment 20001757 PARAMETER Experiment Name: At_50mM_NH4NO3_L-to-H_P Parameter: Timepoint (hr) Value: 6
  misc_feature: MA Experiment 20001757 PARAMETER Experiment Name: At_50mM_NH4NO3_L-to-H_P Parameter: Tissue Value: Leaf
  misc_feature: MA Experiment 20001757 PARAMETER Experiment Name: At_50mM_NH4NO3_L-to-H_P Parameter: Treatment Value: 50mM NH4NO3 vs 100mM Mannitol
aaaggctcactccaactccaactccaactccaactccaactccaactaacaacactcttcttcattcttcttcaatcaatggaatctgaaatcgcctccgagtttcttcctttctgccggatttacaaagacggtcgtgtagaacgactcatcggcaccgataccatcccggcctctctagatccaacacacgacgtcgtttcaaaagacgttatatactcaccggagaataacctctccgttcgtctcttcctccctcacaaatcaacaaaactcaccgccggtaacaagctccctctacttatctacatccacggcggagcttggatcatcgagtcacctttctccccactctaccacaattacctcactgaagtagtcaaatccgctaactgcctcgctgtctctgttcagtatcgccgtgcaccggaagatcctgttccggcggcttatgaagatgtatggtccgcgattcagtggatttttgctcattctaatggatctggtcctgtagattggattaacaaacacgccgatttcggtaaagttttcctcggcggagatagcgcaggcggtaacatatcgcatcacatggcgatgaaagctggtaaagagaagaagctagatctcaaaatcaaaggtattgctgttgttcatccagctttctggggaacagatccggttgatgaatacgatgtgcaagataaagaaacgagaagcggaatcgcggaaatttgggagaagattgcgagtccgaatagtgttaatgggacggatgatccgttgtttaatgtaaacggatccgggtcggatttttctgggttgggatgtgataaggttttggttgcggtagctgggaaagatgtgtttgttaggcaaggattggcttatgcggcgaagctggagaagtgtgagtgggaaggtactgttgaggtggttgaggaagaaggtgaggaccatgtgtttcatttgcagaatcctaaatctgataaggctttgaaattcttgaagaagtttgtcgagtttattattggttgaaacttgaaagaatgttttttgtgtaaatgttcttcatgatcatgtaatcttgtttttaagaaataaaatacatgaatttcagactgtgtgagagttatatgaacctgttaaatgtgtgttattattttcttcaacatgagaaaaaaatatgtgtaaaatatc

SEQ ID NO: 21055 - protein, 345 aa, Arabidopsis thaliana
  peptide (1)..(345): Ceres Seq. ID no. 12423020
  misc_feature (72)..(123): Pfam Name: Carboxylesterase Pfam Description: Carboxylesterase
  misc_feature (27)..(343): Homolog of NCBI NO: 15221975 NR Description: hypothetical protein; protein id: At1g19190.1
  misc_feature (27)..(345): Homolog of NCBI NO: 15228426 NR Description: putative protein; protein id: At3g48700.1
  misc_feature (31)..(343): Homolog of NCBI NO: 28393060 NR Description: putative esterase [Arabidopsis thaliana]
  misc_feature (27)..(345): Homolog of NCBI NO: 18086341 NR Description: AT3g48690/T8P19_200 [Arabidopsis thaliana]
  misc_feature (27)..(345): Homolog of NCBI NO: 15228425 NR Description: putative protein
  misc_feature (27)..(343): Homolog of NCBI NO: 15227669 NR Description: putative esterase; protein id: At2g03550.1
  misc_feature (27)..(344): Homolog of NCBI NO: 15222791 NR Description: hypothetical protein; protein id: At1g49640.1
  misc_feature (17)..(345): Homolog of NCBI NO: 21537287 NR Description: putative esterase [Arabidopsis thaliana]
  misc_feature (17)..(345): Homolog of NCBI NO: 18402731 NR Description: expressed protein
  misc_feature (27)..(345): Homolog of NCBI NO: 15222795 NR Description: unknown protein; protein id: At1g49660.1
KGSLQLQLQLQLQLQLTTLFFILLQSMESEIASEFLPFCRIYKDGRVERLIGTDTIPASLDPTHDVVSKDVIYSPENNLSVRLFLPHKSTKLTAGNKLPLLIYIHGGAWIIESPFSPLYHNYLTEVVKSANCLAVSVQYRRAPEDPVPAAYEDVWSAIQWIFAHSNGSGPVDWINKHADFGKVFLGGDSAGGNISHHMAMKAGKEKKLDLKIKGIAVVHPAFWGTDPVDEYDVQDKETRSGIAEIWEKIASPNSVNGTDDPLFNVNGSGSDFSGLGCDKVLVAVAGKDVFVRQGLAYAAKLEKCEWEGTVEVVEEEGEDHVFHLQNPKSDKALKFLKKFVEFIIG

SEQ ID NO: 21056 - protein, 319 aa, Arabidopsis thaliana
  peptide (1)..(319): Ceres Seq. ID no. 12423021
  misc_feature (46)..(97): Pfam Name: Carboxylesterase Pfam Description: Carboxylesterase
  misc_feature (1)..(317): Homolog of NCBI NO: 15221975 NR Description: hypothetical protein; protein id: At1g19190.1
  misc_feature (1)..(319): Homolog of NCBI NO: 15228426 NR Description: putative protein; protein id: At3g48700.1
  misc_feature (5)..(317): Homolog of NCBI NO: 28393060 NR Description: putative esterase [Arabidopsis thaliana]
  misc_feature (1)..(319): Homolog of NCBI NO: 18086341 NR Description: AT3g48690/T8P19_200 [Arabidopsis thaliana]
  misc_feature (1)..(319): Homolog of NCBI NO: 15228425 NR Description: putative protein
  misc_feature (1)..(317): Homolog of NCBI NO: 15227669 NR Description: putative esterase; protein id: At2g03550.1
  misc_feature (1)..(318): Homolog of NCBI NO: 15222791 NR Description: hypothetical protein; protein id: At1g49640.1
  misc_feature (1)..(319): Homolog of NCBI NO: 21537287 NR Description: putative esterase [Arabidopsis thaliana]
  misc_feature (1)..(319): Homolog of NCBI NO: 18402731 NR Description: expressed protein
  misc_feature (1)..(319): Homolog of NCBI NO: 15222795 NR Description: unknown protein; protein id: At1g49660.1
MESEIASEFLPFCRIYKDGRVERLIGTDTIPASLDPTHDVVSKDVIYSPENNLSVRLFLPHKSTKLTAGNKLPLLIYIHGGAWIIESPFSPLYHNYLTEVVKSANCLAVSVQYRRAPEDPVPAAYEDVWSAIQWIFAHSNGSGPVDWINKHADFGKVFLGGDSAGGNISHHMAMKAGKEKKLDLKIKGIAVVHPAFWGTDPVDEYDVQDKETRSGIAEIWEKIASPNSVNGTDDPLFNVNGSGSDFSGLGCDKVLVAVAGKDVFVRQGLAYAAKLEKCEWEGTVEVVEEEGEDHVFHLQNPKSDKALKFLKKFVEFIIG

SEQ ID NO: 21057 - DNA, 1085 bp, Arabidopsis thaliana
  misc_feature (1)..(1085): Ceres Seq. ID no. 13488961
  misc_feature: MA Experiment ID: 108572 Result: Up-regulated in Transcription
  misc_feature: MA Experiment 108572 PARAMETER Experiment Name: At_Drought_cDNA_P Parameter: Timepoint (hr) Value: 1
  misc_feature: MA Experiment 108572 PARAMETER Experiment Name: At_Drought_cDNA_P Parameter: Tissue Value: Aerial
  misc_feature: MA Experiment 108572 PARAMETER Experiment Name: At_Drought_cDNA_P Parameter: Treatment Value: Drought vs. No Drought
  misc_feature: MA Experiment ID: 108573 Result: Up-regulated in Transcription
  misc_feature: MA Experiment 108573 PARAMETER Experiment Name: At_Drought_cDNA_P Parameter: Timepoint (hr) Value: 6
  misc_feature: MA Experiment 108573 PARAMETER Experiment Name: At_Drought_cDNA_P Parameter: Tissue Value: Aerial
  misc_feature: MA Experiment 108573 PARAMETER Experiment Name: At_Drought_cDNA_P Parameter: Treatment Value: Drought vs. No Drought
  misc_feature: MA Experiment ID: 108576 Result: Up-regulated in Transcription
  misc_feature: MA Experiment 108576 PARAMETER Experiment Name: At_42deg_Heat_cDNA_P Parameter: Temperature (deg C) Value: 42 vs. 22
  misc_feature: MA Experiment 108576 PARAMETER Experiment Name: At_42deg_Heat_cDNA_P Parameter: Timepoint (hr) Value: 1
  misc_feature: MA Experiment 108576 PARAMETER Experiment Name: At_42deg_Heat_cDNA_P Parameter: Tissue Value: Aerial
  misc_feature: MA Experiment ID: 108577 Result: Up-regulated in Transcription
  misc_feature: MA Experiment 108577 PARAMETER Experiment Name: At_42deg_Heat_cDNA_P Parameter: Temperature (deg C) Value: 42 vs. 22
  misc_feature: MA Experiment 108577 PARAMETER Experiment Name: At_42deg_Heat_cDNA_P Parameter: Timepoint (hr) Value: 6
  misc_feature: MA Experiment 108577 PARAMETER Experiment Name: At_42deg_Heat_cDNA_P Parameter: Tissue Value: Aerial
  misc_feature: MA Experiment ID: 108579 Result: Down-regulated in Transcription
  misc_feature: MA Experiment 108579 PARAMETER Experiment Name: At_4deg_Cold_cDNA_P Parameter: Temperature (deg C) Value: 4 vs. 22
  misc_feature: MA Experiment 108579 PARAMETER Experiment Name: At_4deg_Cold_cDNA_P Parameter: Timepoint (hr) Value: 6
  misc_feature: MA Experiment 108579 PARAMETER Experiment Name: At_4deg_Cold_cDNA_P Parameter: Tissue Value: Aerial
  misc_feature: MA Experiment ID: 108595 Result: Down-regulated in Transcription
  misc_feature: MA Experiment 108595 PARAMETER Experiment Name: At_Ler-pi_Ovule_cDNA_P Parameter: Plant Line Value: null
  misc_feature: MA Experiment ID: 20000093 Result: Up-regulated in Transcription
  misc_feature: MA Experiment 20000093 PARAMETER Experiment Name: At_42deg_Heat_cDNA_P Parameter: Temperature (deg C) Value: 42 vs. 22
  misc_feature: MA Experiment 20000093 PARAMETER Experiment Name: At_42deg_Heat_cDNA_P Parameter: Timepoint (hr) Value: 0.5
  misc_feature: MA Experiment 20000093 PARAMETER Experiment Name: At_42deg_Heat_cDNA_P Parameter: Tissue Value: Aerial
  misc_feature: MA Experiment ID: 20000111 Result: Up-regulated in Transcription
  misc_feature: MA Experiment 20000111 PARAMETER Experiment Name: At_42deg_Heat_cDNA_P Parameter: Temperature (deg C) Value: 42 vs. 22
  misc_feature: MA Experiment 20000111 PARAMETER Experiment Name: At_42deg_Heat_cDNA_P Parameter: Timepoint (hr) Value: 6
  misc_feature: MA Experiment 20000111 PARAMETER Experiment Name: At_42deg_Heat_cDNA_P Parameter: Tissue Value: Aerial
  misc_feature: MA Experiment ID: 20000112 Result: Up-regulated in Transcription
  misc_feature: MA Experiment 20000112 PARAMETER Experiment Name: At_42deg_Heat_cDNA_P Parameter: Temperature (deg C) Value: 42 vs. 22
  misc_feature: MA Experiment 20000112 PARAMETER Experiment Name: At_42deg_Heat_cDNA_P Parameter: Timepoint (hr) Value: 2
  misc_feature: MA Experiment 20000112 PARAMETER Experiment Name: At_42deg_Heat_cDNA_P Parameter: Tissue Value: Aerial
  misc_feature: MA Experiment ID: 20000113 Result: Up-regulated in Transcription
  misc_feature: MA Experiment 20000113 PARAMETER Experiment Name: At_42deg_Heat_cDNA_P Parameter: Temperature (deg C) Value: 42 vs. 22
  misc_feature: MA Experiment 20000113 PARAMETER Experiment Name: At_42deg_Heat_cDNA_P Parameter: Timepoint (hr) Value: 8
  misc_feature: MA Experiment 20000113 PARAMETER Experiment Name: At_42deg_Heat_cDNA_P Parameter: Tissue Value: Aerial
  misc_feature: MA Experiment ID: 20000144 Result: Up-regulated in Transcription
  misc_feature: MA Experiment 20000144 PARAMETER Experiment Name: At_42deg_Heat_cDNA_P Parameter: Temperature (deg C) Value: 42 vs. 22
  misc_feature: MA Experiment 20000144 PARAMETER Experiment Name: At_42deg_Heat_cDNA_P Parameter: Timepoint (hr) Value: 1
  misc_feature: MA Experiment 20000144 PARAMETER Experiment Name: At_42deg_Heat_cDNA_P Parameter: Tissue Value: Aerial
  misc_feature: MA Experiment ID: 20000171 Result: Up-regulated in Transcription
  misc_feature: MA Experiment 20000171 PARAMETER Experiment Name: At_42deg_Heat_P Parameter: Age (day) Value: 14
  misc_feature: MA Experiment 20000171 PARAMETER Experiment Name: At_42deg_Heat_P Parameter: Organism Value: A. thaliana
  misc_feature: MA Experiment 20000171 PARAMETER Experiment Name: At_42deg_Heat_P Parameter: Plant Line Value: WS
  misc_feature: MA Experiment 20000171 PARAMETER Experiment Name: At_42deg_Heat_P Parameter: Temperature (deg C) Value: 42 vs. 22
  misc_feature: MA Experiment 20000171 PARAMETER Experiment Name: At_42deg_Heat_P Parameter: Timepoint (hr) Value: 1
  misc_feature: MA Experiment 20000171 PARAMETER Experiment Name: At_42deg_Heat_P Parameter: Tissue Value: Aerial
  misc_feature: MA Experiment ID: 20000173 Result: Up-regulated in Transcription
  misc_feature: MA Experiment 20000173 PARAMETER Experiment Name: At_42deg_Heat_P Parameter: Age (day) Value: 14
  misc_feature: MA Experiment 20000173 PARAMETER Experiment Name: At_42deg_Heat_P Parameter: Organism Value: A. thaliana
  misc_feature: MA Experiment 20000173 PARAMETER Experiment Name: At_42deg_Heat_P Parameter: Plant Line Value: WS
  misc_feature: MA Experiment 20000173 PARAMETER Experiment Name: At_42deg_Heat_P Parameter: Temperature (deg C) Value: 42 vs. 22
  misc_feature: MA Experiment 20000173 PARAMETER Experiment Name: At_42deg_Heat_P Parameter: Timepoint (hr) Value: 6
  misc_feature: MA Experiment 20000173 PARAMETER Experiment Name: At_42deg_Heat_P Parameter: Tissue Value: Aerial
  misc_feature: MA Experiment ID: 20000224 Result: Down-regulated in Transcription
  misc_feature: MA Experiment ID: 20000227 Result: Down-regulated in Transcription
  misc_feature: MA Experiment 20000227 PARAMETER Experiment Name: At_Root-Tips-vs-Tops_P Parameter: Tissue Value: Root Tips vs. Root Tops
  misc_feature: MA Experiment ID: 20000234 Result: Down-regulated in Transcription
  misc_feature: MA Experiment 20000234 PARAMETER Experiment Name: At_Siliques_P Parameter: Age (day) Value: 21
  misc_feature: MA Experiment 20000234 PARAMETER Experiment Name: At_Siliques_P Parameter: Organism Value: A. thaliana
  misc_feature: MA Experiment 20000234 PARAMETER Experiment Name: At_Siliques_P Parameter: Plant Line Value: WS
  misc_feature: MA Experiment 20000234 PARAMETER Experiment Name: At_Siliques_P Parameter: Tissue Value: Less Than 5mm Siliques vs. Whole Plant
  misc_feature: MA Experiment ID: 20000264 Result: Down-regulated in Transcription
  misc_feature: MA Experiment 20000264 PARAMETER Experiment Name: At_Open_Flower_P Parameter: Age (day) Value: 21
  misc_feature: MA Experiment 20000264 PARAMETER Experiment Name: At_Open_Flower_P Parameter: Plant Line Value: WS
  misc_feature: MA Experiment 20000264 PARAMETER Experiment Name: At_Open_Flower_P Parameter: Tissue Value: Open Flower vs. Whole Plant
  misc_feature: MA Experiment ID: 20000265 Result: Down-regulated in Transcription
  misc_feature: MA Experiment 20000265 PARAMETER Experiment Name: At_Open_Flower_P Parameter: Age (day) Value: 21
  misc_feature: MA Experiment 20000265 PARAMETER Experiment Name: At_Open_Flower_P Parameter: Plant Line Value: WS
  misc_feature: MA Experiment 20000265 PARAMETER Experiment Name: At_Open_Flower_P Parameter: Tissue Value: Closed Flower vs. Whole Plant
acagattcgatttgggtgtctttggttttggatttggtaaagcttctcggtcacttgcttggtgattgaaattgaatcgattgtgattgtgattgtgagggaattatggctcaagccgtagaagagtggtacaagcagatgccgattataacccggtcgtatctcacggcggctgtagtcaccaccgtcgggtgttcgctcgagattatatctccttataatctctacctaaatcctacccttgtggtgaagcaataccagttctggcgtcttgtcacaaatttcctttatttccgaaagatggatttggactttttgttccatatgttttttctagctcgatactgcaaactgctcgaagaaaactccttcaggggaaagaccgcggatttcctttacatgctcttattcggggcaactgttctaactggtattgttctcattggcggaatgataccttatttgtctgtttcattctccaaaatcatcttcctcagcaattcattgactttcatgatggtctatgtatggagtaaacaaaatccttacatccacatgagtttccttggcctcttcactttcacagcagcttatttaccatgggtacttcttggattctctatccttgttggtgcaagtgcatggggggattttctgggaatgatagcgggccacgcatactacttcttggcatttgtgtatccccgaatgacggatcgacgtcccttgaaaactccatctttcctcaaggccctatttgctgatgagccagtcgtgattgcaaggccagaagatgtgagatttgctcatgcgccttttgatgaaatccaccaagactgaatcttgatcctccacaaaacaccagccacaacgcacagttcaagtgtactcagataatgttattgactcttgacctttatagttgtggataatgtggaagtgagatagtgttggctctgatttttttccctagttttctgtctgcttttcttgtccgatacaaatgtgtttcctccttgtgcatatgaactcaaattgtgtacaaagtcttcaaaagtactagtttatagtttcgtcattagatc

SEQ ID NO: 21058 - protein, 244 aa, Arabidopsis thaliana
  peptide (1)..(244): Ceres Seq. ID no. 13488962
  misc_feature (12)..(212): Pfam Name: Der1-like family Pfam Description: Der1-like family
  misc_feature (3)..(222): Homolog of NCBI NO: 31455614 NR Description: carcinoma related gene [Homo sapiens]
  misc_feature (139)..(244): Homolog of NCBI NO: 4455289 NR Description: putative protein [Arabidopsis thaliana]
  misc_feature (3)..(230): Homolog of NCBI NO: 31219425 NR Description: ENSANGP00000001887 [Anopheles gambiae]
  misc_feature (1)..(239): Homolog of NCBI NO: 40352706 NR Description: Unknown (protein for MGC:63991) [Danio rerio]
  misc_feature (1)..(244): Homolog of NCBI NO: 27573354 NR Description: putative Der1-like protein
  misc_feature (34)..(244): Homolog of NCBI NO: 25407582 NR Description: hypothetical protein AT4g21810 [imported] -
  misc_feature (15)..(244): Homolog of NCBI NO: 7487831 NR Description: hypothetical protein T8O5.20 - Arabidopsis
  misc_feature (1)..(244): Homolog of NCBI NO: 15234480 NR Description: expressed protein [Arabidopsis thaliana]
  misc_feature (1)..(244): Homolog of NCBI NO: 22328865 NR Description: expressed protein [Arabidopsis thaliana]
  misc_feature (1)..(244): Homolog of NCBI NO: 17473759 NR Description: putative protein [Arabidopsis thaliana]
MAQAVEEWYKQMPIITRSYLTAAVVTTVGCSLEIISPYNLYLNPTLVVKQYQFWRLVTNFLYFRKMDLDFLFHMFFLARYCKLLEENSFRGKTADFLYMLLFGATVLTGIVLIGGMIPYLSVSFSKIIFLSNSLTFMMVYVWSKQNPYIHMSFLGLFTFTAAYLPWVLLGFSILVGASAWGDFLGMIAGHAYYFLAFVYPRMTDRRPLKTPSFLKALFADEPVVIARPEDVRFAHAPFDEIHQD

SEQ ID NO: 21059 - protein, 233 aa, Arabidopsis thaliana
  peptide (1)..(233): Ceres Seq. ID no. 13488963
  misc_feature (1)..(201): Pfam Name: Der1-like family Pfam Description: Der1-like family
  misc_feature (1)..(211): Homolog of NCBI NO: 31455614 NR Description: carcinoma related gene [Homo sapiens]
  misc_feature (128)..(233): Homolog of NCBI NO: 4455289 NR Description: putative protein [Arabidopsis thaliana]
  misc_feature (1)..(219): Homolog of NCBI NO: 31219425 NR Description: ENSANGP00000001887 [Anopheles gambiae]
  misc_feature (1)..(228): Homolog of NCBI NO: 40352706 NR Description: Unknown (protein for MGC:63991) [Danio rerio]
  misc_feature (1)..(233): Homolog of NCBI NO: 27573354 NR Description: putative Der1-like protein
  misc_feature (23)..(233): Homolog of NCBI NO: 25407582 NR Description: hypothetical protein AT4g21810 [imported] -
  misc_feature (4)..(233): Homolog of NCBI NO: 7487831 NR Description: hypothetical protein T8O5.20 - Arabidopsis
  misc_feature (1)..(233): Homolog of NCBI NO: 15234480 NR Description: expressed protein [Arabidopsis thaliana]
  misc_feature (1)..(233): Homolog of NCBI NO: 22328865 NR Description: expressed protein [Arabidopsis thaliana]
  misc_feature (1)..(233): Homolog of NCBI NO: 17473759 NR Description: putative protein [Arabidopsis thaliana]
MPIITRSYLTAAVVTTVGCSLEIISPYNLYLNPTLVVKQYQFWRLVTNFLYFRKMDLDFLFHMFFLARYCKLLEENSFRGKTADFLYMLLFGATVLTGIVLIGGMIPYLSVSFSKIIFLSNSLTFMMVYVWSKQNPYIHMSFLGLFTFTAAYLPWVLLGFSILVGASAWGDFLGMIAGHAYYFLAFVYPRMTDRRPLKTPSFLKALFADEPVVIARPEDVRFAHAPFDEIHQD

SEQ ID NO: 21060 - protein, 179 aa, Arabidopsis thaliana
  peptide (1)..(179): Ceres Seq. ID no. 13488964
  misc_feature (1)..(147): Pfam Name: Der1-like family Pfam Description: Der1-like family
  misc_feature (1)..(157): Homolog of NCBI NO: 31455614 NR Description: carcinoma related gene [Homo sapiens]
  misc_feature (74)..(179): Homolog of NCBI NO: 4455289 NR Description: putative protein [Arabidopsis thaliana]
  misc_feature (1)..(165): Homolog of NCBI NO: 31219425 NR Description: ENSANGP00000001887 [Anopheles gambiae]
  misc_feature (1)..(174): Homolog of NCBI NO: 40352706 NR Description: Unknown (protein for MGC:63991) [Danio rerio]
  misc_feature (1)..(179): Homolog of NCBI NO: 27573354 NR Description: putative Der1-like protein
  misc_feature (1)..(179): Homolog of NCBI NO: 25407582 NR Description: hypothetical protein AT4g21810 [imported] -
  misc_feature (1)..(179): Homolog of NCBI NO: 7487831 NR Description: hypothetical protein T8O5.20 - Arabidopsis
  misc_feature (1)..(179): Homolog of NCBI NO: 15234480 NR Description: expressed protein [Arabidopsis thaliana]
  misc_feature (1)..(179): Homolog of NCBI NO: 22328865 NR Description: expressed protein [Arabidopsis thaliana]
  misc_feature (1)..(179): Homolog of NCBI NO: 17473759 NR Description: putative protein [Arabidopsis thaliana]
MDLDFLFHMFFLARYCKLLEENSFRGKTADFLYMLLFGATVLTGIVLIGGMIPYLSVSFSKIIFLSNSLTFMMVYVWSKQNPYIHMSFLGLFTFTAAYLPWVLLGFSILVGASAWGDFLGMIAGHAYYFLAFVYPRMTDRRPLKTPSFLKALFADEPVVIARPEDVRFAHAPFDEIHQD

SEQ ID NO: 21061 - DNA, 964 bp, Arabidopsis thaliana
  misc_feature (1)..(964): Ceres Seq. ID no. 12718649
  misc_feature: MA Experiment ID: 108433 Result: Down-regulated in Transcription
  misc_feature: MA Experiment 108433 PARAMETER Experiment Name: At_rhl_Mutant2_cDNA_P Parameter: Age (day) Value: 7
  misc_feature: MA Experiment 108433 PARAMETER Experiment Name: At_rhl_Mutant2_cDNA_P Parameter: Organism Value: A. thaliana
  misc_feature: MA Experiment 108433 PARAMETER Experiment Name: At_rhl_Mutant2_cDNA_P Parameter: Plant Line Value: rhl Mutant vs. wt landsburg
  misc_feature: MA Experiment 108433 PARAMETER Experiment Name: At_rhl_Mutant2_cDNA_P Parameter: Tissue Value: Roots
  misc_feature: MA Experiment ID: 108488 Result: Down-regulated in Transcription
  misc_feature: MA Experiment ID: 108561 Result: Up-regulated in Transcription
  misc_feature: MA Experiment 108561 PARAMETER Experiment Name: At_100uM_ABA_cDNA_P Parameter: Timepoint (hr) Value: 6
  misc_feature: MA Experiment 108561 PARAMETER Experiment Name: At_100uM_ABA_cDNA_P Parameter: Tissue Value: Aerial
  misc_feature: MA Experiment 108561 PARAMETER Experiment Name: At_100uM_ABA_cDNA_P Parameter: Treatment Value: 100uM ABA vs. No Treatment
  misc_feature: MA Experiment ID: 108572 Result: Up-regulated in Transcription
  misc_feature: MA Experiment 108572 PARAMETER Experiment Name: At_Drought_cDNA_P Parameter: Timepoint (hr) Value: 1
  misc_feature: MA Experiment 108572 PARAMETER Experiment Name: At_Drought_cDNA_P Parameter: Tissue Value: Aerial
  misc_feature: MA Experiment 108572 PARAMETER Experiment Name: At_Drought_cDNA_P Parameter: Treatment Value: Drought vs. No Drought
  misc_feature: MA Experiment ID: 108573 Result: Up-regulated in Transcription
  misc_feature: MA Experiment 108573 PARAMETER Experiment Name: At_Drought_cDNA_P Parameter: Timepoint (hr) Value: 6
  misc_feature: MA Experiment 108573 PARAMETER Experiment Name: At_Drought_cDNA_P Parameter: Tissue Value: Aerial
  misc_feature: MA Experiment 108573 PARAMETER Experiment Name: At_Drought_cDNA_P Parameter: Treatment Value: Drought vs. No Drought
  misc_feature: MA Experiment ID: 108576 Result: Up-regulated in Transcription
  misc_feature: MA Experiment 108576 PARAMETER Experiment Name: At_42deg_Heat_cDNA_P Parameter: Temperature (deg C) Value: 42 vs. 22
  misc_feature: MA Experiment 108576 PARAMETER Experiment Name: At_42deg_Heat_cDNA_P Parameter: Timepoint (hr) Value: 1
  misc_feature: MA Experiment 108576 PARAMETER Experiment Name: At_42deg_Heat_cDNA_P Parameter: Tissue Value: Aerial
  misc_feature: MA Experiment ID: 108585 Result: Up-regulated in Transcription
  misc_feature: MA Experiment 108585 PARAMETER Experiment Name: At_5mM_NaNP_cDNA_P Parameter: Timepoint (hr) Value: 6
  misc_feature: MA Experiment 108585 PARAMETER Experiment Name: At_5mM_NaNP_cDNA_P Parameter: Tissue Value: Aerial
  misc_feature: MA Experiment 108585 PARAMETER Experiment Name: At_5mM_NaNP_cDNA_P Parameter: Treatment Value: null
  misc_feature: MA Experiment ID: 108605 Result: Up-regulated in Transcription
  misc_feature: MA Experiment 108605 PARAMETER Experiment Name: At_100uM_ABA_cDNA_P Parameter: Timepoint (hr) Value: 6
  misc_feature: MA Experiment 108605 PARAMETER Experiment Name: At_100uM_ABA_cDNA_P Parameter: Tissue Value: Aerial
  misc_feature: MA Experiment 108605 PARAMETER Experiment Name: At_100uM_ABA_cDNA_P Parameter: Treatment Value: 100uM ABA vs. No Treatment
  misc_feature: MA Experiment ID: 108607 Result: Up-regulated in Transcription
  misc_feature: MA Experiment 108607 PARAMETER Experiment Name: At_100uM_ABA_cDNA_P Parameter: Timepoint (hr) Value: 4
  misc_feature: MA Experiment 108607 PARAMETER Experiment Name: At_100uM_ABA_cDNA_P Parameter: Tissue Value: Aerial
  misc_feature: MA Experiment 108607 PARAMETER Experiment Name: At_100uM_ABA_cDNA_P Parameter: Treatment Value: 100uM ABA vs. No Treatment
  misc_feature: MA Experiment ID: 108608 Result: Up-regulated in Transcription
  misc_feature: MA Experiment 108608 PARAMETER Experiment Name: At_100uM_ABA_cDNA_P Parameter: Timepoint (hr) Value: 1
  misc_feature: MA Experiment 108608 PARAMETER Experiment Name: At_100uM_ABA_cDNA_P Parameter: Tissue Value: Aerial
  misc_feature: MA Experiment 108608 PARAMETER Experiment Name: At_100uM_ABA_cDNA_P Parameter: Treatment Value: 100uM ABA vs. No Treatment
  misc_feature: MA Experiment ID: 108609 Result: Up-regulated in Transcription
  misc_feature: MA Experiment 108609 PARAMETER Experiment Name: At_100uM_ABA_cDNA_P Parameter: Timepoint (hr) Value: 24
  misc_feature: MA Experiment 108609 PARAMETER Experiment Name: At_100uM_ABA_cDNA_P Parameter: Tissue Value: Aerial
  misc_feature: MA Experiment 108609 PARAMETER Experiment Name: At_100uM_ABA_cDNA_P Parameter: Treatment Value: 100uM ABA vs. No Treatment
  misc_feature: MA Experiment ID: 20000069 Result: Up-regulated in Transcription
  misc_feature: MA Experiment 20000069 PARAMETER Experiment Name: At_100uM_ABA_Mutants_cDNA_P Parameter: Plant Line Value: CS23
  misc_feature: MA Experiment 20000069 PARAMETER Experiment Name: At_100uM_ABA_Mutants_cDNA_P Parameter: Timepoint (hr) Value: 6
  misc_feature: MA Experiment 20000069 PARAMETER Experiment Name: At_100uM_ABA_Mutants_cDNA_P Parameter: Tissue Value: Aerial
  misc_feature: MA Experiment 20000069 PARAMETER Experiment Name: At_100uM_ABA_Mutants_cDNA_P Parameter: Treatment Value: 100uM ABA vs. No Treatment
  misc_feature: MA Experiment ID: 20000070 Result: Up-regulated in Transcription
  misc_feature: MA Experiment 20000070 PARAMETER Experiment Name: At_100uM_ABA_Mutants_cDNA_P Parameter: Plant Line Value: CS24
  misc_feature: MA Experiment 20000070 PARAMETER Experiment Name: At_100uM_ABA_Mutants_cDNA_P Parameter: Timepoint (hr) Value: 6
  misc_feature: MA Experiment 20000070 PARAMETER Experiment Name: At_100uM_ABA_Mutants_cDNA_P Parameter: Tissue Value: Aerial
  misc_feature: MA Experiment 20000070 PARAMETER Experiment Name: At_100uM_ABA_Mutants_cDNA_P Parameter: Treatment Value: 100uM ABA vs. No Treatment
  misc_feature: MA Experiment ID: 20000071 Result: Up-regulated in Transcription
  misc_feature: MA Experiment 20000071 PARAMETER Experiment Name: At_100uM_ABA_Mutants_cDNA_P Parameter: Plant Line Value: CS8104
  misc_feature: MA Experiment 20000071 PARAMETER Experiment Name: At_100uM_ABA_Mutants_cDNA_P Parameter: Timepoint (hr) Value: 6
  misc_feature: MA Experiment 20000071 PARAMETER Experiment Name: At_100uM_ABA_Mutants_cDNA_P Parameter: Tissue Value: Aerial
  misc_feature: MA Experiment 20000071 PARAMETER Experiment Name: At_100uM_ABA_Mutants_cDNA_P Parameter: Treatment Value: 100uM ABA vs. No Treatment
  misc_feature: MA Experiment ID: 20000087 Result: Up-regulated in Transcription
  misc_feature: MA Experiment 20000087 PARAMETER Experiment Name: At_100uM_ABA_Mutants_cDNA_P Parameter: Plant Line Value: WS
  misc_feature: MA Experiment 20000087 PARAMETER Experiment Name: At_100uM_ABA_Mutants_cDNA_P Parameter: Timepoint (hr) Value: 6
  misc_feature: MA Experiment 20000087 PARAMETER Experiment Name: At_100uM_ABA_Mutants_cDNA_P Parameter: Tissue Value: Aerial
  misc_feature: MA Experiment 20000087 PARAMETER Experiment Name: At_100uM_ABA_Mutants_cDNA_P Parameter: Treatment Value: 100uM ABA vs. No Treatment
  misc_feature: MA Experiment ID: 20000088 Result: Up-regulated in Transcription
  misc_feature: MA Experiment 20000088 PARAMETER Experiment Name: At_100uM_ABA_Mutants_cDNA_P Parameter: Plant Line Value: Landsberg
  misc_feature: MA Experiment 20000088 PARAMETER Experiment Name: At_100uM_ABA_Mutants_cDNA_P Parameter: Timepoint (hr) Value: 6
  misc_feature: MA Experiment 20000088 PARAMETER Experiment Name: At_100uM_ABA_Mutants_cDNA_P Parameter: Tissue Value: Aerial
  misc_feature: MA Experiment 20000088 PARAMETER Experiment Name: At_100uM_ABA_Mutants_cDNA_P Parameter: Treatment Value: 100uM ABA vs. No Treatment
  misc_feature: MA Experiment ID: 20000117 Result: Up-regulated in Transcription
  misc_feature: MA Experiment 20000117 PARAMETER Experiment Name: At_100uM_ABA_Mutants_cDNA_P Parameter: Plant Line Value: Columbia
  misc_feature: MA Experiment 20000117 PARAMETER Experiment Name: At_100uM_ABA_Mutants_cDNA_P Parameter: Timepoint (hr) Value: 6
  misc_feature: MA Experiment 20000117 PARAMETER Experiment Name: At_100uM_ABA_Mutants_cDNA_P Parameter: Tissue Value: Aerial
  misc_feature: MA Experiment 20000117 PARAMETER Experiment Name: At_100uM_ABA_Mutants_cDNA_P Parameter: Treatment Value: 100uM ABA vs. No Treatment
  misc_feature: MA Experiment ID: 20000144 Result: Up-regulated in Transcription
  misc_feature: MA Experiment 20000144 PARAMETER Experiment Name: At_42deg_Heat_cDNA_P Parameter: Temperature (deg C) Value: 42 vs. 22
  misc_feature: MA Experiment 20000144 PARAMETER Experiment Name: At_42deg_Heat_cDNA_P Parameter: Timepoint (hr) Value: 1
  misc_feature: MA Experiment 20000144 PARAMETER Experiment Name: At_42deg_Heat_cDNA_P Parameter: Tissue Value: Aerial
  misc_feature: MA Experiment ID: 20000166 Result: Up-regulated in Transcription
  misc_feature: MA Experiment 20000166 PARAMETER Experiment Name: At_100uM_ABA_P Parameter: Age (day) Value: 14
  misc_feature: MA Experiment 20000166 PARAMETER Experiment Name: At_100uM_ABA_P Parameter: Organism Value: A. thaliana
  misc_feature: MA Experiment 20000166 PARAMETER Experiment Name: At_100uM_ABA_P Parameter: Plant Line Value: WS
  misc_feature: MA Experiment 20000166 PARAMETER Experiment Name: At_100uM_ABA_P Parameter: Timepoint (hr) Value: 1
  misc_feature: MA Experiment 20000166 PARAMETER Experiment Name: At_100uM_ABA_P Parameter: Tissue Value: Aerial
  misc_feature: MA Experiment 20000166 PARAMETER Experiment Name: At_100uM_ABA_P Parameter: Treatment Value: 100uM ABA vs. No Treatment
  misc_feature: MA Experiment ID: 20000169 Result: Up-regulated in Transcription
  misc_feature: MA Experiment 20000169 PARAMETER Experiment Name: At_100uM_ABA_P Parameter: Age (day) Value: 14
  misc_feature: MA Experiment 20000169 PARAMETER Experiment Name: At_100uM_ABA_P Parameter: Organism Value: A. thaliana
  misc_feature: MA Experiment 20000169 PARAMETER Experiment Name: At_100uM_ABA_P Parameter: Plant Line Value: WS
  misc_feature: MA Experiment 20000169 PARAMETER Experiment Name: At_100uM_ABA_P Parameter: Timepoint (hr) Value: 6
  misc_feature: MA Experiment 20000169 PARAMETER Experiment Name: At_100uM_ABA_P Parameter: Tissue Value: Aerial
  misc_feature: MA Experiment 20000169 PARAMETER Experiment Name: At_100uM_ABA_P Parameter: Treatment Value: 100uM ABA vs. No Treatment
  misc_feature: MA Experiment ID: 20000329 Result: Down-regulated in Transcription
  misc_feature: MA Experiment 20000329 PARAMETER Experiment Name: At_4deg_Cold_Sub_P Parameter: Age (day) Value: 14
  misc_feature: MA Experiment 20000329 PARAMETER Experiment Name: At_4deg_Cold_Sub_P Parameter: Organism Value: A. thaliana
  misc_feature: MA Experiment 20000329 PARAMETER Experiment Name: At_4deg_Cold_Sub_P Parameter: Plant Line Value: WS
  misc_feature: MA Experiment 20000329 PARAMETER Experiment Name: At_4deg_Cold_Sub_P Parameter: Temperature (deg C) Value: 4 vs. 22
  misc_feature: MA Experiment 20000329 PARAMETER Experiment Name: At_4deg_Cold_Sub_P Parameter: Timepoint (hr) Value: 6
  misc_feature: MA Experiment 20000329 PARAMETER Experiment Name: At_4deg_Cold_Sub_P Parameter: Tissue Value: Aerial
  misc_feature: MA Experiment ID: 20000348 Result: Up-regulated in Transcription
  misc_feature: MA Experiment 20000348 PARAMETER Experiment Name: At_100uM_ABA_Sub_P Parameter: Age (day) Value: 14
  misc_feature: MA Experiment 20000348 PARAMETER Experiment Name: At_100uM_ABA_Sub_P Parameter: Organism Value: A. thaliana
  misc_feature: MA Experiment 20000348 PARAMETER Experiment Name: At_100uM_ABA_Sub_P Parameter: Plant Line Value: WS
  misc_feature: MA Experiment 20000348 PARAMETER Experiment Name: At_100uM_ABA_Sub_P Parameter: Timepoint (hr) Value: 1
  misc_feature: MA Experiment 20000348 PARAMETER Experiment Name: At_100uM_ABA_Sub_P Parameter: Tissue Value: Aerial
  misc_feature: MA Experiment 20000348 PARAMETER Experiment Name: At_100uM_ABA_Sub_P Parameter: Treatment Value: 100uM ABA vs. No Treatment
  misc_feature: MA Experiment ID: 20000349 Result: Up-regulated in Transcription
  misc_feature: MA Experiment 20000349 PARAMETER Experiment Name: At_100uM_ABA_Sub_P Parameter: Age (day) Value: 14
  misc_feature: MA Experiment 20000349 PARAMETER Experiment Name: At_100uM_ABA_Sub_P Parameter: Organism Value: A. thaliana
  misc_feature: MA Experiment 20000349 PARAMETER Experiment Name: At_100uM_ABA_Sub_P Parameter: Plant Line Value: WS
  misc_feature: MA Experiment 20000349 PARAMETER Experiment Name: At_100uM_ABA_Sub_P Parameter: Timepoint (hr) Value: 6
  misc_feature: MA Experiment 20000349 PARAMETER Experiment Name: At_100uM_ABA_Sub_P Parameter: Tissue Value: Aerial
  misc_feature: MA Experiment 20000349 PARAMETER Experiment Name: At_100uM_ABA_Sub_P Parameter: Treatment Value: 100uM ABA vs. No Treatment
  misc_feature: MA Experiment ID: 20000437 Result: Up-regulated in Transcription
  misc_feature: MA Experiment 20000437 PARAMETER Experiment Name: At_Drought_P Parameter: Age (day) Value: 8
  misc_feature: MA Experiment 20000437 PARAMETER Experiment Name: At_Drought_P Parameter: Organism Value: A. thaliana
  misc_feature: MA Experiment 20000437 PARAMETER Experiment Name: At_Drought_P Parameter: Plant Line Value: WS
  misc_feature: MA Experiment 20000437 PARAMETER Experiment Name: At_Drought_P Parameter: Timepoint (hr) Value: 24
  misc_feature: MA Experiment 20000437 PARAMETER Experiment Name: At_Drought_P Parameter: Tissue Value: Whole Plant
  misc_feature: MA Experiment 20000437 PARAMETER Experiment Name: At_Drought_P Parameter: Treatment Value: Drought vs. No Drought
  misc_feature: MA Experiment ID: 20000453 Result: Up-regulated in Transcription
  misc_feature: MA Experiment 20000453 PARAMETER Experiment Name: At_100uM_ABA_P Parameter: Age (day) Value: 15
  misc_feature: MA Experiment 20000453 PARAMETER Experiment Name: At_100uM_ABA_P Parameter: Organism Value: A. thaliana
  misc_feature: MA Experiment 20000453 PARAMETER Experiment Name: At_100uM_ABA_P Parameter: Plant Line Value: WS
  misc_feature: MA Experiment 20000453 PARAMETER Experiment Name: At_100uM_ABA_P Parameter: Timepoint (hr) Value: 24
  misc_feature: MA Experiment 20000453 PARAMETER Experiment Name: At_100uM_ABA_P Parameter: Tissue Value: Aerial
  misc_feature: MA Experiment 20000453 PARAMETER Experiment Name: At_100uM_ABA_P Parameter: Treatment Value: 100uM ABA vs. No Treatment
  misc_feature: MA Experiment ID: 20000794 Result: Up-regulated in Transcription
  misc_feature: MA Experiment 20000794 PARAMETER Experiment Name: At_Petals_P Parameter: Age (day) Value: 23-25 days
  misc_feature: MA Experiment 20000794 PARAMETER Experiment Name: At_Petals_P Parameter: Plant Line Value: WS
  misc_feature: MA Experiment 20000794 PARAMETER Experiment Name: At_Petals_P Parameter: Tissue Value: Petals vs. Whole plant
  misc_feature: MA Experiment ID: 20001451 Result: Up-regulated in Transcription
  misc_feature: MA Experiment 20001451 PARAMETER Experiment Name: At_Far-red-induction_P Parameter: Age (day) Value: 7
  misc_feature: MA Experiment 20001451 PARAMETER Experiment Name: At_Far-red-induction_P Parameter: Light Value: Far-red vs. White
  misc_feature: MA Experiment 20001451 PARAMETER Experiment Name: At_Far-red-induction_P Parameter: Organism Value: A. thaliana
  misc_feature: MA Experiment 20001451 PARAMETER Experiment Name: At_Far-red-induction_P Parameter: Plant Line Value: Columbia
  misc_feature: MA Experiment 20001451 PARAMETER Experiment Name: At_Far-red-induction_P Parameter: Timepoint (hr) Value: 24
  misc_feature: MA Experiment 20001451 PARAMETER Experiment Name: At_Far-red-induction_P Parameter: Tissue Value: Whole Plant
  misc_feature: MA Experiment ID: 20001557 Result: Down-regulated in Transcription
  misc_feature: MA Experiment 20001557 PARAMETER Experiment Name: At_Drought_Soil_Dry_P Parameter: Age (day) Value: 27
  misc_feature: MA Experiment 20001557 PARAMETER Experiment Name: At_Drought_Soil_Dry_P Parameter: Organism Value: A. thaliana
  misc_feature: MA Experiment 20001557 PARAMETER Experiment Name: At_Drought_Soil_Dry_P Parameter: Plant Line Value: WS
  misc_feature: MA Experiment 20001557 PARAMETER Experiment Name: At_Drought_Soil_Dry_P Parameter: Post Timepoint (hr) Value: 3
  misc_feature: MA Experiment 20001557 PARAMETER Experiment Name: At_Drought_Soil_Dry_P Parameter: Post-Treatment Value: Re-Water vs. No Drought
  misc_feature: MA Experiment 20001557 PARAMETER Experiment Name: At_Drought_Soil_Dry_P Parameter: Timepoint (day) Value: 13
  misc_feature: MA Experiment 20001557 PARAMETER Experiment Name: At_Drought_Soil_Dry_P Parameter: Treatment Value: Drought vs. No Drought
  misc_feature: MA Experiment ID: 20001560 Result: Up-regulated in Transcription
  misc_feature: MA Experiment 20001560 PARAMETER Experiment Name: At_Drought_Soil_Dry_P Parameter: Age (day) Value: 28
  misc_feature: MA Experiment 20001560 PARAMETER Experiment Name: At_Drought_Soil_Dry_P Parameter: Organism Value: A. thaliana
  misc_feature: MA Experiment 20001560 PARAMETER Experiment Name: At_Drought_Soil_Dry_P Parameter: Plant Line Value: WS
  misc_feature: MA Experiment 20001560 PARAMETER Experiment Name: At_Drought_Soil_Dry_P Parameter: Post Timepoint (hr) Value: None
  misc_feature: MA Experiment 20001560 PARAMETER Experiment Name: At_Drought_Soil_Dry_P Parameter: Post-Treatment Value: None
  misc_feature: MA Experiment 20001560 PARAMETER Experiment Name: At_Drought_Soil_Dry_P Parameter: Timepoint (day) Value: 14
  misc_feature: MA Experiment 20001560 PARAMETER Experiment Name: At_Drought_Soil_Dry_P Parameter: Treatment Value: Drought vs. No Drought
  misc_feature: MA Experiment ID: 20001904 Result: Up-regulated in Transcription
  misc_feature: MA Experiment 20001904 PARAMETER Experiment Name: At_Drought_Reproduction_P Parameter: Age (day) Value: 37
  misc_feature: MA Experiment 20001904 PARAMETER Experiment Name: At_Drought_Reproduction_P Parameter: Organism Value: A. thaliana
  misc_feature: MA Experiment 20001904 PARAMETER Experiment Name: At_Drought_Reproduction_P Parameter: Plant Line Value: WS
  misc_feature: MA Experiment 20001904 PARAMETER Experiment Name: At_Drought_Reproduction_P Parameter: Timepoint (day) Value: 7
  misc_feature: MA Experiment 20001904 PARAMETER Experiment Name: At_Drought_Reproduction_P Parameter: Tissue Value: Rosettes
  misc_feature: MA Experiment 20001904 PARAMETER Experiment Name: At_Drought_Reproduction_P Parameter: Treatment Value: Drought vs. No Drought
  misc_feature: MA Experiment ID: 20001905 Result: Up-regulated in Transcription
  misc_feature: MA Experiment 20001905 PARAMETER Experiment Name: At_Drought_Reproduction_P Parameter: Age (day) Value: 40
  misc_feature: MA Experiment 20001905 PARAMETER Experiment Name: At_Drought_Reproduction_P Parameter: Organism Value: A. thaliana
  misc_feature: MA Experiment 20001905 PARAMETER Experiment Name: At_Drought_Reproduction_P Parameter: Plant Line Value: WS
  misc_feature: MA Experiment 20001905 PARAMETER Experiment Name: At_Drought_Reproduction_P Parameter: Timepoint (day) Value: 10
  misc_feature: MA Experiment 20001905 PARAMETER Experiment Name: At_Drought_Reproduction_P Parameter: Tissue Value: Rosettes
  misc_feature: MA Experiment 20001905 PARAMETER Experiment Name: At_Drought_Reproduction_P Parameter: Treatment Value: Drought vs. No Drought
ctgatcagatgtgccagctatacaaaagtctctcacgtctctcccagaaaactcttattttatcgccgagaaagtgacggaaaacgaaatccaaacgggataataaacctaaaacctaaattagtgatttagctacgactcctaaagattcaaatttgggttacatcggacgaatcatgactctgcttccgatttcaatcttcttcttctttttattttgcattccttcgccattaatcgccgccgctaacgatgacgatataccgacggcgtacactctcctccaaagctacaactttcccgtcgggattcttcctaaaggagtggtgtcatatgatttagataaatctactggtcaattccacgcgtatttcaacaaatcgtgcagtttcgctcttcaaggctcttaccaattggattacaaatcgacaatctctggatacatatcggagaacaagatcacgaagcttaccggcgtgaaggtgaaagttctcttcttgtggctcaacatcgttgaggttattaggaacggagacgaactcgagttctccgttgggatcacatcggcgaacttcgagatcgatgagttttacgagtcgccacagtgtggttgcggatttgattgcaaaacgaagacgaagactttgggaagaaacccttttgtttcttcggtttaaaggttaagacttcttattgcagaatctgaactctttggatgatttatgttctttctccaatcatttaatttttcaatcaatgctttgtttgtatctcttcttaggatcgaaccgataagttgtatttatgaaccgatcaggaataaaacagtggtggaaaaagttaattcttatgtctaaggagaagattggcatgaatttgagtttcgtattggctgatcaatggtttgtgtgttgcattcgacgaatgcttatgaatgtctgtatgaaacgttagatcttttgtc

SEQ ID NO: 21062 - protein, 166 aa, Arabidopsis thaliana
  peptide (1)..(166): Ceres Seq. ID no. 12718650
  misc_feature (10)..(150): Pfam Name: Protein of unknown function, DUF538 Pfam Description: Protein of unknown function, DUF538
  misc_feature (1)..(165): Homolog of NCBI NO: 21554037 NR Description: unknown [Arabidopsis thaliana]
  misc_feature (4)..(144): Homolog of NCBI NO: 15241137 NR Description: putative protein; protein id: At5g19590.1
  misc_feature (1)..(144): Homolog of NCBI NO: 18420052 NR Description: unknown protein; protein id: At5g19860.1
  misc_feature (6)..(150): Homolog of NCBI NO: 21553750 NR Description: unknown [Arabidopsis thaliana]
  misc_feature (7)..(150): Homolog of NCBI NO: 15235335 NR Description: putative protein; protein id: At4g02360.1
  misc_feature (1)..(165): Homolog of NCBI NO: 18411923 NR Description: coded for by A. thaliana cDNA R64991
  misc_feature (6)..(150): Homolog of NCBI NO: 18379012 NR Description: Expressed protein
  misc_feature (3)..(144): Homolog of NCBI NO: 34912320 NR Description: P0451D05.23 [Oryza sativa (japonica
  misc_feature (32)..(147): Homolog of NCBI NO: 28273408 NR Description: unknown protein [Oryza sativa (japonica
  misc_feature (1)..(166): Homolog of NCBI NO: 18379014 NR Description: Expressed protein
MTLLPISIFFFFLFCIPSPLIAAANDDDIPTAYTLLQSYNFPVGILPKGVVSYDLDKSTGQFHAYFNKSCSFALQGSYQLDYKSTISGYISENKITKLTGVKVKVLFLWLNIVEVIRNGDELEFSVGITSANFEIDEFYESPQCGCGFDCKTKTKTLGRNPFVSSV

SEQ ID NO: 21063 - DNA, 731 bp, Arabidopsis thaliana
  misc_feature (1)..(731): Ceres Seq. ID no. 13496761
  misc_feature: MA Experiment ID: 108434 Result: Up-regulated in Transcription
  misc_feature: MA Experiment 108434 PARAMETER Experiment Name: At_Root_Tips_cDNA_P Parameter: Tissue Value: Root Tips
  misc_feature: MA Experiment ID: 20000180 Result: Up-regulated in Transcription
  misc_feature: MA Experiment 20000180 PARAMETER Experiment Name: At_Germinating_Seeds_P Parameter: Age (hr) Value: 24 vs. 0
  misc_feature: MA Experiment 20000180 PARAMETER Experiment Name: At_Germinating_Seeds_P Parameter: Tissue Value: Germinating Seeds
  misc_feature: MA Experiment ID: 20001451 Result: Down-regulated in Transcription
  misc_feature: MA Experiment 20001451 PARAMETER Experiment Name: At_Far-red-induction_P Parameter: Age (day) Value: 7
  misc_feature: MA Experiment 20001451 PARAMETER Experiment Name: At_Far-red-induction_P Parameter: Light Value: Far-red vs. White
  misc_feature: MA Experiment 20001451 PARAMETER Experiment Name: At_Far-red-induction_P Parameter: Organism Value: A. thaliana
  misc_feature: MA Experiment 20001451 PARAMETER Experiment Name: At_Far-red-induction_P Parameter: Plant Line Value: Columbia
  misc_feature: MA Experiment 20001451 PARAMETER Experiment Name: At_Far-red-induction_P Parameter: Timepoint (hr) Value: 24
  misc_feature: MA Experiment 20001451 PARAMETER Experiment Name: At_Far-red-induction_P Parameter: Tissue Value: Whole Plant
acagaagtagaagaaaccaaagcgaaatcaaaaagctcagcaattttccagatttctctaattgacgatggcgctttgtgctactactcaaaggactatccgtatagcggcgacgctccggcgtgttgctcgacctttcgctactgacgcggtggttgagtcggattacaagcgtggtgagatcggtaaggtctccggaatcccagaggagcatctttctcgcaaggtgataatatactcacctgctagaacagctacccagtcaggatctggaaaactcggaaaatggaagattaacttcgtctccaccttaaagtgggagaatccgttgatgggatggacttctacaggtgacccctatgctaatgttggtgactctgctcttgcctttgattctgaagaagctgctaagtcttttgctgagcgtcatggttgggattataaggtcaagaagcccaacacaccattattgaaggtcaagtcttactcggacaacttcaagtggaaaggcaatcctcaaccagaaaactgatgttacaccttcttccaattcttctcgagcaaaagaagaaacctcatttgatattaattctcatgtttctttgttattttagcatctgtgagctttttggttgaaaagaaccattatccatggctatgtttacttattacaataatatgatgatgatgatgaaacacactcctttgatatttcatcaagatttctgatc

SEQ ID NO: 21064 - protein, 154 aa, Arabidopsis thaliana
  peptide (1)..(154): Ceres Seq. ID no. 13496762
  misc_feature (52)..(154): Pfam Name: ETC complex I subunit conserved region Pfam Description: ETC complex I subunit conserved region
  misc_feature (38)..(153): Homolog of NCBI NO: 34334026 NR Description: NADH:ubiquinone oxidoreductase 18 kD-like subunit
  misc_feature (38)..(146): Homolog of NCBI NO: 19110803 NR Description: NADH dehydrogenase [Gallus gallus]
  misc_feature (38)..(146): Homolog of NCBI NO: 14919381 NR Description: NADH dehydrogenase (ubiquinone) Fe-S protein 4
  misc_feature (38)..(146): Homolog of NCBI NO: 6754814 NR Description: NADH dehydrogenase (ubiquinone) Fe-S protein 4
  misc_feature (1)..(146): Homolog of NCBI NO: 28461229 NR Description: NADH dehydrogenase (ubiquinone) Fe-S protein 4,
  misc_feature (9)..(146): Homolog of NCBI NO: 13528960 NR Description: NADH dehydrogenase (ubiquinone) Fe-S protein 4
  misc_feature (2)..(146): Homolog of NCBI NO: 4505369 NR Description: NADH dehydrogenase (ubiquinone) Fe-S protein 4,
  misc_feature (19)..(136): Homolog of NCBI NO: 34901114 NR Description: NADH-ubiquinone oxidoreductase 18 kDa subunit, precursor-like protein~contains ESTs
  misc_feature (1)..(154): Homolog of NCBI NO: 21555571 NR Description: unknown [Arabidopsis thaliana]
  misc_feature (1)..(154): Homolog of NCBI NO: 15240784 NR Description: expressed protein [Arabidopsis thaliana]
MALCATTQRTIRIAATLRRVARPFATDAVVESDYKRGEIGKVSGIPEEHLSRKVIIYSPARTATQSGSGKLGKWKINFVSTLKWENPLMGWTSTGDPYANVGDSALAFDSEEAAKSFAERHGWDYKVKKPNTPLLKVKSYSDNFKWKGNPQPEN

SEQ ID NO: 21065 - DNA, 771 bp, Arabidopsis thaliana
  misc_feature (1)..(771): Ceres Seq. ID no. 12338449
  misc_feature: MA Experiment ID: 108461 Result: Up-regulated in Transcription
  misc_feature: MA Experiment 108461 PARAMETER Experiment Name: At_Germinating_Seeds_cDNA_P Parameter: Age (day) Value: 1 vs. 0
  misc_feature: MA Experiment 108461 PARAMETER Experiment Name: At_Germinating_Seeds_cDNA_P Parameter: Tissue Value: Germinating Seeds
  misc_feature: MA Experiment ID: 108462 Result: Up-regulated in Transcription
  misc_feature: MA Experiment 108462 PARAMETER Experiment Name: At_Germinating_Seeds_cDNA_P Parameter: Age (day) Value: 2 vs. 0
  misc_feature: MA Experiment 108462 PARAMETER Experiment Name: At_Germinating_Seeds_cDNA_P Parameter: Tissue Value: Germinating Seeds
  misc_feature: MA Experiment ID: 108488 Result: Up-regulated in Transcription
  misc_feature: MA Experiment ID: 108595 Result: Down-regulated in Transcription
  misc_feature: MA Experiment 108595 PARAMETER Experiment Name: At_Ler-pi_Ovule_cDNA_P Parameter: Plant Line Value: null
  misc_feature: MA Experiment ID: 20000070 Result: Down-regulated in Transcription
  misc_feature: MA Experiment 20000070 PARAMETER Experiment Name: At_100uM_ABA_Mutants_cDNA_P Parameter: Plant Line Value: CS24
  misc_feature: MA Experiment 20000070 PARAMETER Experiment Name: At_100uM_ABA_Mutants_cDNA_P Parameter: Timepoint (hr) Value: 6
  misc_feature: MA Experiment 20000070 PARAMETER Experiment Name: At_100uM_ABA_Mutants_cDNA_P Parameter: Tissue Value: Aerial
  misc_feature: MA Experiment 20000070 PARAMETER Experiment Name: At_100uM_ABA_Mutants_cDNA_P Parameter: Treatment Value: 100uM ABA vs. No Treatment
  misc_feature: MA Experiment ID: 20000071 Result: Down-regulated in Transcription
  misc_feature: MA Experiment 20000071 PARAMETER Experiment Name: At_100uM_ABA_Mutants_cDNA_P Parameter: Plant Line Value: CS8104
  misc_feature: MA Experiment 20000071 PARAMETER Experiment Name: At_100uM_ABA_Mutants_cDNA_P Parameter: Timepoint (hr) Value: 6
  misc_feature: MA Experiment 20000071 PARAMETER Experiment Name: At_100uM_ABA_Mutants_cDNA_P Parameter: Tissue Value: Aerial
  misc_feature: MA Experiment 20000071 PARAMETER Experiment Name: At_100uM_ABA_Mutants_cDNA_P Parameter: Treatment Value: 100uM ABA vs. No Treatment
  misc_feature: MA Experiment ID: 20000072 Result: Down-regulated in Transcription
  misc_feature: MA Experiment 20000072 PARAMETER Experiment Name: At_100uM_ABA_Mutants_cDNA_P Parameter: Plant Line Value: CS8105
  misc_feature: MA Experiment 20000072 PARAMETER Experiment Name: At_100uM_ABA_Mutants_cDNA_P Parameter: Timepoint (hr) Value: 6
  misc_feature: MA Experiment 20000072 PARAMETER Experiment Name: At_100uM_ABA_Mutants_cDNA_P Parameter: Tissue Value: Aerial
  misc_feature: MA Experiment 20000072 PARAMETER Experiment Name: At_100uM_ABA_Mutants_cDNA_P Parameter: Treatment Value: 100uM ABA vs. No Treatment
  misc_feature: MA Experiment ID: 20000086 Result: Down-regulated in Transcription
  misc_feature: MA Experiment 20000086 PARAMETER Experiment Name: At_100uM_ABA_Mutants_cDNA_P Parameter: Plant Line Value: CS22
  misc_feature: MA Experiment 20000086 PARAMETER Experiment Name: At_100uM_ABA_Mutants_cDNA_P Parameter: Timepoint (hr) Value: 6
  misc_feature: MA Experiment 20000086 PARAMETER Experiment Name: At_100uM_ABA_Mutants_cDNA_P Parameter: Tissue Value: Aerial
  misc_feature: MA Experiment 20000086 PARAMETER Experiment Name: At_100uM_ABA_Mutants_cDNA_P Parameter: Treatment Value: 100uM ABA vs. No Treatment
  misc_feature: MA Experiment ID: 20000117 Result: Down-regulated in Transcription
  misc_feature: MA Experiment 20000117 PARAMETER Experiment Name: At_100uM_ABA_Mutants_cDNA_P Parameter: Plant Line Value: Columbia
  misc_feature: MA Experiment 20000117 PARAMETER Experiment Name: At_100uM_ABA_Mutants_cDNA_P Parameter: Timepoint (hr) Value: 6
  misc_feature: MA Experiment 20000117 PARAMETER Experiment Name: At_100uM_ABA_Mutants_cDNA_P Parameter: Tissue Value: Aerial
  misc_feature: MA Experiment 20000117 PARAMETER Experiment Name: At_100uM_ABA_Mutants_cDNA_P Parameter: Treatment Value: 100uM ABA vs. No Treatment
  misc_feature: MA Experiment ID: 20000180 Result: Up-regulated in Transcription
  misc_feature: MA Experiment 20000180 PARAMETER Experiment Name: At_Germinating_Seeds_P Parameter: Age (hr) Value: 24 vs. 0
  misc_feature: MA Experiment 20000180 PARAMETER Experiment Name: At_Germinating_Seeds_P Parameter: Tissue Value: Germinating Seeds
  misc_feature: MA Experiment ID: 20000185 Result: Down-regulated in Transcription
  misc_feature: MA Experiment 20000185 PARAMETER Experiment Name: At_Roots__P Parameter: Age (day) Value: 7 vs. 21
  misc_feature: MA Experiment 20000185 PARAMETER Experiment Name: At_Roots__P Parameter: Organism Value: A. thaliana
  misc_feature: MA Experiment 20000185 PARAMETER Experiment Name: At_Roots__P Parameter: Tissue Value: Roots vs. Whole Plant
  misc_feature: MA Experiment ID: 20000437 Result: Down-regulated in Transcription
  misc_feature: MA Experiment 20000437 PARAMETER Experiment Name: At_Drought_P Parameter: Age (day) Value: 8
  misc_feature: MA Experiment 20000437 PARAMETER Experiment Name: At_Drought_P Parameter: Organism Value: A. thaliana
  misc_feature: MA Experiment 20000437 PARAMETER Experiment Name: At_Drought_P Parameter: Plant Line Value: WS
  misc_feature: MA Experiment 20000437 PARAMETER Experiment Name: At_Drought_P Parameter: Timepoint (hr) Value: 24
  misc_feature: MA Experiment 20000437 PARAMETER Experiment Name: At_Drought_P Parameter: Tissue Value: Whole Plant
  misc_feature: MA Experiment 20000437 PARAMETER Experiment Name: At_Drought_P Parameter: Treatment Value: Drought vs. No Drought
  misc_feature: MA Experiment ID: 20000438 Result: Up-regulated in Transcription
  misc_feature: MA Experiment 20000438 PARAMETER Experiment Name: At_Shoots__P Parameter: Age (day) Value: 14
  misc_feature: MA Experiment 20000438 PARAMETER Experiment Name: At_Shoots__P Parameter: Tissue Value: Shoots vs. Whole Plant
  misc_feature: MA Experiment ID: 20000439 Result: Down-regulated in Transcription
  misc_feature: MA Experiment 20000439 PARAMETER Experiment Name: At_Roots__P Parameter: Age (day) Value: 14 vs. 21
  misc_feature: MA Experiment 20000439 PARAMETER Experiment Name: At_Roots__P Parameter: Organism Value: A. thaliana
  misc_feature: MA Experiment 20000439 PARAMETER Experiment Name: At_Roots__P Parameter: Tissue Value: Roots vs. Whole Plant
  misc_feature: MA Experiment ID: 20001248 Result: Down-regulated in Transcription
  misc_feature: MA Experiment 20001248 PARAMETER Experiment Name: At_Far-red-induction_P Parameter: Age (day) Value: 7
  misc_feature: MA Experiment 20001248 PARAMETER Experiment Name: At_Far-red-induction_P Parameter: Light Value: Far-red vs. White
  misc_feature: MA Experiment 20001248 PARAMETER Experiment Name: At_Far-red-induction_P Parameter: Organism Value: A. thaliana
  misc_feature: MA Experiment 20001248 PARAMETER Experiment Name: At_Far-red-induction_P Parameter: Plant Line Value: Columbia
  misc_feature: MA Experiment 20001248 PARAMETER Experiment Name: At_Far-red-induction_P Parameter: Timepoint (hr) Value: 4
  misc_feature: MA Experiment 20001248 PARAMETER Experiment Name: At_Far-red-induction_P Parameter: Tissue Value: Whole Plant
  misc_feature: MA Experiment ID: 20001450 Result: Down-regulated in Transcription
  misc_feature: MA Experiment 20001450 PARAMETER Experiment Name: At_Far-red-induction_P Parameter: Age (day) Value: 7
  misc_feature: MA Experiment 20001450 PARAMETER Experiment Name: At_Far-red-induction_P Parameter: Light Value: Far-red vs. White
  misc_feature: MA Experiment 20001450 PARAMETER Experiment Name: At_Far-red-induction_P Parameter: Organism Value: A. thaliana
  misc_feature: MA Experiment 20001450 PARAMETER Experiment Name: At_Far-red-induction_P Parameter: Plant Line Value: Columbia
  misc_feature: MA Experiment 20001450 PARAMETER Experiment Name: At_Far-red-induction_P Parameter: Timepoint (hr) Value: 8
  misc_feature: MA Experiment 20001450 PARAMETER Experiment Name: At_Far-red-induction_P Parameter: Tissue Value: Whole Plant
  misc_feature: MA Experiment ID: 20001757 Result: Up-regulated in Transcription
  misc_feature: MA Experiment 20001757 PARAMETER Experiment Name: At_50mM_NH4NO3_L-to-H_P Parameter: Timepoint (hr) Value: 6
  misc_feature: MA Experiment 20001757 PARAMETER Experiment Name: At_50mM_NH4NO3_L-to-H_P Parameter: Tissue Value: Leaf
  misc_feature: MA Experiment 20001757 PARAMETER Experiment Name: At_50mM_NH4NO3_L-to-H_P Parameter: Treatment Value: 50mM NH4NO3 vs 100mM Mannitol
  misc_feature: MA Experiment ID: 20001905 Result: Down-regulated in Transcription
  misc_feature: MA Experiment 20001905 PARAMETER Experiment Name: At_Drought_Reproduction_P Parameter: Age (day) Value: 40
  misc_feature: MA Experiment 20001905 PARAMETER Experiment Name: At_Drought_Reproduction_P Parameter: Organism Value: A. thaliana
  misc_feature: MA Experiment 20001905 PARAMETER Experiment Name: At_Drought_Reproduction_P Parameter: Plant Line Value: WS
  misc_feature: MA Experiment 20001905 PARAMETER Experiment Name: At_Drought_Reproduction_P Parameter: Timepoint (day) Value: 10
  misc_feature: MA Experiment 20001905 PARAMETER Experiment Name: At_Drought_Reproduction_P Parameter: Tissue Value: Rosettes
  misc_feature: MA Experiment 20001905 PARAMETER Experiment Name: At_Drought_Reproduction_P Parameter: Treatment Value: Drought vs. No Drought
acaatccaatcaaaacacacagagagaagaaaaactcagaagaaaagccaaagagtgaaacaaaaatggcgtcgacgactctctcaatcgcaacaacaatccgttcctcatcttatcctactctcgcttccatcaatcacttcccttcccgaaccaccaccatcgaattcccctctcgcttcggtggtggttcatcatccacattgacccaccgtgcaacccatctccgtccaatcgccgccgtcgaagctccggagaaaatcgagaagatcggatccgaaatctcatccctaaccctcgaagaagctcgtatcctcgtcgactatctccaagacaaattcggtgtctccccactctctttagcccccgcagcagcggcggttgctgctccagccgacggtggcgcggcggctgtagtggaagagcaaacagagttcgatgtggttatcaatgaagttcccagcagttcccgtattgcagtgattaaagctgttagggctttaactagcttggcgttgaaggaagctaaggagctaatcgaaggattaccaaagaagtttaaagaaggtatcactaaagatgaagctgaagaagctaagaagactcttgaagaagctggtgctaaagtctccattgcttaaggtttttattaaaaaaaaaaaagaagttgttatcttttctggaatttgattggtcttttgtgttgtttagtatagtttgcgtctggaattgttgagaaattgttgtaatttgaatcacatttggtttccc

SEQ ID NO: 21066 - protein, 212 aa, Arabidopsis thaliana
  peptide (1)..(212): Ceres Seq. ID no. 12338450
  misc_feature (144)..(212): Pfam Name: Ribosomal protein L7/L12 C-terminal domain Pfam Description: Ribosomal protein L7/L12 C-terminal domain
  misc_feature (22)..(211): Homolog of NCBI NO: 133085 NR Description: 50S RIBOSOMAL PROTEIN L12, CHLOROPLAST PRECURSOR
  misc_feature (22)..(212): Homolog of NCBI NO: 548746 NR Description: 50S RIBOSOMAL PROTEIN L12, CHLOROPLAST PRECURSOR
  misc_feature (22)..(212): Homolog of NCBI NO: 133088 NR Description: 50S RIBOSOMAL PROTEIN L12, CHLOROPLAST PRECURSOR
  misc_feature (22)..(212): Homolog of NCBI NO: 20020 NR Description: ribosomal protein L12-1a [Nicotiana tabacum]
  misc_feature (22)..(211): Homolog of NCBI NO: 541896 NR Description: ribosomal protein L12.B precursor, chloroplast -
  misc_feature (22)..(211): Homolog of NCBI NO: 15232275 NR Description: 50S ribosomal protein L12-B; protein id:
  misc_feature (22)..(212): Homolog of NCBI NO: 21592776 NR Description: 50S ribosomal protein L12-C [Arabidopsis thaliana]
  misc_feature (22)..(212): Homolog of NCBI NO: 15232276 NR Description: 50S ribosomal protein L12-C
  misc_feature (22)..(212): Homolog of NCBI NO: 541897 NR Description: ribosomal protein L12.C precursor, chloroplast -
  misc_feature (22)..(212): Homolog of NCBI NO: 15232274 NR Description: 50S ribosomal protein L12-A
NPIKTHREKKNSEEKPKSETKMASTTLSIATTIRSSSYPTLASINHFPSRTTTIEFPSRFGGGSSSTLTHRATHLRPIAAVEAPEKIEKIGSEISSLTLEEARILVDYLQDKFGVSPLSLAPAAAAVAAPADGGAAAVVEEQTEFDVVINEVPSSSRIAVIKAVRALTSLALKEAKELIEGLPKKFKEGITKDEAEEAKKTLEEAGAKVSIA

SEQ ID NO: 21067 - protein, 191 aa, Arabidopsis thaliana
  peptide (1)..(191): Ceres Seq. ID no. 12338451
  misc_feature (123)..(191): Pfam Name: Ribosomal protein L7/L12 C-terminal domain Pfam Description: Ribosomal protein L7/L12 C-terminal domain
  misc_feature (1)..(190): Homolog of NCBI NO: 133085 NR Description: 50S RIBOSOMAL PROTEIN L12, CHLOROPLAST PRECURSOR
  misc_feature (1)..(191): Homolog of NCBI NO: 548746 NR Description: 50S RIBOSOMAL PROTEIN L12, CHLOROPLAST PRECURSOR
  misc_feature (1)..(191): Homolog of NCBI NO: 133088 NR Description: 50S RIBOSOMAL PROTEIN L12, CHLOROPLAST PRECURSOR
  misc_feature (1)..(191): Homolog of NCBI NO: 20020 NR Description: ribosomal protein L12-1a [Nicotiana tabacum]
  misc_feature (1)..(190): Homolog of NCBI NO: 541896 NR Description: ribosomal protein L12.B precursor, chloroplast -
  misc_feature (1)..(190): Homolog of NCBI NO: 15232275 NR Description: 50S ribosomal protein L12-B; protein id:
  misc_feature (1)..(191): Homolog of NCBI NO: 21592776 NR Description: 50S ribosomal protein L12-C [Arabidopsis thaliana]
  misc_feature (1)..(191): Homolog of NCBI NO: 15232276 NR Description: 50S ribosomal protein L12-C
  misc_feature (1)..(191): Homolog of NCBI NO: 541897 NR Description: ribosomal protein L12.C precursor, chloroplast -
  misc_feature (1)..(191): Homolog of NCBI NO: 15232274 NR Description: 50S ribosomal protein L12-A
MASTTLSIATTIRSSSYPTLASINHFPSRTTTIEFPSRFGGGSSSTLTHRATHLRPIAAVEAPEKIEKIGSEISSLTLEEARILVDYLQDKFGVSPLSLAPAAAAVAAPADGGAAAVVEEQTEFDVVINEVPSSSRIAVIKAVRALTSLALKEAKELIEGLPKKFKEGITKDEAEEAKKTLEEAGAKVSIA

SEQ ID NO: 21068 - DNA, 1027 bp, Arabidopsis thaliana
  misc_feature (1)..(1027): Ceres Seq. ID no. 12327698
  misc_feature: MA Experiment ID: 108434 Result: Down-regulated in Transcription
  misc_feature: MA Experiment 108434 PARAMETER Experiment Name: At_Root_Tips_cDNA_P Parameter: Tissue Value: Root Tips
  misc_feature: MA Experiment ID: 108461 Result: Down-regulated in Transcription
  misc_feature: MA Experiment 108461 PARAMETER Experiment Name: At_Germinating_Seeds_cDNA_P Parameter: Age (day) Value: 1 vs. 0
  misc_feature: MA Experiment 108461 PARAMETER Experiment Name: At_Germinating_Seeds_cDNA_P Parameter: Tissue Value: Germinating Seeds
  misc_feature: MA Experiment ID: 108577 Result: Down-regulated in Transcription
  misc_feature: MA Experiment 108577 PARAMETER Experiment Name: At_42deg_Heat_cDNA_P Parameter: Temperature (deg C) Value: 42 vs. 22
  misc_feature: MA Experiment 108577 PARAMETER Experiment Name: At_42deg_Heat_cDNA_P Parameter: Timepoint (hr) Value: 6
  misc_feature: MA Experiment 108577 PARAMETER Experiment Name: At_42deg_Heat_cDNA_P Parameter: Tissue Value: Aerial
  misc_feature: MA Experiment ID: 20000069 Result: Up-regulated in Transcription
  misc_feature: MA Experiment 20000069 PARAMETER Experiment Name: At_100uM_ABA_Mutants_cDNA_P Parameter: Plant Line Value: CS23
  misc_feature: MA Experiment 20000069 PARAMETER Experiment Name: At_100uM_ABA_Mutants_cDNA_P Parameter: Timepoint (hr) Value: 6
  misc_feature: MA Experiment 20000069 PARAMETER Experiment Name: At_100uM_ABA_Mutants_cDNA_P Parameter: Tissue Value: Aerial
  misc_feature: MA Experiment 20000069 PARAMETER Experiment Name: At_100uM_ABA_Mutants_cDNA_P Parameter: Treatment Value: 100uM ABA vs. No Treatment
  misc_feature: MA Experiment ID: 20000072 Result: Up-regulated in Transcription
  misc_feature: MA Experiment 20000072 PARAMETER Experiment Name: At_100uM_ABA_Mutants_cDNA_P Parameter: Plant Line Value: CS8105
  misc_feature: MA Experiment 20000072 PARAMETER Experiment Name: At_100uM_ABA_Mutants_cDNA_P Parameter: Timepoint (hr) Value: 6
  misc_feature: MA Experiment 20000072 PARAMETER Experiment Name: At_100uM_ABA_Mutants_cDNA_P Parameter: Tissue Value: Aerial
  misc_feature: MA Experiment 20000072 PARAMETER Experiment Name: At_100uM_ABA_Mutants_cDNA_P Parameter: Treatment Value: 100uM ABA vs. No Treatment
  misc_feature: MA Experiment ID: 20000086 Result: Up-regulated in Transcription
  misc_feature: MA Experiment 20000086 PARAMETER Experiment Name: At_100uM_ABA_Mutants_cDNA_P Parameter: Plant Line Value: CS22
  misc_feature: MA Experiment 20000086 PARAMETER Experiment Name: At_100uM_ABA_Mutants_cDNA_P Parameter: Timepoint (hr) Value: 6
  misc_feature: MA Experiment 20000086 PARAMETER Experiment Name: At_100uM_ABA_Mutants_cDNA_P Parameter: Tissue Value: Aerial
  misc_feature: MA Experiment 20000086 PARAMETER Experiment Name: At_100uM_ABA_Mutants_cDNA_P Parameter: Treatment Value: 100uM ABA vs. No Treatment
  misc_feature: MA Experiment ID: 20000087 Result: Up-regulated in Transcription
  misc_feature: MA Experiment 20000087 PARAMETER Experiment Name: At_100uM_ABA_Mutants_cDNA_P Parameter: Plant Line Value: WS
  misc_feature: MA Experiment 20000087 PARAMETER Experiment Name: At_100uM_ABA_Mutants_cDNA_P Parameter: Timepoint (hr) Value: 6
  misc_feature: MA Experiment 20000087 PARAMETER Experiment Name: At_100uM_ABA_Mutants_cDNA_P Parameter: Tissue Value: Aerial
  misc_feature: MA Experiment 20000087 PARAMETER Experiment Name: At_100uM_ABA_Mutants_cDNA_P Parameter: Treatment Value: 100uM ABA vs. No Treatment
  misc_feature: MA Experiment ID: 20000090 Result: Up-regulated in Transcription
  misc_feature: MA Experiment ID: 20000111 Result: Down-regulated in Transcription
  misc_feature: MA Experiment 20000111 PARAMETER Experiment Name: At_42deg_Heat_cDNA_P Parameter: Temperature (deg C) Value: 42 vs. 22
  misc_feature: MA Experiment 20000111 PARAMETER Experiment Name: At_42deg_Heat_cDNA_P Parameter: Timepoint (hr) Value: 6
  misc_feature: MA Experiment 20000111 PARAMETER Experiment Name: At_42deg_Heat_cDNA_P Parameter: Tissue Value: Aerial
  misc_feature: MA Experiment ID: 20000227 Result: Down-regulated in Transcription
  misc_feature: MA Experiment 20000227 PARAMETER Experiment Name: At_Root-Tips-vs-Tops_P Parameter: Tissue Value: Root Tips vs. Root Tops
  misc_feature: MA Experiment ID: 20000234 Result: Down-regulated in Transcription
  misc_feature: MA Experiment 20000234 PARAMETER Experiment Name: At_Siliques_P Parameter: Age (day) Value: 21
  misc_feature: MA Experiment 20000234 PARAMETER Experiment Name: At_Siliques_P Parameter: Organism Value: A. thaliana
  misc_feature: MA Experiment 20000234 PARAMETER Experiment Name: At_Siliques_P Parameter: Plant Line Value: WS
  misc_feature: MA Experiment 20000234 PARAMETER Experiment Name: At_Siliques_P Parameter: Tissue Value: Less Than 5mm Siliques vs. Whole Plant
  misc_feature: MA Experiment ID: 20000235 Result: Down-regulated in Transcription
  misc_feature: MA Experiment 20000235 PARAMETER Experiment Name: At_Siliques_P Parameter: Age (day) Value: 21
  misc_feature: MA Experiment 20000235 PARAMETER Experiment Name: At_Siliques_P Parameter: Organism Value: A. thaliana
  misc_feature: MA Experiment 20000235 PARAMETER Experiment Name: At_Siliques_P Parameter: Plant Line Value: WS
  misc_feature: MA Experiment 20000235 PARAMETER Experiment Name: At_Siliques_P Parameter: Tissue Value: 5-10mm Siliques vs. Whole Plant
  misc_feature: MA Experiment ID: 20000265 Result: Down-regulated in Transcription
  misc_feature: MA Experiment 20000265 PARAMETER Experiment Name: At_Open_Flower_P Parameter: Age (day) Value: 21
  misc_feature: MA Experiment 20000265 PARAMETER Experiment Name: At_Open_Flower_P Parameter: Plant Line Value: WS
  misc_feature: MA Experiment 20000265 PARAMETER Experiment Name: At_Open_Flower_P Parameter: Tissue Value: Closed Flower vs. Whole Plant
  misc_feature: MA Experiment ID: 20000286 Result: Down-regulated in Transcription
  misc_feature: MA Experiment 20000286 PARAMETER Experiment Name: At_Open_Flower_P Parameter: Age (day) Value: 21
  misc_feature: MA Experiment 20000286 PARAMETER Experiment Name: At_Open_Flower_P Parameter: Plant Line Value: WS
  misc_feature: MA Experiment 20000286 PARAMETER Experiment Name: At_Open_Flower_P Parameter: Tissue Value: Half Open vs. Whole Plant
  misc_feature: MA Experiment ID: 20000315 Result: Down-regulated in Transcription
  misc_feature: MA Experiment 20000315 PARAMETER Experiment Name: At_14day_Shoots-Roots_Sub_P Parameter: Age (day) Value: 14
  misc_feature: MA Experiment 20000315 PARAMETER Experiment Name: At_14day_Shoots-Roots_Sub_P Parameter: Organism Value: A. thaliana
  misc_feature: MA Experiment 20000315 PARAMETER Experiment Name: At_14day_Shoots-Roots_Sub_P Parameter: Plant Line Value: WS
  misc_feature: MA Experiment 20000315 PARAMETER Experiment Name: At_14day_Shoots-Roots_Sub_P Parameter: Tissue Value: Shoots vs. Whole Plant
  misc_feature: MA Experiment ID: 20000355 Result: Down-regulated in Transcription
  misc_feature: MA Experiment 20000355 PARAMETER Experiment Name: At_Siliques_Sub_P Parameter: Age (day) Value: 21
  misc_feature: MA Experiment 20000355 PARAMETER Experiment Name: At_Siliques_Sub_P Parameter: Organism Value: A. thaliana
  misc_feature: MA Experiment 20000355 PARAMETER Experiment Name: At_Siliques_Sub_P Parameter: Plant Line Value: WS
  misc_feature: MA Experiment 20000355 PARAMETER Experiment Name: At_Siliques_Sub_P Parameter: Tissue Value: Less Than 5mm Siliques vs. Whole Plant
  misc_feature: MA Experiment ID: 20000438 Result: Down-regulated in Transcription
  misc_feature: MA Experiment 20000438 PARAMETER Experiment Name: At_Shoots__P Parameter: Age (day) Value: 14
  misc_feature: MA Experiment 20000438 PARAMETER Experiment Name: At_Shoots__P Parameter: Tissue Value: Shoots vs. Whole Plant
  misc_feature: MA Experiment ID: 20000440 Result: Down-regulated in Transcription
  misc_feature: MA Experiment 20000440 PARAMETER Experiment Name: At_Closed-Flower__Sub_P Parameter: Tissue Value: Closed Flower vs. Whole Plant
  misc_feature: MA Experiment ID: 20001248 Result: Up-regulated in Transcription
  misc_feature: MA Experiment 20001248 PARAMETER Experiment Name: At_Far-red-induction_P Parameter: Age (day) Value: 7
  misc_feature: MA Experiment 20001248 PARAMETER Experiment Name: At_Far-red-induction_P Parameter: Light Value: Far-red vs. White
  misc_feature: MA Experiment 20001248 PARAMETER Experiment Name: At_Far-red-induction_P Parameter: Organism Value: A. thaliana
  misc_feature: MA Experiment 20001248 PARAMETER Experiment Name: At_Far-red-induction_P Parameter: Plant Line Value: Columbia
  misc_feature: MA Experiment 20001248 PARAMETER Experiment Name: At_Far-red-induction_P Parameter: Timepoint (hr) Value: 4
  misc_feature: MA Experiment 20001248 PARAMETER Experiment Name: At_Far-red-induction_P Parameter: Tissue Value: Whole Plant
aatatgtccttaattgctcttatcggagaaggcttactctgtttttcaggcgaactctgtttatcttctccgagctcgtacgagaatattcgtaaaggtttcttgtgagcttaaacgatgagtacccttgagaccacaagagctgagcttggtctggtagttgtgtatttgaataaagcggaggcgagagacaagatttgtcgagctattcaatatggttccaagttcttgagtgatggccaacctggcactgctcaaaatgtcgacaagaacaccagcttggctaggaaagttttccgtctcttcaagtttgtaaatgatcttcatgctctcattagccctgttcccaaagggactccactcccgcttgttctgctcggaaagtctaaaaacgcgttgctgtcaacgttcttgttcctagatcaaattgtgtggcttggcaggactgggatttacaaggacaaagaacgtgctgagattcttggacgtatatcacttttctgttggatgggttcttcggtttgcacatccttggttgaggttggggagcttggtaggctgtcagcatcaattaagaagttagaaaaagagatagggaacaaggataaacaccagaatgagcaataccgtgcaaaagtagagaaatcaaacgagaggtcattggctctgatcaaagcagggatggatgtagttgttgctttcggattgcttcaattggctccaaagaaagtcactccccgagtcacaggtgctttcggattcgcctcatcacttatctcttgttatcagctattgccgtcacatcccaagtccaagatggtctgataaaagggaaacaaggaaaggcgaactagtttcattgtccacatgttccatatatagtttgtgtctgttttactattacttggtgttaaatttgtcttgcttgactactttaatgtttgtgttagattctatggtatataagataatgataaacattgcagtctctgtagaataataagaacagataagcattacgaggtgt

SEQ ID NO: 21069 - protein, 235 aa, Arabidopsis thaliana
  peptide (1)..(235): Ceres Seq. ID no. 12327699
  misc_feature (11)..(226): Pfam Name: Peroxisomal biogenesis factor 11 (PEX11) Pfam Description: Peroxisomal biogenesis factor 11 (PEX11)
  misc_feature (131)..(233): Homolog of NCBI NO: 14335058 NR Description: At2g45740/F4I18.28 [Arabidopsis thaliana]
  misc_feature (1)..(224): Homolog of NCBI NO: 34898026 NR Description: ESTs AU064537(E31904),AU082147(E31904) correspond a region of the predicted gene.~Similar to Arabidopsis thaliana
  misc_feature (1)..(233): Homolog of NCBI NO: 25553559 NR Description: OSJNBa0038F22.7 [Oryza sativa (japonica
  misc_feature (1)..(233): Homolog of NCBI NO: 11358250 NR Description: hypothetical protein T27I15_160 - Arabidopsis
  misc_feature (2)..(225): Homolog of NCBI NO: 7486466 NR Description: hypothetical protein At2g45740 [imported] -
  misc_feature (1)..(233): Homolog of NCBI NO: 30695340 NR Description: expressed protein [Arabidopsis thaliana]
  misc_feature (1)..(233): Homolog of NCBI NO: 8489788 NR Description: unknown [Lycopersicon esculentum]
  misc_feature (2)..(233): Homolog of NCBI NO: 18406877 NR Description: expressed protein
  misc_feature (1)..(235): Homolog of NCBI NO: 18378887 NR Description: expressed protein
MSTLETTRAELGLVVVYLNKAEARDKICRAIQYGSKFLSDGQPGTAQNVDKNTSLARKVFRLFKFVNDLHALISPVPKGTPLPLVLLGKSKNALLSTFLFLDQIVWLGRTGIYKDKERAEILGRISLFCWMGSSVCTSLVEVGELGRLSASIKKLEKEIGNKDKHQNEQYRAKVEKSNERSLALIKAGMDVVVAFGLLQLAPKKVTPRVTGAFGFASSLISCYQLLPSHPKSKMV

SEQ ID NO: 21070 - DNA, 881 bp, Arabidopsis thaliana
  misc_feature (1)..(881): Ceres Seq. ID no. 13499459
  misc_feature: MA Experiment ID: 108433 Result: Down-regulated in Transcription
  misc_feature: MA Experiment 108433 PARAMETER Experiment Name: At_rhl_Mutant2_cDNA_P Parameter: Age (day) Value: 7
  misc_feature: MA Experiment 108433 PARAMETER Experiment Name: At_rhl_Mutant2_cDNA_P Parameter: Organism Value: A. thaliana
  misc_feature: MA Experiment 108433 PARAMETER Experiment Name: At_rhl_Mutant2_cDNA_P Parameter: Plant Line Value: rhl Mutant vs. wt landsburg
  misc_feature: MA Experiment 108433 PARAMETER Experiment Name: At_rhl_Mutant2_cDNA_P Parameter: Tissue Value: Roots
  misc_feature: MA Experiment ID: 108463 Result: Down-regulated in Transcription
  misc_feature: MA Experiment 108463 PARAMETER Experiment Name: At_Germinating_Seeds_cDNA_P Parameter: Age (day) Value: 3 vs. 0
  misc_feature: MA Experiment 108463 PARAMETER Experiment Name: At_Germinating_Seeds_cDNA_P Parameter: Tissue Value: Germinating Seeds
  misc_feature: MA Experiment ID: 108573 Result: Down-regulated in Transcription
  misc_feature: MA Experiment 108573 PARAMETER Experiment Name: At_Drought_cDNA_P Parameter: Timepoint (hr) Value: 6
  misc_feature: MA Experiment 108573 PARAMETER Experiment Name: At_Drought_cDNA_P Parameter: Tissue Value: Aerial
  misc_feature: MA Experiment 108573 PARAMETER Experiment Name: At_Drought_cDNA_P Parameter: Treatment Value: Drought vs. No Drought
  misc_feature: MA Experiment ID: 108577 Result: Down-regulated in Transcription
  misc_feature: MA Experiment 108577 PARAMETER Experiment Name: At_42deg_Heat_cDNA_P Parameter: Temperature (deg C) Value: 42 vs. 22
  misc_feature: MA Experiment 108577 PARAMETER Experiment Name: At_42deg_Heat_cDNA_P Parameter: Timepoint (hr) Value: 6
  misc_feature: MA Experiment 108577 PARAMETER Experiment Name: At_42deg_Heat_cDNA_P Parameter: Tissue Value: Aerial
  misc_feature: MA Experiment ID: 108595 Result: Up-regulated in Transcription
  misc_feature: MA Experiment 108595 PARAMETER Experiment Name: At_Ler-pi_Ovule_cDNA_P Parameter: Plant Line Value: null
  misc_feature: MA Experiment ID: 20000234 Result: Up-regulated in Transcription
  misc_feature: MA Experiment 20000234 PARAMETER Experiment Name: At_Siliques_P Parameter: Age (day) Value: 21
  misc_feature: MA Experiment 20000234 PARAMETER Experiment Name: At_Siliques_P Parameter: Organism Value: A. thaliana
  misc_feature: MA Experiment 20000234 PARAMETER Experiment Name: At_Siliques_P Parameter: Plant Line Value: WS
  misc_feature: MA Experiment 20000234 PARAMETER Experiment Name: At_Siliques_P Parameter: Tissue Value: Less Than 5mm Siliques vs. Whole Plant
  misc_feature: MA Experiment ID: 20000235 Result: Up-regulated in Transcription
  misc_feature: MA Experiment 20000235 PARAMETER Experiment Name: At_Siliques_P Parameter: Age (day) Value: 21
  misc_feature: MA Experiment 20000235 PARAMETER Experiment Name: At_Siliques_P Parameter: Organism Value: A. thaliana
  misc_feature: MA Experiment 20000235 PARAMETER Experiment Name: At_Siliques_P Parameter: Plant Line Value: WS
  misc_feature: MA Experiment 20000235 PARAMETER Experiment Name: At_Siliques_P Parameter: Tissue Value: 5-10mm Siliques vs. Whole Plant
  misc_feature: MA Experiment ID: 20000264 Result: Up-regulated in Transcription
  misc_feature: MA Experiment 20000264 PARAMETER Experiment Name: At_Open_Flower_P Parameter: Age (day) Value: 21
  misc_feature: MA Experiment 20000264 PARAMETER Experiment Name: At_Open_Flower_P Parameter: Plant Line Value: WS
  misc_feature: MA Experiment 20000264 PARAMETER Experiment Name: At_Open_Flower_P Parameter: Tissue Value: Open Flower vs. Whole Plant
  misc_feature: MA Experiment ID: 20000265 Result: Up-regulated in Transcription
  misc_feature: MA Experiment 20000265 PARAMETER Experiment Name: At_Open_Flower_P Parameter: Age (day) Value: 21
  misc_feature: MA Experiment 20000265 PARAMETER Experiment Name: At_Open_Flower_P Parameter: Plant Line Value: WS
  misc_feature: MA Experiment 20000265 PARAMETER Experiment Name: At_Open_Flower_P Parameter: Tissue Value: Closed Flower vs. Whole Plant
  misc_feature: MA Experiment ID: 20000286 Result: Up-regulated in Transcription
  misc_feature: MA Experiment 20000286 PARAMETER Experiment Name: At_Open_Flower_P Parameter: Age (day) Value: 21
  misc_feature: MA Experiment 20000286 PARAMETER Experiment Name: At_Open_Flower_P Parameter: Plant Line Value: WS
  misc_feature: MA Experiment 20000286 PARAMETER Experiment Name: At_Open_Flower_P Parameter: Tissue Value: Half Open vs. Whole Plant
  misc_feature: MA Experiment ID: 20000437 Result: Down-regulated in Transcription
  misc_feature: MA Experiment 20000437 PARAMETER Experiment Name: At_Drought_P Parameter: Age (day) Value: 8
  misc_feature: MA Experiment 20000437 PARAMETER Experiment Name: At_Drought_P Parameter: Organism Value: A. thaliana
  misc_feature: MA Experiment 20000437 PARAMETER Experiment Name: At_Drought_P Parameter: Plant Line Value: WS
  misc_feature: MA Experiment 20000437 PARAMETER Experiment Name: At_Drought_P Parameter: Timepoint (hr) Value: 24
  misc_feature: MA Experiment 20000437 PARAMETER Experiment Name: At_Drought_P Parameter: Tissue Value: Whole Plant
  misc_feature: MA Experiment 20000437 PARAMETER Experiment Name: At_Drought_P Parameter: Treatment Value: Drought vs. No Drought
  misc_feature: MA Experiment ID: 20001911 Result: Down-regulated in Transcription
  misc_feature: MA Experiment 20001911 PARAMETER Experiment Name: At_Drought_Reproduction_P Parameter: Age (day) Value: 40
  misc_feature: MA Experiment 20001911 PARAMETER Experiment Name: At_Drought_Reproduction_P Parameter: Organism Value: A. thaliana
  misc_feature: MA Experiment 20001911 PARAMETER Experiment Name: At_Drought_Reproduction_P Parameter: Plant Line Value: WS
  misc_feature: MA Experiment 20001911 PARAMETER Experiment Name: At_Drought_Reproduction_P Parameter: Timepoint (day) Value: 10
  misc_feature: MA Experiment 20001911 PARAMETER Experiment Name: At_Drought_Reproduction_P Parameter: Tissue Value: Flowers
  misc_feature: MA Experiment 20001911 PARAMETER Experiment Name: At_Drought_Reproduction_P Parameter: Treatment Value: Drought vs. No Drought
aaaatgatcgctgcgacagcgagtgtgtgacgttaaaccctaaatctggtgtctttgtgcaatcgcaagattcattcactctctgcgacactaaagatcgaaacttttgaattgcagaaatggcgacagctttagcttccaagctctccaaaggacgttcattgcttggaggtctttgcaatgctttctctggtttgatgaattcctcctccaatggaatgatgaatggaagcatcctctctcagcaacaacataggacattcattcaaatggggacgattctcaaatgcgtggataactcgtgtgctaaagaggtgatgtgcattcaatccctgagaggtaagaaaggagcaagacttggcgatatcattgttggttcagtgaaagaagctaacccaattgttcaaaaaaaagtaaagaaagacgctatcccaaaaggtaaagtgaagaaagggatggtcgtgtacggtgtggttgtgcgtgctgcgatgcctaaaggacgtgctgatggaagccaagtcaagtttgatgacaatgccattgtagttgttggcattaaggaaaagaaagggcagaataattcacatggttccaagaggaaaatggagtacaaccaaccgactggtacccgagtgtttggtcctgtcccgcacgagatgcgcctcaggaaacagctcaagatcctttctttggctcagcacattgtttgagacaatacaccacactaaaacatcagttatgatctcctttatgtgactctctttgatccattcatcacttgggtttctgttgattcttcaactatccaactcattatttttgttaattctaatgaattatgaaaccttaacgtaccaattatgatctcttatttaggtttc

SEQ ID NO: 21071 - protein, 196 aa, Arabidopsis thaliana
  peptide (1)..(196): Ceres Seq. ID no. 13499460
  misc_feature (49)..(196): Pfam Name: Ribosomal protein L14p/L23e Pfam Description: Ribosomal protein L14p/L23e
  misc_feature (101)..(195): Homolog of NCBI NO: 20260394 NR Description: unknown protein [Arabidopsis thaliana]
  misc_feature (1)..(147): Homolog of NCBI NO: 18140856 NR Description: HUELLENLOS-like protein [Oryza sativa]
  misc_feature (51)..(195): Homolog of NCBI NO: 9757736 NR Description: 50S ribosomal protein L14 [Arabidopsis thaliana]
  misc_feature (1)..(149): Homolog of NCBI NO: 30694896 NR Description: ribosomal protein L14p family [Arabidopsis
  misc_feature (1)..(149): Homolog of NCBI NO: 30694900 NR Description: ribosomal protein L14p family [Arabidopsis
  misc_feature (1)..(149): Homolog of NCBI NO: 20260394 NR Description: unknown protein [Arabidopsis thaliana]
  misc_feature (27)..(196): Homolog of NCBI NO: 21555596 NR Description: ribosomal protein, putative [Arabidopsis thaliana]
  misc_feature (1)..(196): Homolog of NCBI NO: 18140858 NR Description: HUELLENLOS [Arabidopsis thaliana]
  misc_feature (1)..(196): Homolog of NCBI NO: 15220161 NR Description: ribosomal protein L14p family [Arabidopsis
  misc_feature (1)..(196): Homolog of NCBI NO: 8778471 NR Description: F1L3.27 [Arabidopsis thaliana]
MATALASKLSKGRSLLGGLCNAFSGLMNSSSNGMMNGSILSQQQHRTFIQMGTILKCVDNSCAKEVMCIQSLRGKKGARLGDIIVGSVKEANPIVQKKVKKDAIPKGKVKKGMVVYGVVVRAAMPKGRADGSQVKFDDNAIVVVGIKEKKGQNNSHGSKRKMEYNQPTGTRVFGPVPHEMRLRKQLKILSLAQHIV

SEQ ID NO: 21072 - protein, 170 aa, Arabidopsis thaliana
  peptide (1)..(170): Ceres Seq. ID no. 13499461
  misc_feature (23)..(170): Pfam Name: Ribosomal protein L14p/L23e Pfam Description: Ribosomal protein L14p/L23e
  misc_feature (75)..(169): Homolog of NCBI NO: 20260394 NR Description: unknown protein [Arabidopsis thaliana]
  misc_feature (1)..(121): Homolog of NCBI NO: 18140856 NR Description: HUELLENLOS-like protein [Oryza sativa]
  misc_feature (25)..(169): Homolog of NCBI NO: 9757736 NR Description: 50S ribosomal protein L14 [Arabidopsis thaliana]
  misc_feature (1)..(123): Homolog of NCBI NO: 30694896 NR Description: ribosomal protein L14p family [Arabidopsis
  misc_feature (1)..(123): Homolog of NCBI NO: 30694900 NR Description: ribosomal protein L14p family [Arabidopsis
  misc_feature (1)..(123): Homolog of NCBI NO: 20260394 NR Description: unknown protein [Arabidopsis thaliana]
  misc_feature (1)..(170): Homolog of NCBI NO: 21555596 NR Description: ribosomal protein, putative [Arabidopsis thaliana]
  misc_feature (1)..(170): Homolog of NCBI NO: 18140858 NR Description: HUELLENLOS [Arabidopsis thaliana]
  misc_feature (1)..(170): Homolog of NCBI NO: 15220161 NR Description: ribosomal protein L14p family [Arabidopsis
  misc_feature (1)..(170): Homolog of NCBI NO: 8778471 NR Description: F1L3.27 [Arabidopsis thaliana]
MNSSSNGMMNGSILSQQQHRTFIQMGTILKCVDNSCAKEVMCIQSLRGKKGARLGDIIVGSVKEANPIVQKKVKKDAIPKGKVKKGMVVYGVVVRAAMPKGRADGSQVKFDDNAIVVVGIKEKKGQNNSHGSKRKMEYNQPTGTRVFGPVPHEMRLRKQLKILSLAQHIV

SEQ ID NO: 21073 - protein, 163 aa, Arabidopsis thaliana
  peptide (1)..(163): Ceres Seq. ID no. 13499462
  misc_feature (16)..(163): Pfam Name: Ribosomal protein L14p/L23e Pfam Description: Ribosomal protein L14p/L23e
  misc_feature (68)..(162): Homolog of NCBI NO: 20260394 NR Description: unknown protein [Arabidopsis thaliana]
  misc_feature (1)..(114): Homolog of NCBI NO: 18140856 NR Description: HUELLENLOS-like protein [Oryza sativa]
  misc_feature (18)..(162): Homolog of NCBI NO: 9757736 NR Description: 50S ribosomal protein L14 [Arabidopsis thaliana]
  misc_feature (1)..(116): Homolog of NCBI NO: 30694896 NR Description: ribosomal protein L14p family [Arabidopsis
  misc_feature (1)..(116): Homolog of NCBI NO: 30694900 NR Description: ribosomal protein L14p family [Arabidopsis
  misc_feature (1)..(116): Homolog of NCBI NO: 20260394 NR Description: unknown protein [Arabidopsis thaliana]
  misc_feature (1)..(163): Homolog of NCBI NO: 21555596 NR Description: ribosomal protein, putative [Arabidopsis thaliana]
  misc_feature (1)..(163): Homolog of NCBI NO: 18140858 NR Description: HUELLENLOS [Arabidopsis thaliana]
  misc_feature (1)..(163): Homolog of NCBI NO: 15220161 NR Description: ribosomal protein L14p family [Arabidopsis
  misc_feature (1)..(163): Homolog of NCBI NO: 8778471 NR Description: F1L3.27 [Arabidopsis thaliana]
MMNGSILSQQQHRTFIQMGTILKCVDNSCAKEVMCIQSLRGKKGARLGDIIVGSVKEANPIVQKKVKKDAIPKGKVKKGMVVYGVVVRAAMPKGRADGSQVKFDDNAIVVVGIKEKKGQNNSHGSKRKMEYNQPTGTRVFGPVPHEMRLRKQLKILSLAQHIV

SEQ ID NO: 21074 - DNA, 1074 bp, Arabidopsis thaliana
  misc_feature (1)..(1074): Ceres Seq. ID no. 12338339
  misc_feature: MA Experiment ID: 108462 Result: Up-regulated in Transcription
  misc_feature: MA Experiment 108462 PARAMETER Experiment Name: At_Germinating_Seeds_cDNA_P Parameter: Age (day) Value: 2 vs. 0
  misc_feature: MA Experiment 108462 PARAMETER Experiment Name: At_Germinating_Seeds_cDNA_P Parameter: Tissue Value: Germinating Seeds
  misc_feature: MA Experiment ID: 20000495 Result: Down-regulated in Transcription
  misc_feature: MA Experiment 20000495 PARAMETER Experiment Name: At_Guard_Cells_P Parameter: Harvest Date Value: 8/2/2002
  misc_feature: MA Experiment 20000495 PARAMETER Experiment Name: At_Guard_Cells_P Parameter: Organism Value: A. thaliana
  misc_feature: MA Experiment 20000495 PARAMETER Experiment Name: At_Guard_Cells_P Parameter: Tissue Value: Guard Cells vs. Leaves
  misc_feature: MA Experiment ID: 20000794 Result: Down-regulated in Transcription
  misc_feature: MA Experiment 20000794 PARAMETER Experiment Name: At_Petals_P Parameter: Age (day) Value: 23-25 days
  misc_feature: MA Experiment 20000794 PARAMETER Experiment Name: At_Petals_P Parameter: Plant Line Value: WS
  misc_feature: MA Experiment 20000794 PARAMETER Experiment Name: At_Petals_P Parameter: Tissue Value: Petals vs. Whole plant
  misc_feature: MA Experiment ID: 20001905 Result: Down-regulated in Transcription
  misc_feature: MA Experiment 20001905 PARAMETER Experiment Name: At_Drought_Reproduction_P Parameter: Age (day) Value: 40
  misc_feature: MA Experiment 20001905 PARAMETER Experiment Name: At_Drought_Reproduction_P Parameter: Organism Value: A. thaliana
  misc_feature: MA Experiment 20001905 PARAMETER Experiment Name: At_Drought_Reproduction_P Parameter: Plant Line Value: WS
  misc_feature: MA Experiment 20001905 PARAMETER Experiment Name: At_Drought_Reproduction_P Parameter: Timepoint (day) Value: 10
  misc_feature: MA Experiment 20001905 PARAMETER Experiment Name: At_Drought_Reproduction_P Parameter: Tissue Value: Rosettes
  misc_feature: MA Experiment 20001905 PARAMETER Experiment Name: At_Drought_Reproduction_P Parameter: Treatment Value: Drought vs. No Drought
acaacggccactgaacactatcgatctaatcttttcagctctctccatcgtcgtcgtatctgtgactctcgtgatcatcgcctgaaaaaaatttgagataatggccagaaagttcttcgtcggaggcaactggaaatgtaacggaactgctgaggaggtgaagaagattgtgaacactcttaatgaagctcaggttccttcacaggatgttgtagaggttgtggttagccctccatatgtttttcttcccctggttaagagcacattgaggtctgacttttttgttgcggcacaaaactgttgggttaagaaaggaggtgctttcactggtgaagtgagtgcggagatgcttgtgaacttggatattccatgggttatccttggtcactctgaaaggagggcaatccttaatgaatcaagcgagttcgtcggagacaaggttgcctatgcacttgctcaaggtttgaaagtgattgcttgtgttggtgagactcttgaggagcgggaagctggatcgaccatggatgttgtggctgcccagaccaaggctattgccgatcgggtgacaaactggtcaaatgttgtcatagcctatgaaccagtgtgggccattggaaccggaaaggtcgctagcccagcccaagctcaagaagtacacgatgagctgaggaaatggctggccaagaacgtgagtgctgatgtcgctgctacaacccgcatcatttatggaggatccgtcaatggtggtaactgcaaggagctaggtggacaggccgatgttgatggtttcttggtcggtggtgcttctctaaagcctgagtttatcgacatcattaaggccgcagaggtgaagaaaagtgcctaatgagctcattaagcaatttaaaagtcctttgcttttccagtcgcaactctgaaaaaatgaataagttggtattatgatatgatacattttgcttcagttgtatttggcaaaagtttctctcttactatattgttttgagaacgcaacaatcattttcttcgccatttatttagctgtggacttgcaatttgcaaatcccttccttttgc

SEQ ID NO: 21075 - protein, 254 aa, Arabidopsis thaliana
  peptide (1)..(254): Ceres Seq. ID no. 12338340
  misc_feature (3)..(249): Pfam Name: Triosephosphate isomerase Pfam Description: Triosephosphate isomerase
  misc_feature (1)..(253): Homolog of NCBI NO: 136063 NR Description: TRIOSEPHOSPHATE ISOMERASE, CYTOSOLIC (TIM)
  misc_feature (1)..(253): Homolog of NCBI NO: 136057 NR Description: TRIOSEPHOSPHATE ISOMERASE, CYTOSOLIC (TIM)
  misc_feature (1)..(254): Homolog of NCBI NO: 38112662 NR Description: triose phosphate isomerase cytosolic isoform
  misc_feature (1)..(253): Homolog of NCBI NO: 1174749 NR Description: Triosephosphate isomerase, cytosolic (TIM)
  misc_feature (1)..(253): Homolog of NCBI NO: 34895792 NR Description: putative triose-phosphate isomerase
  misc_feature (2)..(254): Homolog of NCBI NO: 34908172 NR Description: putative triosephosphate isomerase
  misc_feature (1)..(253): Homolog of NCBI NO: 11124572 NR Description: triosephosphat-isomerase [Triticum aestivum]
  misc_feature (1)..(254): Homolog of NCBI NO: 1351279 NR Description: Triosephosphate isomerase, cytosolic (TIM)
  misc_feature (1)..(254): Homolog of NCBI NO: 11270444 NR Description: triose-phosphate isomerase (EC 5.3.1.1),
  misc_feature (1)..(254): Homolog of NCBI NO: 15233272 NR Description: cytosolic triosephosphatisomerase
MARKFFVGGNWKCNGTAEEVKKIVNTLNEAQVPSQDVVEVVVSPPYVFLPLVKSTLRSDFFVAAQNCWVKKGGAFTGEVSAEMLVNLDIPWVILGHSERRAILNESSEFVGDKVAYALAQGLKVIACVGETLEEREAGSTMDVVAAQTKAIADRVTNWSNVVIAYEPVWAIGTGKVASPAQAQEVHDELRKWLAKNVSADVAATTRIIYGGSVNGGNCKELGGQADVDGFLVGGASLKPEFIDIIKAAEVKKSA

SEQ ID NO: 21076 - protein, 172 aa, Arabidopsis thaliana
  peptide (1)..(172): Ceres Seq. ID no. 12338341
  misc_feature (1)..(167): Pfam Name: Triosephosphate isomerase Pfam Description: Triosephosphate isomerase
  misc_feature (1)..(171): Homolog of NCBI NO: 1174749 NR Description: Triosephosphate isomerase, cytosolic (TIM)
  misc_feature (1)..(171): Homolog of NCBI NO: 11124572 NR Description: triosephosphat-isomerase [Triticum aestivum]
  misc_feature (1)..(171): Homolog of NCBI NO: 34895792 NR Description: putative triose-phosphate isomerase
  misc_feature (1)..(172): Homolog of NCBI NO: 34908172 NR Description: putative triosephosphate isomerase
  misc_feature (1)..(171): Homolog of NCBI NO: 136063 NR Description: TRIOSEPHOSPHATE ISOMERASE, CYTOSOLIC (TIM)
  misc_feature (1)..(171): Homolog of NCBI NO: 136057 NR Description: TRIOSEPHOSPHATE ISOMERASE, CYTOSOLIC (TIM)
  misc_feature (1)..(172): Homolog of NCBI NO: 38112662 NR Description: triose phosphate isomerase cytosolic isoform
  misc_feature (1)..(172): Homolog of NCBI NO: 1351279 NR Description: Triosephosphate isomerase, cytosolic (TIM)
  misc_feature (1)..(172): Homolog of NCBI NO: 11270444 NR Description: triose-phosphate isomerase (EC 5.3.1.1),
  misc_feature (1)..(172): Homolog of NCBI NO: 15233272 NR Description: cytosolic triosephosphatisomerase
MLVNLDIPWVILGHSERRAILNESSEFVGDKVAYALAQGLKVIACVGETLEEREAGSTMDVVAAQTKAIADRVTNWSNVVIAYEPVWAIGTGKVASPAQAQEVHDELRKWLAKNVSADVAATTRIIYGGSVNGGNCKELGGQADVDGFLVGGASLKPEFIDIIKAAEVKKSA

SEQ ID NO: 21077 - DNA, 788 bp, Arabidopsis thaliana
  misc_feature (1)..(788): Ceres Seq. ID no. 12421098
  misc_feature: MA Experiment ID: 108434 Result: Down-regulated in Transcription
  misc_feature: MA Experiment 108434 PARAMETER Experiment Name: At_Root_Tips_cDNA_P Parameter: Tissue Value: Root Tips
  misc_feature: MA Experiment ID: 108461 Result: Up-regulated in Transcription
  misc_feature: MA Experiment 108461 PARAMETER Experiment Name: At_Germinating_Seeds_cDNA_P Parameter: Age (day) Value: 1 vs. 0
  misc_feature: MA Experiment 108461 PARAMETER Experiment Name: At_Germinating_Seeds_cDNA_P Parameter: Tissue Value: Germinating Seeds
  misc_feature: MA Experiment ID: 108462 Result: Up-regulated in Transcription
  misc_feature: MA Experiment 108462 PARAMETER Experiment Name: At_Germinating_Seeds_cDNA_P Parameter: Age (day) Value: 2 vs. 0
  misc_feature: MA Experiment 108462 PARAMETER Experiment Name: At_Germinating_Seeds_cDNA_P Parameter: Tissue Value: Germinating Seeds
  misc_feature: MA Experiment ID: 108463 Result: Up-regulated in Transcription
  misc_feature: MA Experiment 108463 PARAMETER Experiment Name: At_Germinating_Seeds_cDNA_P Parameter: Age (day) Value: 3 vs. 0
  misc_feature: MA Experiment 108463 PARAMETER Experiment Name: At_Germinating_Seeds_cDNA_P Parameter: Tissue Value: Germinating Seeds
  misc_feature: MA Experiment ID: 108464 Result: Up-regulated in Transcription
  misc_feature: MA Experiment 108464 PARAMETER Experiment Name: At_Germinating_Seeds_cDNA_P Parameter: Age (day) Value: 4 vs. 0
  misc_feature: MA Experiment 108464 PARAMETER Experiment Name: At_Germinating_Seeds_cDNA_P Parameter: Tissue Value: Germinating Seeds
  misc_feature: MA Experiment ID: 108501 Result: Down-regulated in Transcription
  misc_feature: MA Experiment 108501 PARAMETER Experiment Name: At_ap2_floral_buds_cDNA_P Parameter: Plant Line Value: ap2 (Ler.)
  misc_feature: MA Experiment 108501 PARAMETER Experiment Name: At_ap2_floral_buds_cDNA_P Parameter: Tissue Value: Closed Flower
  misc_feature: MA Experiment ID: 108572 Result: Up-regulated in Transcription
  misc_feature: MA Experiment 108572 PARAMETER Experiment Name: At_Drought_cDNA_P Parameter: Timepoint (hr) Value: 1
  misc_feature: MA Experiment 108572 PARAMETER Experiment Name: At_Drought_cDNA_P Parameter: Tissue Value: Aerial
  misc_feature: MA Experiment 108572 PARAMETER Experiment Name: At_Drought_cDNA_P Parameter: Treatment Value: Drought vs. No Drought
  misc_feature: MA Experiment ID: 108573 Result: Up-regulated in Transcription
  misc_feature: MA Experiment 108573 PARAMETER Experiment Name: At_Drought_cDNA_P Parameter: Timepoint (hr) Value: 6
  misc_feature: MA Experiment 108573 PARAMETER Experiment Name: At_Drought_cDNA_P Parameter: Tissue Value: Aerial
  misc_feature: MA Experiment 108573 PARAMETER Experiment Name: At_Drought_cDNA_P Parameter: Treatment Value: Drought vs. No Drought
  misc_feature: MA Experiment ID: 108574 Result: Up-regulated in Transcription
  misc_feature: MA Experiment 108574 PARAMETER Experiment Name: At_Wounding__cDNA_P Parameter: Timepoint (hr) Value: 1
  misc_feature: MA Experiment 108574 PARAMETER Experiment Name: At_Wounding__cDNA_P Parameter: Tissue Value: Aerial
  misc_feature: MA Experiment 108574 PARAMETER Experiment Name: At_Wounding__cDNA_P Parameter: Treatment Value: Wounding vs. No Wounding
  misc_feature: MA Experiment ID: 108579 Result: Up-regulated in Transcription
  misc_feature: MA Experiment 108579 PARAMETER Experiment Name: At_4deg_Cold_cDNA_P Parameter: Temperature (deg C) Value: 4 vs. 22
  misc_feature: MA Experiment 108579 PARAMETER Experiment Name: At_4deg_Cold_cDNA_P Parameter: Timepoint (hr) Value: 6
  misc_feature: MA Experiment 108579 PARAMETER Experiment Name: At_4deg_Cold_cDNA_P Parameter: Tissue Value: Aerial
  misc_feature: MA Experiment ID: 108585 Result: Up-regulated in Transcription
  misc_feature: MA Experiment 108585 PARAMETER Experiment Name: At_5mM_NaNP_cDNA_P Parameter: Timepoint (hr) Value: 6
  misc_feature: MA Experiment 108585 PARAMETER Experiment Name: At_5mM_NaNP_cDNA_P Parameter: Tissue Value: Aerial
  misc_feature: MA Experiment 108585 PARAMETER Experiment Name: At_5mM_NaNP_cDNA_P Parameter: Treatment Value: null
  misc_feature: MA Experiment ID: 108594 Result: Up-regulated in Transcription
  misc_feature: MA Experiment 108594 PARAMETER Experiment Name: At_Ler-rhl_Root_cDNA_P Parameter: Plant Line Value: null
  misc_feature: MA Experiment ID: 108595 Result: Up-regulated in Transcription
  misc_feature: MA Experiment 108595 PARAMETER Experiment Name: At_Ler-pi_Ovule_cDNA_P Parameter: Plant Line Value: null
  misc_feature: MA Experiment ID: 108608 Result: Up-regulated in Transcription
  misc_feature: MA Experiment 108608 PARAMETER Experiment Name: At_100uM_ABA_cDNA_P Parameter: Timepoint (hr) Value: 1
  misc_feature: MA Experiment 108608 PARAMETER Experiment Name: At_100uM_ABA_cDNA_P Parameter: Tissue Value: Aerial
  misc_feature: MA Experiment 108608 PARAMETER Experiment Name: At_100uM_ABA_cDNA_P Parameter: Treatment Value: 100uM ABA vs. No Treatment
  misc_feature: MA Experiment ID: 20000166 Result: Up-regulated in Transcription
  misc_feature: MA Experiment 20000166 PARAMETER Experiment Name: At_100uM_ABA_P Parameter: Age (day) Value: 14
  misc_feature: MA Experiment 20000166 PARAMETER Experiment Name: At_100uM_ABA_P Parameter: Organism Value: A. thaliana
  misc_feature: MA Experiment 20000166 PARAMETER Experiment Name: At_100uM_ABA_P Parameter: Plant Line Value: WS
  misc_feature: MA Experiment 20000166 PARAMETER Experiment Name: At_100uM_ABA_P Parameter: Timepoint (hr) Value: 1
  misc_feature: MA Experiment 20000166 PARAMETER Experiment Name: At_100uM_ABA_P Parameter: Tissue Value: Aerial
  misc_feature: MA Experiment 20000166 PARAMETER Experiment Name: At_100uM_ABA_P Parameter: Treatment Value: 100uM ABA vs. No Treatment
  misc_feature: MA Experiment ID: 20000173 Result: Up-regulated in Transcription
  misc_feature: MA Experiment 20000173 PARAMETER Experiment Name: At_42deg_Heat_P Parameter: Age (day) Value: 14
  misc_feature: MA Experiment 20000173 PARAMETER Experiment Name: At_42deg_Heat_P Parameter: Organism Value: A. thaliana
  misc_feature: MA Experiment 20000173 PARAMETER Experiment Name: At_42deg_Heat_P Parameter: Plant Line Value: WS
  misc_feature: MA Experiment 20000173 PARAMETER Experiment Name: At_42deg_Heat_P Parameter: Temperature (deg C) Value: 42 vs. 22
  misc_feature: MA Experiment 20000173 PARAMETER Experiment Name: At_42deg_Heat_P Parameter: Timepoint (hr) Value: 6
  misc_feature: MA Experiment 20000173 PARAMETER Experiment Name: At_42deg_Heat_P Parameter: Tissue Value: Aerial
  misc_feature: MA Experiment ID: 20000180 Result: Up-regulated in Transcription
  misc_feature: MA Experiment 20000180 PARAMETER Experiment Name: At_Germinating_Seeds_P Parameter: Age (hr) Value: 24 vs. 0
  misc_feature: MA Experiment 20000180 PARAMETER Experiment Name: At_Germinating_Seeds_P Parameter: Tissue Value: Germinating Seeds
  misc_feature: MA Experiment ID: 20000185 Result: Up-regulated in Transcription
  misc_feature: MA Experiment 20000185 PARAMETER Experiment Name: At_Roots__P Parameter: Age (day) Value: 7 vs. 21
  misc_feature: MA Experiment 20000185 PARAMETER Experiment Name: At_Roots__P Parameter: Organism Value: A. thaliana
  misc_feature: MA Experiment 20000185 PARAMETER Experiment Name: At_Roots__P Parameter: Tissue Value: Roots vs. Whole Plant
  misc_feature: MA Experiment ID: 20000234 Result: Up-regulated in Transcription
  misc_feature: MA Experiment 20000234 PARAMETER Experiment Name: At_Siliques_P Parameter: Age (day) Value: 21
  misc_feature: MA Experiment 20000234 PARAMETER Experiment Name: At_Siliques_P Parameter: Organism Value: A. thaliana
  misc_feature: MA Experiment 20000234 PARAMETER Experiment Name: At_Siliques_P Parameter: Plant Line Value: WS
  misc_feature: MA Experiment 20000234 PARAMETER Experiment Name: At_Siliques_P Parameter: Tissue Value: Less Than 5mm Siliques vs. Whole Plant
  misc_feature: MA Experiment ID: 20000235 Result: Up-regulated in Transcription
  misc_feature: MA Experiment 20000235 PARAMETER Experiment Name: At_Siliques_P Parameter: Age (day) Value: 21
  misc_feature: MA Experiment 20000235 PARAMETER Experiment Name: At_Siliques_P Parameter: Organism Value: A. thaliana
  misc_feature: MA Experiment 20000235 PARAMETER Experiment Name: At_Siliques_P Parameter: Plant Line Value: WS
  misc_feature: MA Experiment 20000235 PARAMETER Experiment Name: At_Siliques_P Parameter: Tissue Value: 5-10mm Siliques vs. Whole Plant
  misc_feature: MA Experiment ID: 20000265 Result: Up-regulated in Transcription
  misc_feature: MA Experiment 20000265 PARAMETER Experiment Name: At_Open_Flower_P Parameter: Age (day) Value: 21
  misc_feature: MA Experiment 20000265 PARAMETER Experiment Name: At_Open_Flower_P Parameter: Plant Line Value: WS
  misc_feature: MA Experiment 20000265 PARAMETER Experiment Name: At_Open_Flower_P Parameter: Tissue Value: Closed Flower vs. Whole Plant
  misc_feature: MA Experiment ID: 20000267 Result: Up-regulated in Transcription
  misc_feature: MA Experiment 20000267 PARAMETER Experiment Name: At_Drought_P Parameter: Age (day) Value: 7
  misc_feature: MA Experiment 20000267 PARAMETER Experiment Name: At_Drought_P Parameter: Organism Value: A. thaliana
  misc_feature: MA Experiment 20000267 PARAMETER Experiment Name: At_Drought_P Parameter: Plant Line Value: WS
  misc_feature: MA Experiment 20000267 PARAMETER Experiment Name: At_Drought_P Parameter: Timepoint (hr) Value: 6
  misc_feature: MA Experiment 20000267 PARAMETER Experiment Name: At_Drought_P Parameter: Tissue Value: Whole Plant
  misc_feature: MA Experiment 20000267 PARAMETER Experiment Name: At_Drought_P Parameter: Treatment Value: Drought vs. No Drought
  misc_feature: MA Experiment ID: 20000268 Result: Up-regulated in Transcription
  misc_feature: MA Experiment 20000268 PARAMETER Experiment Name: At_100mM_NaCl__P Parameter: Age (day) Value: 14
  misc_feature: MA Experiment 20000268 PARAMETER Experiment Name: At_100mM_NaCl__P Parameter: Organism Value: A. thaliana
  misc_feature: MA Experiment 20000268 PARAMETER Experiment Name: At_100mM_NaCl__P Parameter: Plant Line Value: WS
  misc_feature: MA Experiment 20000268 PARAMETER Experiment Name: At_100mM_NaCl__P Parameter: Timepoint (hr) Value: 6
  misc_feature: MA Experiment 20000268 PARAMETER Experiment Name: At_100mM_NaCl__P Parameter: Tissue Value: Whole Plant
  misc_feature: MA Experiment 20000268 PARAMETER Experiment Name: At_100mM_NaCl__P Parameter: Treatment Value: 100mM NaCl vs. No Treatment
  misc_feature: MA Experiment ID: 20000286 Result: Up-regulated in Transcription
  misc_feature: MA Experiment 20000286 PARAMETER Experiment Name: At_Open_Flower_P Parameter: Age (day) Value: 21
  misc_feature: MA Experiment 20000286 PARAMETER Experiment Name: At_Open_Flower_P Parameter: Plant Line Value: WS
  misc_feature: MA Experiment 20000286 PARAMETER Experiment Name: At_Open_Flower_P Parameter: Tissue Value: Half Open vs. Whole Plant
  misc_feature: MA Experiment ID: 20000288 Result: Up-regulated in Transcription
  misc_feature: MA Experiment 20000288 PARAMETER Experiment Name: At_Drought_P Parameter: Age (day) Value: 7
  misc_feature: MA Experiment 20000288 PARAMETER Experiment Name: At_Drought_P Parameter: Organism Value: A. thaliana
  misc_feature: MA Experiment 20000288 PARAMETER Experiment Name: At_Drought_P Parameter: Plant Line Value: WS
  misc_feature: MA Experiment 20000288 PARAMETER Experiment Name: At_Drought_P Parameter: Timepoint (hr) Value: 1
  misc_feature: MA Experiment 20000288 PARAMETER Experiment Name: At_Drought_P Parameter: Tissue Value: Whole Plant
  misc_feature: MA Experiment 20000288 PARAMETER Experiment Name: At_Drought_P Parameter: Treatment Value: Drought vs. No Drought
  misc_feature: MA Experiment ID: 20000436 Result: Up-regulated in Transcription
  misc_feature: MA Experiment 20000436 PARAMETER Experiment Name: At_Drought_P Parameter: Age (day) Value: 7
  misc_feature: MA Experiment 20000436 PARAMETER Experiment Name: At_Drought_P Parameter: Organism Value: A. thaliana
  misc_feature: MA Experiment 20000436 PARAMETER Experiment Name: At_Drought_P Parameter: Plant Line Value: WS
  misc_feature: MA Experiment 20000436 PARAMETER Experiment Name: At_Drought_P Parameter: Timepoint (hr) Value: 12
  misc_feature: MA Experiment 20000436 PARAMETER Experiment Name: At_Drought_P Parameter: Tissue Value: Whole Plant
  misc_feature: MA Experiment 20000436 PARAMETER Experiment Name: At_Drought_P Parameter: Treatment Value: Drought vs. No Drought
  misc_feature: MA Experiment ID: 20000437 Result: Up-regulated in Transcription
  misc_feature: MA Experiment 20000437 PARAMETER Experiment Name: At_Drought_P Parameter: Age (day) Value: 8
  misc_feature: MA Experiment 20000437 PARAMETER Experiment Name: At_Drought_P Parameter: Organism Value: A. thaliana
  misc_feature: MA Experiment 20000437 PARAMETER Experiment Name: At_Drought_P Parameter: Plant Line Value: WS
  misc_feature: MA Experiment 20000437 PARAMETER Experiment Name: At_Drought_P Parameter: Timepoint (hr) Value: 24
  misc_feature: MA Experiment 20000437 PARAMETER Experiment Name: At_Drought_P Parameter: Tissue Value: Whole Plant
  misc_feature: MA Experiment 20000437 PARAMETER Experiment Name: At_Drought_P Parameter: Treatment Value: Drought vs. No Drought
  misc_feature: MA Experiment ID: 20000495 Result: Up-regulated in Transcription
  misc_feature: MA Experiment 20000495 PARAMETER Experiment Name: At_Guard_Cells_P Parameter: Harvest Date Value: 8/2/2002
  misc_feature: MA Experiment 20000495 PARAMETER Experiment Name: At_Guard_Cells_P Parameter: Organism Value: A. thaliana
  misc_feature: MA Experiment 20000495 PARAMETER Experiment Name: At_Guard_Cells_P Parameter: Tissue Value: Guard Cells vs. Leaves
  misc_feature: MA Experiment ID: 20001554 Result: Up-regulated in Transcription
  misc_feature: MA Experiment 20001554 PARAMETER Experiment Name: At_Drought_Soil_Dry_P Parameter: Age (day) Value: 21
  misc_feature: MA Experiment 20001554 PARAMETER Experiment Name: At_Drought_Soil_Dry_P Parameter: Organism Value: A. thaliana
  misc_feature: MA Experiment 20001554 PARAMETER Experiment Name: At_Drought_Soil_Dry_P Parameter: Plant Line Value: WS
  misc_feature: MA Experiment 20001554 PARAMETER Experiment Name: At_Drought_Soil_Dry_P Parameter: Post Timepoint (hr) Value: None
  misc_feature: MA Experiment 20001554 PARAMETER Experiment Name: At_Drought_Soil_Dry_P Parameter: Post-Treatment Value: None
  misc_feature: MA Experiment 20001554 PARAMETER Experiment Name: At_Drought_Soil_Dry_P Parameter: Timepoint (day) Value: 7
  misc_feature: MA Experiment 20001554 PARAMETER Experiment Name: At_Drought_Soil_Dry_P Parameter: Treatment Value: Drought vs. No Drought
  misc_feature: MA Experiment ID: 20001555 Result: Up-regulated in Transcription
  misc_feature: MA Experiment 20001555 PARAMETER Experiment Name: At_Drought_Soil_Dry_P Parameter: Age (day) Value: 24
  misc_feature: MA Experiment 20001555 PARAMETER Experiment Name: At_Drought_Soil_Dry_P Parameter: Organism Value: A. thaliana
  misc_feature: MA Experiment 20001555 PARAMETER Experiment Name: At_Drought_Soil_Dry_P Parameter: Plant Line Value: WS
  misc_feature: MA Experiment 20001555 PARAMETER Experiment Name: At_Drought_Soil_Dry_P Parameter: Post Timepoint (hr) Value: None
  misc_feature: MA Experiment 20001555 PARAMETER Experiment Name: At_Drought_Soil_Dry_P Parameter: Post-Treatment Value: None
  misc_feature: MA Experiment 20001555 PARAMETER Experiment Name: At_Drought_Soil_Dry_P Parameter: Timepoint (day) Value: 10
  misc_feature: MA Experiment 20001555 PARAMETER Experiment Name: At_Drought_Soil_Dry_P Parameter: Treatment Value: Drought vs. No Drought
gtcttcttcttctacataaaattgattcgcctcgaaatttacacagacttgtcgctctctctttctctcttatttcacagagcccctaaacatttccaaaaatcttgcaaaggaagaaaaacaatggacaaattttggactttcctcactgctcttcattcaggcgctgggcctatcgtgatgttactttatccattgtacgcatcggtgatagcaatggagagcacaacaaaagtggacgatgaacagtggcttgcgtattggataatatattcgttcctctcactcacggaactgattctgcaatcgcttattgagtggattccgatttggtatacggtgaaacttgtgttcgtggcttggctagttcttcctcagtttcaaggcgcagcttttatctacaaccgtgttgttagagaacagttcaagaaacacggcgtcctccgctccacccactccaagcccaccaagcccaacatcctccactccattttcccccaccgggagggacacgaggctcacagtcactgaatcagaagggtggagcagacagaagaagcctgactagtattattgtaatggtcttggtggtggtcccatcatgtccctgtctaatctactttttactttatttttatttatcacaaaaaatgggtttaggaatgttgatgatgatgactgatgaggtgtgtaatcgtttttaaattagaaaatggcttcttctgcttgtatgattgtatcgctaatcttccacgcgtatttctttaatgtcaacgctaataatttcc

SEQ ID NO: 21078 - protein, 176 aa, Arabidopsis thaliana
  peptide (1)..(176): Ceres Seq. ID no. 12421099
  misc_feature (45)..(142): Pfam Name: TB2/DP1, HVA22 family Pfam Description: TB2/DP1, HVA22 family
  misc_feature (56)..(139): Homolog of NCBI NO: 4884934 NR Description: AtHVA22b [Arabidopsis thaliana]
  misc_feature (56)..(139): Homolog of NCBI NO: 15241840 NR Description: AtHVA22b-like protein
  misc_feature (58)..(169): Homolog of NCBI NO: 15222421 NR Description: AtHVA22c
  misc_feature (56)..(142): Homolog of NCBI NO: 15221266 NR Description: AtHVA22a; protein id: At1g74520.1, supported by
  misc_feature (42)..(171): Homolog of NCBI NO: 33342176 NR Description: hypothetical protein [Triticum aestivum]
  misc_feature (42)..(171): Homolog of NCBI NO: 1076715 NR Description: abscisic acid-induced protein HVA22 - barley
  misc_feature (61)..(166): Homolog of NCBI NO: 8777395 NR Description: gene_id:MFB16.12~pir||T05517~similar to unknown
  misc_feature (42)..(149): Homolog of NCBI NO: 18423191 NR Description: putative protein
  misc_feature (61)..(168): Homolog of NCBI NO: 7484787 NR Description: abscisic acid-induced protein homolog F13M23.100
  misc_feature (42)..(176): Homolog of NCBI NO: 18416458 NR Description: abscisic acid-induced - like protein
VFFFYIKLIRLEIYTDLSLSLSLLFHRAPKHFQKSCKGRKTMDKFWTFLTALHSGAGPIVMLLYPLYASVIAMESTTKVDDEQWLAYWIIYSFLSLTELILQSLIEWIPIWYTVKLVFVAWLVLPQFQGAAFIYNRVVREQFKKHGVLRSTHSKPTKPNILHSIFPHREGHEAHSH

SEQ ID NO: 21079 - protein, 135 aa, Arabidopsis thaliana
  peptide (1)..(135): Ceres Seq. ID no. 12421100
  misc_feature (4)..(101): Pfam Name: TB2/DP1, HVA22 family Pfam Description: TB2/DP1, HVA22 family
  misc_feature (15)..(98): Homolog of NCBI NO: 4884934 NR Description: AtHVA22b [Arabidopsis thaliana]
  misc_feature (15)..(98): Homolog of NCBI NO: 15241840 NR Description: AtHVA22b-like protein
  misc_feature (17)..(128): Homolog of NCBI NO: 15222421 NR Description: AtHVA22c
  misc_feature (15)..(101): Homolog of NCBI NO: 15221266 NR Description: AtHVA22a; protein id: At1g74520.1, supported by
  misc_feature (1)..(130): Homolog of NCBI NO: 33342176 NR Description: hypothetical protein [Triticum aestivum]
  misc_feature (1)..(130): Homolog of NCBI NO: 1076715 NR Description: abscisic acid-induced protein HVA22 - barley
  misc_feature (20)..(125): Homolog of NCBI NO: 8777395 NR Description: gene_id:MFB16.12~pir||T05517~similar to unknown
  misc_feature (1)..(108): Homolog of NCBI NO: 18423191 NR Description: putative protein
  misc_feature (20)..(127): Homolog of NCBI NO: 7484787 NR Description: abscisic acid-induced protein homolog F13M23.100
  misc_feature (1)..(135): Homolog of NCBI NO: 18416458 NR Description: abscisic acid-induced - like protein
MDKFWTFLTALHSGAGPIVMLLYPLYASVIAMESTTKVDDEQWLAYWIIYSFLSLTELILQSLIEWIPIWYTVKLVFVAWLVLPQFQGAAFIYNRVVREQFKKHGVLRSTHSKPTKPNILHSIFPHREGHEAHSH

SEQ ID NO: 21080 - protein, 116 aa, Arabidopsis thaliana
  peptide (1)..(116): Ceres Seq. ID no. 12421101
  misc_feature (1)..(82): Pfam Name: TB2/DP1, HVA22 family Pfam Description: TB2/DP1, HVA22 family
  misc_feature (1)..(79): Homolog of NCBI NO: 4884934 NR Description: AtHVA22b [Arabidopsis thaliana]
  misc_feature (1)..(79): Homolog of NCBI NO: 15241840 NR Description: AtHVA22b-like protein
  misc_feature (1)..(109): Homolog of NCBI NO: 15222421 NR Description: AtHVA22c
  misc_feature (1)..(82): Homolog of NCBI NO: 15221266 NR Description: AtHVA22a; protein id: At1g74520.1, supported by
  misc_feature (1)..(111): Homolog of NCBI NO: 33342176 NR Description: hypothetical protein [Triticum aestivum]
  misc_feature (1)..(111): Homolog of NCBI NO: 1076715 NR Description: abscisic acid-induced protein HVA22 - barley
  misc_feature (1)..(106): Homolog of NCBI NO: 8777395 NR Description: gene_id:MFB16.12~pir||T05517~similar to unknown
  misc_feature (1)..(89): Homolog of NCBI NO: 18423191 NR Description: putative protein
  misc_feature (1)..(108): Homolog of NCBI NO: 7484787 NR Description: abscisic acid-induced protein homolog F13M23.100
  misc_feature (1)..(116): Homolog of NCBI NO: 18416458 NR Description: abscisic acid-induced - like protein
MLLYPLYASVIAMESTTKVDDEQWLAYWIIYSFLSLTELILQSLIEWIPIWYTVKLVFVAWLVLPQFQGAAFIYNRVVREQFKKHGVLRSTHSKPTKPNILHSIFPHREGHEAHSH

SEQ ID NO: 21081 - DNA, 627 bp, Arabidopsis thaliana
  misc_feature (1)..(627): Ceres Seq. ID no. 12738393
  misc_feature: MA Experiment ID: 108434 Result: Up-regulated in Transcription
  misc_feature: MA Experiment 108434 PARAMETER Experiment Name: At_Root_Tips_cDNA_P Parameter: Tissue Value: Root Tips
  misc_feature: MA Experiment ID: 108462 Result: Down-regulated in Transcription
  misc_feature: MA Experiment 108462 PARAMETER Experiment Name: At_Germinating_Seeds_cDNA_P Parameter: Age (day) Value: 2 vs. 0
  misc_feature: MA Experiment 108462 PARAMETER Experiment Name: At_Germinating_Seeds_cDNA_P Parameter: Tissue Value: Germinating Seeds
  misc_feature: MA Experiment ID: 108463 Result: Down-regulated in Transcription
  misc_feature: MA Experiment 108463 PARAMETER Experiment Name: At_Germinating_Seeds_cDNA_P Parameter: Age (day) Value: 3 vs. 0
  misc_feature: MA Experiment 108463 PARAMETER Experiment Name: At_Germinating_Seeds_cDNA_P Parameter: Tissue Value: Germinating Seeds
  misc_feature: MA Experiment ID: 108464 Result: Down-regulated in Transcription
  misc_feature: MA Experiment 108464 PARAMETER Experiment Name: At_Germinating_Seeds_cDNA_P Parameter: Age (day) Value: 4 vs. 0
  misc_feature: MA Experiment 108464 PARAMETER Experiment Name: At_Germinating_Seeds_cDNA_P Parameter: Tissue Value: Germinating Seeds
  misc_feature: MA Experiment ID: 108573 Result: Down-regulated in Transcription
  misc_feature: MA Experiment 108573 PARAMETER Experiment Name: At_Drought_cDNA_P Parameter: Timepoint (hr) Value: 6
  misc_feature: MA Experiment 108573 PARAMETER Experiment Name: At_Drought_cDNA_P Parameter: Tissue Value: Aerial
  misc_feature: MA Experiment 108573 PARAMETER Experiment Name: At_Drought_cDNA_P Parameter: Treatment Value: Drought vs. No Drought
  misc_feature: MA Experiment ID: 20001807 Result: Up-regulated in Transcription
  misc_feature: MA Experiment 20001807 PARAMETER Experiment Name: At_50mM_NH4NO3_L-to-H_Sub_P Parameter: Timepoint (hr) Value: 6
  misc_feature: MA Experiment 20001807 PARAMETER Experiment Name: At_50mM_NH4NO3_L-to-H_Sub_P Parameter: Tissue Value: Leaf
  misc_feature: MA Experiment 20001807 PARAMETER Experiment Name: At_50mM_NH4NO3_L-to-H_Sub_P Parameter: Treatment Value: 50mM NH4NO3 vs 100mM Mannitol
gcttctctagggtttcagccaccagactcaaacagagagtgaaaatgccggcgggacacggagtgagggcgagaacaagagatctgttcgcgagaccattcaggaagaagggttatattccactctccacttacctcagaaccttcaaggtcggcgattacgtcgatgtcaaggttaatggagctatccacaagggtatgcctcataagttctaccatggtcgtactggtcgcatctggaatgtcactaagcgtgccgttggtgttgaagtcaacaaacagattgggaacagaatcataaggaagaggatacatgtgcgtgtggagcatgtgcaacagtcaaggtgtgctgaggagtttaaactcagaaagaagcagaacgatgtgcttaaggctgatgctaaagccagaggagagactatcagcaccaagagacagcctaaaggtcctaaaccgggtttcatggtcgaaggtatgacattggagactgtcactcccattccttacgatgttgtcaacgatctcaagggtggttattgagttttttccattttattatcattctttactcagaatttttgcacttgcttttttaatgatgtttttgtatcaattaagactaatttct

SEQ ID NO: 21082 - protein, 178 aa, Arabidopsis thaliana
  peptide (1)..(178): Ceres Seq. ID no. 12738394
  misc_feature (16)..(114): Pfam Name: Ribosomal protein L21e Pfam Description: Ribosomal protein L21e
  misc_feature (15)..(171): Homolog of NCBI NO: 38048363 NR Description: similar to Drosophila melanogaster CG12775
  misc_feature (15)..(169): Homolog of NCBI NO: 6325178 NR Description: Homology to rat L21; Rpl21bp [Saccharomyces
  misc_feature (15)..(171): Homolog of NCBI NO: 20129705 NR Description: CG12775-PA [Drosophila melanogaster]
  misc_feature (15)..(169): Homolog of NCBI NO: 6319668 NR Description: Homology to rat L21; Rpl21ap [Saccharomyces
  misc_feature (15)..(171): Homolog of NCBI NO: 15213768 NR Description: ribosomal protein L21 [Spodoptera frugiperda]
  misc_feature (15)..(169): Homolog of NCBI NO: 6094029 NR Description: 60S RIBOSOMAL PROTEIN L21
  misc_feature (15)..(178): Homolog of NCBI NO: 11276828 NR Description: ribosomal protein L21 [imported] - rice
  misc_feature (15)..(178): Homolog of NCBI NO: 37535194 NR Description: 60S ribosomal protein L21
  misc_feature (15)..(178): Homolog of NCBI NO: 18391042 NR Description: putative 60S ribosomal protein L21
  misc_feature (15)..(178): Homolog of NCBI NO: 18406015 NR Description: 60S ribosomal protein L21, putative
FSRVSATRLKQRVKMPAGHGVRARTRDLFARPFRKKGYIPLSTYLRTFKVGDYVDVKVNGAIHKGMPHKFYHGRTGRIWNVTKRAVGVEVNKQIGNRIIRKRIHVRVEHVQQSRCAEEFKLRKKQNDVLKADAKARGETISTKRQPKGPKPGFMVEGMTLETVTPIPYDVVNDLKGGY

SEQ ID NO: 21083 - protein, 164 aa, Arabidopsis thaliana; identical to SEQ ID NO: 20517
  peptide (1)..(164): Ceres Seq. ID no. 12738395
  misc_feature (2)..(100): Pfam Name: Ribosomal protein L21e Pfam Description: Ribosomal protein L21e
  misc_feature (1)..(157): Homolog of NCBI NO: 38048363 NR Description: similar to Drosophila melanogaster CG12775
  misc_feature (1)..(155): Homolog of NCBI NO: 6325178 NR Description: Homology to rat L21; Rpl21bp [Saccharomyces
  misc_feature (1)..(157): Homolog of NCBI NO: 20129705 NR Description: CG12775-PA [Drosophila melanogaster]
  misc_feature (1)..(155): Homolog of NCBI NO: 6319668 NR Description: Homology to rat L21; Rpl21ap [Saccharomyces
  misc_feature (1)..(157): Homolog of NCBI NO: 15213768 NR Description: ribosomal protein L21 [Spodoptera frugiperda]
  misc_feature (1)..(155): Homolog of NCBI NO: 6094029 NR Description: 60S RIBOSOMAL PROTEIN L21
  misc_feature (1)..(164): Homolog of NCBI NO: 11276828 NR Description: ribosomal protein L21 [imported] - rice
  misc_feature (1)..(164): Homolog of NCBI NO: 37535194 NR Description: 60S ribosomal protein L21
  misc_feature (1)..(164): Homolog of NCBI NO: 18391042 NR Description: putative 60S ribosomal protein L21
  misc_feature (1)..(164): Homolog of NCBI NO: 18406015 NR Description: 60S ribosomal protein L21, putative

SEQ ID NO: 21084 - protein, 113 aa, Arabidopsis thaliana; identical to SEQ ID NO: 20518
  peptide (1)..(113): Ceres Seq. ID no. 12738396
  misc_feature (1)..(106): Homolog of NCBI NO: 15213768 NR Description: ribosomal protein L21 [Spodoptera frugiperda]
  misc_feature (1)..(104): Homolog of NCBI NO: 6094029 NR Description: 60S RIBOSOMAL PROTEIN L21
  misc_feature (1)..(113): Homolog of NCBI NO: 11276828 NR Description: ribosomal protein L21 [imported] - rice
  misc_feature (1)..(113): Homolog of NCBI NO: 37535194 NR Description: 60S ribosomal protein L21
  misc_feature (1)..(113): Homolog of NCBI NO: 18391042 NR Description: putative 60S ribosomal protein L21
  misc_feature (1)..(113): Homolog of NCBI NO: 18406015 NR Description: 60S ribosomal protein L21, putative
  misc_feature (1)..(106): Homolog of NCBI NO: 38048363 NR Description: similar to Drosophila melanogaster CG12775
  misc_feature (1)..(104): Homolog of NCBI NO: 6325178 NR Description: Homology to rat L21; Rpl21bp [Saccharomyces
  misc_feature (1)..(106): Homolog of NCBI NO: 20129705 NR Description: CG12775-PA [Drosophila melanogaster]
  misc_feature (1)..(104): Homolog of NCBI NO: 6319668 NR Description: Homology to rat L21; Rpl21ap [Saccharomyces

SEQ ID NO: 21085 - DNA, 1023 bp, Arabidopsis thaliana
  misc_feature (1)..(1023): Ceres Seq. ID no. 12420913
  misc_feature: MA Experiment ID: 108461 Result: Up-regulated in Transcription
  misc_feature: MA Experiment 108461 PARAMETER Experiment Name: At_Germinating_Seeds_cDNA_P Parameter: Age (day) Value: 1 vs. 0
  misc_feature: MA Experiment 108461 PARAMETER Experiment Name: At_Germinating_Seeds_cDNA_P Parameter: Tissue Value: Germinating Seeds
  misc_feature: MA Experiment ID: 20000184 Result: Up-regulated in Transcription
  misc_feature: MA Experiment 20000184 PARAMETER Experiment Name: At_Shoots__P Parameter: Age (day) Value: 7
  misc_feature: MA Experiment 20000184 PARAMETER Experiment Name: At_Shoots__P Parameter: Tissue Value: Shoots vs. Whole Plant
  misc_feature: MA Experiment ID: 20000234 Result: Up-regulated in Transcription
  misc_feature: MA Experiment 20000234 PARAMETER Experiment Name: At_Siliques_P Parameter: Age (day) Value: 21
  misc_feature: MA Experiment 20000234 PARAMETER Experiment Name: At_Siliques_P Parameter: Organism Value: A. thaliana
  misc_feature: MA Experiment 20000234 PARAMETER Experiment Name: At_Siliques_P Parameter: Plant Line Value: WS
  misc_feature: MA Experiment 20000234 PARAMETER Experiment Name: At_Siliques_P Parameter: Tissue Value: Less Than 5mm Siliques vs. Whole Plant
  misc_feature: MA Experiment ID: 20000235 Result: Up-regulated in Transcription
  misc_feature: MA Experiment 20000235 PARAMETER Experiment Name: At_Siliques_P Parameter: Age (day) Value: 21
  misc_feature: MA Experiment 20000235 PARAMETER Experiment Name: At_Siliques_P Parameter: Organism Value: A. thaliana
  misc_feature: MA Experiment 20000235 PARAMETER Experiment Name: At_Siliques_P Parameter: Plant Line Value: WS
  misc_feature: MA Experiment 20000235 PARAMETER Experiment Name: At_Siliques_P Parameter: Tissue Value: 5-10mm Siliques vs. Whole Plant
  misc_feature: MA Experiment ID: 20000264 Result: Up-regulated in Transcription
  misc_feature: MA Experiment 20000264 PARAMETER Experiment Name: At_Open_Flower_P Parameter: Age (day) Value: 21
  misc_feature: MA Experiment 20000264 PARAMETER Experiment Name: At_Open_Flower_P Parameter: Plant Line Value: WS
  misc_feature: MA Experiment 20000264 PARAMETER Experiment Name: At_Open_Flower_P Parameter: Tissue Value: Open Flower vs. Whole Plant
  misc_feature: MA Experiment ID: 20000265 Result: Up-regulated in Transcription
  misc_feature: MA Experiment 20000265 PARAMETER Experiment Name: At_Open_Flower_P Parameter: Age (day) Value: 21
  misc_feature: MA Experiment 20000265 PARAMETER Experiment Name: At_Open_Flower_P Parameter: Plant Line Value: WS
  misc_feature: MA Experiment 20000265 PARAMETER Experiment Name: At_Open_Flower_P Parameter: Tissue Value: Closed Flower vs. Whole Plant
  misc_feature: MA Experiment ID: 20000437 Result: Down-regulated in Transcription
  misc_feature: MA Experiment 20000437 PARAMETER Experiment Name: At_Drought_P Parameter: Age (day) Value: 8
  misc_feature: MA Experiment 20000437 PARAMETER Experiment Name: At_Drought_P Parameter: Organism Value: A. thaliana
  misc_feature: MA Experiment 20000437 PARAMETER Experiment Name: At_Drought_P Parameter: Plant Line Value: WS
  misc_feature: MA Experiment 20000437 PARAMETER Experiment Name: At_Drought_P Parameter: Timepoint (hr) Value: 24
  misc_feature: MA Experiment 20000437 PARAMETER Experiment Name: At_Drought_P Parameter: Tissue Value: Whole Plant
  misc_feature: MA Experiment 20000437 PARAMETER Experiment Name: At_Drought_P Parameter: Treatment Value: Drought vs. No Drought
  misc_feature: MA Experiment ID: 20001247 Result: Down-regulated in Transcription
  misc_feature: MA Experiment 20001247 PARAMETER Experiment Name: At_Far-red-induction_P Parameter: Age (day) Value: 7
  misc_feature: MA Experiment 20001247 PARAMETER Experiment Name: At_Far-red-induction_P Parameter: Light Value: Far-red vs. White
  misc_feature: MA Experiment 20001247 PARAMETER Experiment Name: At_Far-red-induction_P Parameter: Organism Value: A. thaliana
  misc_feature: MA Experiment 20001247 PARAMETER Experiment Name: At_Far-red-induction_P Parameter: Plant Line Value: Columbia
  misc_feature: MA Experiment 20001247 PARAMETER Experiment Name: At_Far-red-induction_P Parameter: Timepoint (hr) Value: 1
  misc_feature: MA Experiment 20001247 PARAMETER Experiment Name: At_Far-red-induction_P Parameter: Tissue Value: Whole Plant
  misc_feature: MA Experiment ID: 20001248 Result: Down-regulated in Transcription
  misc_feature: MA Experiment 20001248 PARAMETER Experiment Name: At_Far-red-induction_P Parameter: Age (day) Value: 7
  misc_feature: MA Experiment 20001248 PARAMETER Experiment Name: At_Far-red-induction_P Parameter: Light Value: Far-red vs. White
  misc_feature: MA Experiment 20001248 PARAMETER Experiment Name: At_Far-red-induction_P Parameter: Organism Value: A. thaliana
  misc_feature: MA Experiment 20001248 PARAMETER Experiment Name: At_Far-red-induction_P Parameter: Plant Line Value: Columbia
  misc_feature: MA Experiment 20001248 PARAMETER Experiment Name: At_Far-red-induction_P Parameter: Timepoint (hr) Value: 4
  misc_feature: MA Experiment 20001248 PARAMETER Experiment Name: At_Far-red-induction_P Parameter: Tissue Value: Whole Plant
  misc_feature: MA Experiment ID: 20001555 Result: Down-regulated in Transcription
  misc_feature: MA Experiment 20001555 PARAMETER Experiment Name: At_Drought_Soil_Dry_P Parameter: Age (day) Value: 24
  misc_feature: MA Experiment 20001555 PARAMETER Experiment Name: At_Drought_Soil_Dry_P Parameter: Organism Value: A. thaliana
  misc_feature: MA Experiment 20001555 PARAMETER Experiment Name: At_Drought_Soil_Dry_P Parameter: Plant Line Value: WS
  misc_feature: MA Experiment 20001555 PARAMETER Experiment Name: At_Drought_Soil_Dry_P Parameter: Post Timepoint (hr) Value: None
  misc_feature: MA Experiment 20001555 PARAMETER Experiment Name: At_Drought_Soil_Dry_P Parameter: Post-Treatment Value: None
  misc_feature: MA Experiment 20001555 PARAMETER Experiment Name: At_Drought_Soil_Dry_P Parameter: Timepoint (day) Value: 10
  misc_feature: MA Experiment 20001555 PARAMETER Experiment Name: At_Drought_Soil_Dry_P Parameter: Treatment Value: Drought vs. No Drought
  misc_feature: MA Experiment ID: 20001560 Result: Up-regulated in Transcription
  misc_feature: MA Experiment 20001560 PARAMETER Experiment Name: At_Drought_Soil_Dry_P Parameter: Age (day) Value: 28
  misc_feature: MA Experiment 20001560 PARAMETER Experiment Name: At_Drought_Soil_Dry_P Parameter: Organism Value: A. thaliana
  misc_feature: MA Experiment 20001560 PARAMETER Experiment Name: At_Drought_Soil_Dry_P Parameter: Plant Line Value: WS
  misc_feature: MA Experiment 20001560 PARAMETER Experiment Name: At_Drought_Soil_Dry_P Parameter: Post Timepoint (hr) Value: None
  misc_feature: MA Experiment 20001560 PARAMETER Experiment Name: At_Drought_Soil_Dry_P Parameter: Post-Treatment Value: None
  misc_feature: MA Experiment 20001560 PARAMETER Experiment Name: At_Drought_Soil_Dry_P Parameter: Timepoint (day) Value: 14
  misc_feature: MA Experiment 20001560 PARAMETER Experiment Name: At_Drought_Soil_Dry_P Parameter: Treatment Value: Drought vs. No Drought
  misc_feature: MA Experiment ID: 20001911 Result: Down-regulated in Transcription
  misc_feature: MA Experiment 20001911 PARAMETER Experiment Name: At_Drought_Reproduction_P Parameter: Age (day) Value: 40
  misc_feature: MA Experiment 20001911 PARAMETER Experiment Name: At_Drought_Reproduction_P Parameter: Organism Value: A. thaliana
  misc_feature: MA Experiment 20001911 PARAMETER Experiment Name: At_Drought_Reproduction_P Parameter: Plant Line Value: WS
  misc_feature: MA Experiment 20001911 PARAMETER Experiment Name: At_Drought_Reproduction_P Parameter: Timepoint (day) Value: 10
  misc_feature: MA Experiment 20001911 PARAMETER Experiment Name: At_Drought_Reproduction_P Parameter: Tissue Value: Flowers
  misc_feature: MA Experiment 20001911 PARAMETER Experiment Name: At_Drought_Reproduction_P Parameter: Treatment Value: Drought vs. No Drought
actttccaaaatagccgcaaacgattctcattgtgaactctgataatatctaagacgacgaaatgttggagctacgtcttgttcagggctcgttgttgaagaaggttctagaatcaatcaaagatctggtgaacgatgcgaatttcgactgctccagcactgggttctcactccaagctatggattcgagtcacgttgctctggtgtctctcttgctaagatccgaaggcttcgaacactacagatgcgacaggaatctctccatggggatgaatctcggcaacatgtcgaagatgctcaaatgcgccggaaatgatgacatcatcaccatcaaggctgatgacggcggcgacaccgttaccttcatgtttgagagccccacgcaagacaagattgctgattttgagatgaagttgatggatatagacagtgaacatctgggaatacctgatgctgagtaccactcaatcgtgaggatgccttccaatgagttttccaggatttgcaaagatctcagtagcattggtgacacagttgtgatctctgtgactaaagaaggcgtgaagttttctactgccggtgacattggaaccgctaacattgtgctcaggcagaacacaactgtagacaagccggaagatgcaattgtgatagagatgaaggagccagtgtctctctcatttgccctgaggtacatgaattccttcacaaaggcaactccattgtcagacacagtgacaatcagcttatcgtcggagttgccagtggttgtggagtataaggttgctgagatgggttacattcgttactacttggctcctaagattgaagaagaagaagacactaatccctaagaccccttttatatccacaatttctcttcattctaaaatgttgaagatttattgacaatgttggtgtttttttttggtgagattcctttgtatcccccctctagaatcagttgttttcttgacttattatgttttatgataacaaagttcagcaaaattagttgtcttg

SEQ ID NO: 21086 - protein, 263 aa, Arabidopsis thaliana
  peptide (1)..(263): Ceres Seq. ID no. 12420914
  misc_feature (127)..(254): Pfam Name: Proliferating cell nuclear antigen, C-terminal domain Pfam Description: Proliferating cell nuclear antigen, C-terminal
  misc_feature (1)..(260): Homolog of NCBI NO: 100160 NR Description: proliferating cell nuclear antigen (clone 4.10) -
  misc_feature (1)..(263): Homolog of NCBI NO: 25005275 NR Description: proliferating cell nuclear antigen [Lycopersicon
  misc_feature (1)..(260): Homolog of NCBI NO: 129692 NR Description: PROLIFERATING CELL NUCLEAR ANTIGEN (PCNA) (CYCLIN)
  misc_feature (1)..(263): Homolog of NCBI NO: 3947727 NR Description: proliferating cell nuclear antigen [Nicotiana
  misc_feature (1)..(263): Homolog of NCBI NO: 10946427 NR Description: proliferating cell nuclear antigen [Nicotiana
  misc_feature (1)..(263): Homolog of NCBI NO: 6225836 NR Description: Proliferating cell nuclear antigen (PCNA)
  misc_feature (1)..(260): Homolog of NCBI NO: 2499441 NR Description: PROLIFERATING CELL NUCLEAR ANTIGEN (PCNA)
  misc_feature (1)..(263): Homolog of NCBI NO: 15227564 NR Description: putative proliferating cell nuclear antigen, PCNA
  misc_feature (1)..(263): Homolog of NCBI NO: 7207994 NR Description: proliferating cellular nuclear antigen
  misc_feature (1)..(263): Homolog of NCBI NO: 15222379 NR Description: proliferating cellular nuclear antigen
MLELRLVQGSLLKKVLESIKDLVNDANFDCSSTGFSLQAMDSSHVALVSLLLRSEGFEHYRCDRNLSMGMNLGNMSKMLKCAGNDDIITIKADDGGDTVTFMFESPTQDKIADFEMKLMDIDSEHLGIPDAEYHSIVRMPSNEFSRICKDLSSIGDTVVISVTKEGVKFSTAGDIGTANIVLRQNTTVDKPEDAIVIEMKEPVSLSFALRYMNSFTKATPLSDTVTISLSSELPVVVEYKVAEMGYIRYYLAPKIEEEEDTNP

SEQ ID NO: 21087 - protein, 224 aa, Arabidopsis thaliana
  peptide (1)..(224): Ceres Seq. ID no. 12420915
  misc_feature (88)..(215): Pfam Name: Proliferating cell nuclear antigen, C-terminal domain Pfam Description: Proliferating cell nuclear antigen, C-terminal
  misc_feature (1)..(221): Homolog of NCBI NO: 100160 NR Description: proliferating cell nuclear antigen (clone 4.10) -
  misc_feature (1)..(224): Homolog of NCBI NO: 25005275 NR Description: proliferating cell nuclear antigen [Lycopersicon
  misc_feature (1)..(221): Homolog of NCBI NO: 129692 NR Description: PROLIFERATING CELL NUCLEAR ANTIGEN (PCNA) (CYCLIN)
  misc_feature (1)..(224): Homolog of NCBI NO: 3947727 NR Description: proliferating cell nuclear antigen [Nicotiana
  misc_feature (1)..(224): Homolog of NCBI NO: 10946427 NR Description: proliferating cell nuclear antigen [Nicotiana
  misc_feature (1)..(224): Homolog of NCBI NO: 6225836 NR Description: Proliferating cell nuclear antigen (PCNA)
  misc_feature (1)..(221): Homolog of NCBI NO: 2499441 NR Description: PROLIFERATING CELL NUCLEAR ANTIGEN (PCNA)
  misc_feature (1)..(224): Homolog of NCBI NO: 15227564 NR Description: putative proliferating cell nuclear antigen, PCNA
  misc_feature (1)..(224): Homolog of NCBI NO: 7207994 NR Description: proliferating cellular nuclear antigen
  misc_feature (1)..(224): Homolog of NCBI NO: 15222379 NR Description: proliferating cellular nuclear antigen
MDSSHVALVSLLLRSEGFEHYRCDRNLSMGMNLGNMSKMLKCAGNDDIITIKADDGGDTVTFMFESPTQDKIADFEMKLMDIDSEHLGIPDAEYHSIVRMPSNEFSRICKDLSSIGDTVVISVTKEGVKFSTAGDIGTANIVLRQNTTVDKPEDAIVIEMKEPVSLSFALRYMNSFTKATPLSDTVTISLSSELPVVVEYKVAEMGYIRYYLAPKIEEEEDTNP

SEQ ID NO: 21088 - protein, 196 aa, Arabidopsis thaliana
  peptide (1)..(196): Ceres Seq. ID no. 12420916
  misc_feature (60)..(187): Pfam Name: Proliferating cell nuclear antigen, C-terminal domain Pfam Description: Proliferating cell nuclear antigen, C-terminal
  misc_feature (1)..(193): Homolog of NCBI NO: 100160 NR Description: proliferating cell nuclear antigen (clone 4.10) -
  misc_feature (1)..(196): Homolog of NCBI NO: 25005275 NR Description: proliferating cell nuclear antigen [Lycopersicon
  misc_feature (1)..(193): Homolog of NCBI NO: 129692 NR Description: PROLIFERATING CELL NUCLEAR ANTIGEN (PCNA) (CYCLIN)
  misc_feature (1)..(196): Homolog of NCBI NO: 3947727 NR Description: proliferating cell nuclear antigen [Nicotiana
  misc_feature (1)..(196): Homolog of NCBI NO: 10946427 NR Description: proliferating cell nuclear antigen [Nicotiana
  misc_feature (1)..(196): Homolog of NCBI NO: 6225836 NR Description: Proliferating cell nuclear antigen (PCNA)
  misc_feature (1)..(193): Homolog of NCBI NO: 2499441 NR Description: PROLIFERATING CELL NUCLEAR ANTIGEN (PCNA)
  misc_feature (1)..(196): Homolog of NCBI NO: 15227564 NR Description: putative proliferating cell nuclear antigen, PCNA
  misc_feature (1)..(196): Homolog of NCBI NO: 7207994 NR Description: proliferating cellular nuclear antigen
  misc_feature (1)..(196): Homolog of NCBI NO: 15222379 NR Description: proliferating cellular nuclear antigen
MGMNLGNMSKMLKCAGNDDIITIKADDGGDTVTFMFESPTQDKIADFEMKLMDIDSEHLGIPDAEYHSIVRMPSNEFSRICKDLSSIGDTVVISVTKEGVKFSTAGDIGTANIVLRQNTTVDKPEDAIVIEMKEPVSLSFALRYMNSFTKATPLSDTVTISLSSELPVVVEYKVAEMGYIRYYLAPKIEEEEDTNP

SEQ ID NO: 21089 - DNA, 2347 bp, Arabidopsis thaliana
  misc_feature (1)..(2347): Ceres Seq. ID no. 12674675
  misc_feature: MA Experiment ID: 108461 Result: Up-regulated in Transcription
  misc_feature: MA Experiment 108461 PARAMETER Experiment Name: At_Germinating_Seeds_cDNA_P Parameter: Age (day) Value: 1 vs. 0
  misc_feature: MA Experiment 108461 PARAMETER Experiment Name: At_Germinating_Seeds_cDNA_P Parameter: Tissue Value: Germinating Seeds
  misc_feature: MA Experiment ID: 108462 Result: Up-regulated in Transcription
  misc_feature: MA Experiment 108462 PARAMETER Experiment Name: At_Germinating_Seeds_cDNA_P Parameter: Age (day) Value: 2 vs. 0
  misc_feature: MA Experiment 108462 PARAMETER Experiment Name: At_Germinating_Seeds_cDNA_P Parameter: Tissue Value: Germinating Seeds
  misc_feature: MA Experiment ID: 108463 Result: Up-regulated in Transcription
  misc_feature: MA Experiment 108463 PARAMETER Experiment Name: At_Germinating_Seeds_cDNA_P Parameter: Age (day) Value: 3 vs. 0
  misc_feature: MA Experiment 108463 PARAMETER Experiment Name: At_Germinating_Seeds_cDNA_P Parameter: Tissue Value: Germinating Seeds
  misc_feature: MA Experiment ID: 108464 Result: Up-regulated in Transcription
  misc_feature: MA Experiment 108464 PARAMETER Experiment Name: At_Germinating_Seeds_cDNA_P Parameter: Age (day) Value: 4 vs. 0
  misc_feature: MA Experiment 108464 PARAMETER Experiment Name: At_Germinating_Seeds_cDNA_P Parameter: Tissue Value: Germinating Seeds
  misc_feature: MA Experiment ID: 108469 Result: Up-regulated in Transcription
  misc_feature: MA Experiment ID: 108501 Result: Up-regulated in Transcription
  misc_feature: MA Experiment 108501 PARAMETER Experiment Name: At_ap2_floral_buds_cDNA_P Parameter: Plant Line Value: ap2 (Ler.)
  misc_feature: MA Experiment 108501 PARAMETER Experiment Name: At_ap2_floral_buds_cDNA_P Parameter: Tissue Value: Closed Flower
  misc_feature: MA Experiment ID: 108569 Result: Up-regulated in Transcription
  misc_feature: MA Experiment 108569 PARAMETER Experiment Name: At_0.001%_MeJA__cDNA_P Parameter: Timepoint (hr) Value: 6
  misc_feature: MA Experiment 108569 PARAMETER Experiment Name: At_0.001%_MeJA__cDNA_P Parameter: Tissue Value: Aerial
  misc_feature: MA Experiment 108569 PARAMETER Experiment Name: At_0.001%_MeJA__cDNA_P Parameter: Treatment Value: 0.001% MeJA vs. No Treatment
  misc_feature: MA Experiment ID: 108573 Result: Up-regulated in Transcription
  misc_feature: MA Experiment 108573 PARAMETER Experiment Name: At_Drought_cDNA_P Parameter: Timepoint (hr) Value: 6
  misc_feature: MA Experiment 108573 PARAMETER Experiment Name: At_Drought_cDNA_P Parameter: Tissue Value: Aerial
  misc_feature: MA Experiment 108573 PARAMETER Experiment Name: At_Drought_cDNA_P Parameter: Treatment Value: Drought vs. No Drought
  misc_feature: MA Experiment ID: 108579 Result: Up-regulated in Transcription
  misc_feature: MA Experiment 108579 PARAMETER Experiment Name: At_4deg_Cold_cDNA_P Parameter: Temperature (deg C) Value: 4 vs. 22
  misc_feature: MA Experiment 108579 PARAMETER Experiment Name: At_4deg_Cold_cDNA_P Parameter: Timepoint (hr) Value: 6
  misc_feature: MA Experiment 108579 PARAMETER Experiment Name: At_4deg_Cold_cDNA_P Parameter: Tissue Value: Aerial
  misc_feature: MA Experiment ID: 108585 Result: Up-regulated in Transcription
  misc_feature: MA Experiment 108585 PARAMETER Experiment Name: At_5mM_NaNP_cDNA_P Parameter: Timepoint (hr) Value: 6
  misc_feature: MA Experiment 108585 PARAMETER Experiment Name: At_5mM_NaNP_cDNA_P Parameter: Tissue Value: Aerial
  misc_feature: MA Experiment 108585 PARAMETER Experiment Name: At_5mM_NaNP_cDNA_P Parameter: Treatment Value: null
  misc_feature: MA Experiment ID: 108594 Result: Down-regulated in Transcription
  misc_feature: MA Experiment 108594 PARAMETER Experiment Name: At_Ler-rhl_Root_cDNA_P Parameter: Plant Line Value: null
  misc_feature: MA Experiment ID: 108595 Result: Down-regulated in Transcription
  misc_feature: MA Experiment 108595 PARAMETER Experiment Name: At_Ler-pi_Ovule_cDNA_P Parameter: Plant Line Value: null
  misc_feature: MA Experiment ID: 108668 Result: Up-regulated in Transcription
  misc_feature: MA Experiment 108668 PARAMETER Experiment Name: At_2mM_SA_cDNA_P Parameter: Plant Line Value: WS
  misc_feature: MA Experiment 108668 PARAMETER Experiment Name: At_2mM_SA_cDNA_P Parameter: Timepoint (hr) Value: 6
  misc_feature: MA Experiment 108668 PARAMETER Experiment Name: At_2mM_SA_cDNA_P Parameter: Treatment Value: 2mM SA vs. No Treatment
  misc_feature: MA Experiment ID: 20000069 Result: Down-regulated in Transcription
  misc_feature: MA Experiment 20000069 PARAMETER Experiment Name: At_100uM_ABA_Mutants_cDNA_P Parameter: Plant Line Value: CS23
  misc_feature: MA Experiment 20000069 PARAMETER Experiment Name: At_100uM_ABA_Mutants_cDNA_P Parameter: Timepoint (hr) Value: 6
  misc_feature: MA Experiment 20000069 PARAMETER Experiment Name: At_100uM_ABA_Mutants_cDNA_P Parameter: Tissue Value: Aerial
  misc_feature: MA Experiment 20000069 PARAMETER Experiment Name: At_100uM_ABA_Mutants_cDNA_P Parameter: Treatment Value: 100uM ABA vs. No Treatment
  misc_feature: MA Experiment ID: 20000087 Result: Down-regulated in Transcription
  misc_feature: MA Experiment 20000087 PARAMETER Experiment Name: At_100uM_ABA_Mutants_cDNA_P Parameter: Plant Line Value: WS
  misc_feature: MA Experiment 20000087 PARAMETER Experiment Name: At_100uM_ABA_Mutants_cDNA_P Parameter: Timepoint (hr) Value: 6
  misc_feature: MA Experiment 20000087 PARAMETER Experiment Name: At_100uM_ABA_Mutants_cDNA_P Parameter: Tissue Value: Aerial
  misc_feature: MA Experiment 20000087 PARAMETER Experiment Name: At_100uM_ABA_Mutants_cDNA_P Parameter: Treatment Value: 100uM ABA vs. No Treatment
  misc_feature: MA Experiment ID: 20000089 Result: Down-regulated in Transcription
  misc_feature: MA Experiment ID: 20000117 Result: Down-regulated in Transcription
  misc_feature: MA Experiment 20000117 PARAMETER Experiment Name: At_100uM_ABA_Mutants_cDNA_P Parameter: Plant Line Value: Columbia
  misc_feature: MA Experiment 20000117 PARAMETER Experiment Name: At_100uM_ABA_Mutants_cDNA_P Parameter: Timepoint (hr) Value: 6
  misc_feature: MA Experiment 20000117 PARAMETER Experiment Name: At_100uM_ABA_Mutants_cDNA_P Parameter: Tissue Value: Aerial
  misc_feature: MA Experiment 20000117 PARAMETER Experiment Name: At_100uM_ABA_Mutants_cDNA_P Parameter: Treatment Value: 100uM ABA vs. No Treatment
  misc_feature: MA Experiment ID: 20000180 Result: Up-regulated in Transcription
  misc_feature: MA Experiment 20000180 PARAMETER Experiment Name: At_Germinating_Seeds_P Parameter: Age (hr) Value: 24 vs. 0
  misc_feature: MA Experiment 20000180 PARAMETER Experiment Name: At_Germinating_Seeds_P Parameter: Tissue Value: Germinating Seeds
  misc_feature: MA Experiment ID: 20000182 Result: Up-regulated in Transcription
  misc_feature: MA Experiment 20000182 PARAMETER Experiment Name: At_2mM_SA_P Parameter: Age (day) Value: 14
  misc_feature: MA Experiment 20000182 PARAMETER Experiment Name: At_2mM_SA_P Parameter: Organism Value: A. thaliana
  misc_feature: MA Experiment 20000182 PARAMETER Experiment Name: At_2mM_SA_P Parameter: Plant Line Value: WS
  misc_feature: MA Experiment 20000182 PARAMETER Experiment Name: At_2mM_SA_P Parameter: Timepoint (hr) Value: 6
  misc_feature: MA Experiment 20000182 PARAMETER Experiment Name: At_2mM_SA_P Parameter: Tissue Value: Aerial
  misc_feature: MA Experiment 20000182 PARAMETER Experiment Name: At_2mM_SA_P Parameter: Treatment Value: 2mM SA vs. No Treatment
  misc_feature: MA Experiment ID: 20000265 Result: Up-regulated in Transcription
  misc_feature: MA Experiment 20000265 PARAMETER Experiment Name: At_Open_Flower_P Parameter: Age (day) Value: 21
  misc_feature: MA Experiment 20000265 PARAMETER Experiment Name: At_Open_Flower_P Parameter: Plant Line Value: WS
  misc_feature: MA Experiment 20000265 PARAMETER Experiment Name: At_Open_Flower_P Parameter: Tissue Value: Closed Flower vs. Whole Plant
  misc_feature: MA Experiment ID: 20000286 Result: Up-regulated in Transcription
  misc_feature: MA Experiment 20000286 PARAMETER Experiment Name: At_Open_Flower_P Parameter: Age (day) Value: 21
  misc_feature: MA Experiment 20000286 PARAMETER Experiment Name: At_Open_Flower_P Parameter: Plant Line Value: WS
  misc_feature: MA Experiment 20000286 PARAMETER Experiment Name: At_Open_Flower_P Parameter: Tissue Value: Half Open vs. Whole Plant
  misc_feature: MA Experiment ID: 20000445 Result: Up-regulated in Transcription
  misc_feature: MA Experiment 20000445 PARAMETER Experiment Name: At_100uM_NAA__P Parameter: Age (day) Value: 14
  misc_feature: MA Experiment 20000445 PARAMETER Experiment Name: At_100uM_NAA__P Parameter: Organism Value: A. thaliana
  misc_feature: MA Experiment 20000445 PARAMETER Experiment Name: At_100uM_NAA__P Parameter: Plant Line Value: WS
  misc_feature: MA Experiment 20000445 PARAMETER Experiment Name: At_100uM_NAA__P Parameter: Timepoint (hr) Value: 6
  misc_feature: MA Experiment 20000445 PARAMETER Experiment Name: At_100uM_NAA__P Parameter: Tissue Value: Aerial
  misc_feature: MA Experiment 20000445 PARAMETER Experiment Name: At_100uM_NAA__P Parameter: Treatment Value: 100uM NAA vs. No Treatment
  misc_feature: MA Experiment ID: 20000455 Result: Up-regulated in Transcription
  misc_feature: MA Experiment 20000455 PARAMETER Experiment Name: At_100uM_ABA_P Parameter: Age (day) Value: 16
  misc_feature: MA Experiment 20000455 PARAMETER Experiment Name: At_100uM_ABA_P Parameter: Organism Value: A. thaliana
  misc_feature: MA Experiment 20000455 PARAMETER Experiment Name: At_100uM_ABA_P Parameter: Plant Line Value: WS
  misc_feature: MA Experiment 20000455 PARAMETER Experiment Name: At_100uM_ABA_P Parameter: Timepoint (hr) Value: 48
  misc_feature: MA Experiment 20000455 PARAMETER Experiment Name: At_100uM_ABA_P Parameter: Tissue Value: Aerial
  misc_feature: MA Experiment 20000455 PARAMETER Experiment Name: At_100uM_ABA_P Parameter: Treatment Value: 100uM ABA vs. No Treatment
  misc_feature: MA Experiment ID: 20000495 Result: Down-regulated in Transcription
  misc_feature: MA Experiment 20000495 PARAMETER Experiment Name: At_Guard_Cells_P Parameter: Harvest Date Value: 8/2/2002
  misc_feature: MA Experiment 20000495 PARAMETER Experiment Name: At_Guard_Cells_P Parameter: Organism Value: A. thaliana
  misc_feature: MA Experiment 20000495 PARAMETER Experiment Name: At_Guard_Cells_P Parameter: Tissue Value: Guard Cells vs. Leaves
  misc_feature: MA Experiment ID: 20000496 Result: Down-regulated in Transcription
  misc_feature: MA Experiment 20000496 PARAMETER Experiment Name: At_Guard_Cells_P Parameter: Harvest Date Value: 7/19/2002
  misc_feature: MA Experiment 20000496 PARAMETER Experiment Name: At_Guard_Cells_P Parameter: Organism Value: Canola
  misc_feature: MA Experiment 20000496 PARAMETER Experiment Name: At_Guard_Cells_P Parameter: Tissue Value: Guard Cells vs. Leaves
  misc_feature: MA Experiment ID: 20000527 Result: Down-regulated in Transcription
  misc_feature: MA Experiment 20000527 PARAMETER Experiment Name: At_10percent_PEG_P Parameter: Age (day) Value: 20
  misc_feature: MA Experiment 20000527 PARAMETER Experiment Name: At_10percent_PEG_P Parameter: Organism Value: A. thaliana
  misc_feature: MA Experiment 20000527 PARAMETER Experiment Name: At_10percent_PEG_P Parameter: Plant Line Value: WS
  misc_feature: MA Experiment 20000527 PARAMETER Experiment Name: At_10percent_PEG_P Parameter: Timepoint (day) Value: 20
  misc_feature: MA Experiment 20000527 PARAMETER Experiment Name: At_10percent_PEG_P Parameter: Tissue Value: Whole Plant
  misc_feature: MA Experiment 20000527 PARAMETER Experiment Name: At_10percent_PEG_P Parameter: Treatment Value: 10percent PEG vs. No Treatment
  misc_feature: MA Experiment ID: 20000794 Result: Down-regulated in Transcription
  misc_feature: MA Experiment 20000794 PARAMETER Experiment Name: At_Petals_P Parameter: Age (day) Value: 23-25 days
  misc_feature: MA Experiment 20000794 PARAMETER Experiment Name: At_Petals_P Parameter: Plant Line Value: WS
  misc_feature: MA Experiment 20000794 PARAMETER Experiment Name: At_Petals_P Parameter: Tissue Value: Petals vs. Whole plant
  misc_feature: MA Experiment ID: 20001451 Result: Down-regulated in Transcription
  misc_feature: MA Experiment 20001451 PARAMETER Experiment Name: At_Far-red-induction_P Parameter: Age (day) Value: 7
  misc_feature: MA Experiment 20001451 PARAMETER Experiment Name: At_Far-red-induction_P Parameter: Light Value: Far-red vs. White
  misc_feature: MA Experiment 20001451 PARAMETER Experiment Name: At_Far-red-induction_P Parameter: Organism Value: A. thaliana
  misc_feature: MA Experiment 20001451 PARAMETER Experiment Name: At_Far-red-induction_P Parameter: Plant Line Value: Columbia
  misc_feature: MA Experiment 20001451 PARAMETER Experiment Name: At_Far-red-induction_P Parameter: Timepoint (hr) Value: 24
  misc_feature: MA Experiment 20001451 PARAMETER Experiment Name: At_Far-red-induction_P Parameter: Tissue Value: Whole Plant
  misc_feature: MA Experiment ID: 20001557 Result: Up-regulated in Transcription
  misc_feature: MA Experiment 20001557 PARAMETER Experiment Name: At_Drought_Soil_Dry_P Parameter: Age (day) Value: 27
  misc_feature: MA Experiment 20001557 PARAMETER Experiment Name: At_Drought_Soil_Dry_P Parameter: Organism Value: A. thaliana
  misc_feature: MA Experiment 20001557 PARAMETER Experiment Name: At_Drought_Soil_Dry_P Parameter: Plant Line Value: WS
  misc_feature: MA Experiment 20001557 PARAMETER Experiment Name: At_Drought_Soil_Dry_P Parameter: Post Timepoint (hr) Value: 3
  misc_feature: MA Experiment 20001557 PARAMETER Experiment Name: At_Drought_Soil_Dry_P Parameter: Post-Treatment Value: Re-Water vs. No Drought
  misc_feature: MA Experiment 20001557 PARAMETER Experiment Name: At_Drought_Soil_Dry_P Parameter: Timepoint (day) Value: 13
  misc_feature: MA Experiment 20001557 PARAMETER Experiment Name: At_Drought_Soil_Dry_P Parameter: Treatment Value: Drought vs. No Drought
  misc_feature: MA Experiment ID: 20001560 Result: Down-regulated in Transcription
  misc_feature: MA Experiment 20001560 PARAMETER Experiment Name: At_Drought_Soil_Dry_P Parameter: Age (day) Value: 28
  misc_feature: MA Experiment 20001560 PARAMETER Experiment Name: At_Drought_Soil_Dry_P Parameter: Organism Value: A. thaliana
  misc_feature: MA Experiment 20001560 PARAMETER Experiment Name: At_Drought_Soil_Dry_P Parameter: Plant Line Value: WS
  misc_feature: MA Experiment 20001560 PARAMETER Experiment Name: At_Drought_Soil_Dry_P Parameter: Post Timepoint (hr) Value: None
  misc_feature: MA Experiment 20001560 PARAMETER Experiment Name: At_Drought_Soil_Dry_P Parameter: Post-Treatment Value: None
  misc_feature: MA Experiment 20001560 PARAMETER Experiment Name: At_Drought_Soil_Dry_P Parameter: Timepoint (day) Value: 14
  misc_feature: MA Experiment 20001560 PARAMETER Experiment Name: At_Drought_Soil_Dry_P Parameter: Treatment Value: Drought vs. No Drought
gacgaacgagaagactcttttttgaattttgattcttcttcttctccgtttctttcgctacttcctcagcttcgtcaccgtcgaaaattcttcacgttttcctcggaattttccaattgtcttctccaattctcttgcgatcgttgaagatctgaaaaattcgaagcgtttgatcatggcttcgtacactcccaagaacattctcatcaccggagctgctggtttcattgcgtctcatgtcgccaacagactcatacgaagctatcctgattacaaaatcgttgtgcttgacaagcttgattactgttcaaatctcaagaatctcaatccttctaagcactctccgaacttcaagtttgtcaaaggtgatatcgctagtgctgacttggtgaatcatcttctcatcactgaaggtattgacaccatcatgcatttcgctgctcagactcacgtcgacaattccttcggtaacagtttcgagtttactaagaataatatctatggaactcatgtccttcttgaggcttgtaaagttactggtcagattaggaggtttattcatgttagtactgatgaagtttatggtgaaactgatgaggatgctcttgttggtaaccatgaggcttctcagctgcttccgacgaatccttactctgccacgaaagctggtgctgagatgcttgttatggcttatggtagatcttatggtttgcctgttattaccactcgtgggaataacgtctatggaccgaatcagtttcctgagaagttgattcctaagttcattttgctggcaatgagagggcaggttcttcccattcatggagatggatcaaatgtcaggagctacctctactgtgaagacgttgctgaggcttttgaagttgttcttcacaagggagaagttggccatgtttacaatattgggacgaagaaggagaggagagtgaatgatgttgccaaagacatctgcaaactcttcaacatggaccctgaggcgaacatcaagtttgtcgacaacagaccttttaacgatcagaggtacttccttgacgatcagaagctcaaaaagttgggatggtcagagagaaccacgtgggaagaagggttgaagaaaactatggattggtacacacagaacccggagtggtggggtgatgtttctggagcattgcttcctcatccaaggatgctgatgatgcctggtgggcgacactttgatggctccgaggacaattcgctggcagctactttatctgaaaaaccaagtcaaacccatatggttgttccaagccaaaggagcaacggcacacctcaaaagccttcgctgaagttcctgatatatggaaagaccggatggatcggtggtctgcttggaaagatatgtgataagcaaggaattgcttacgagtatgggaaaggtcggttggaggatcgatcttctcttctgcaggatattcagagtgttaagccaacccatgttttcaattccgctggtgtgactgggagacccaatgttgactggtgtgagtctcacaagaccgagactatccgtgccaatgtagctggcacattgactctagctgatgtctgcagagagcacggactcctaatgatgaatttcgctactggttgtatattcgaatatgacgacaagcatccggaaggttcaggaattggcttcaaggaggaagacacacccaacttcactggctctttctactcgaaaaccaaagccatggtcgaggagctgctaaaggagtatgacaacgtatgcacattgagggtaaggatgccgatctcctcggatctaaacaacccgcgcaacttcatcaccaagatctccaggtacaacaaagtagtgaacatcccaaacagcatgactgtgttggacgagttattaccaatctccatcgagatggcgaaaagaaacttgaaaggaatctggaacttcacaaacccaggtgtggtgagccacaacgagatcctagagatgtacagagactacatcaaccctgaattcaaatgggcaaacttcacattagaggagcaagctaaagtcattgtggctccaagaagcaacaacgagatggatgcttccaagctcaagaaagagttccctgagctactctctatcaaggagtctctgattaagtatgcatacgggccaaacaagaaaacctgaagagaatgattgtgattcgtcattagataatcacctttaatatcagtttcgtgtattttgttttgttattgtttaattaccccttctttcattagatttgcttaaggggtgtatttgtagttcgaatattatatgtaataagagcttgttctcatttgtgtc

SEQ ID NO: 21090 - protein, 669 aa, Arabidopsis thaliana
  peptide (1)..(669): Ceres Seq. ID no. 12674676
  misc_feature (9)..(323): Pfam Name: NAD dependent epimerase/dehydratase family Pfam Description: NAD dependent epimerase/dehydratase family
  misc_feature (389)..(661): Homolog of NCBI NO: 39595079 NR Description: Hypothetical protein CBG03656 [Caenorhabditis
  misc_feature (3)..(316): Homolog of NCBI NO: 39595079 NR Description: Hypothetical protein CBG03656 [Caenorhabditis
  misc_feature (389)..(661): Homolog of NCBI NO: 17531421 NR Description: 4 6-dehydratase (71.1 kD) [Caenorhabditis
  misc_feature (4)..(316): Homolog of NCBI NO: 17531421 NR Description: 4 6-dehydratase (71.1 kD) [Caenorhabditis
  misc_feature (402)..(669): Homolog of NCBI NO: 2982303 NR Description: hypothetical protein [Picea mariana]
  misc_feature (376)..(669): Homolog of NCBI NO: 14423536 NR Description: Unknown protein [Arabidopsis thaliana]
  misc_feature (376)..(669): Homolog of NCBI NO: 21593701 NR Description: unknown [Arabidopsis thaliana]
  misc_feature (376)..(669): Homolog of NCBI NO: 18407710 NR Description: expressed protein
  misc_feature (168)..(669): Homolog of NCBI NO: 15081769 NR Description: At1g53500/F22G10_13 [Arabidopsis thaliana]
  misc_feature (168)..(669): Homolog of NCBI NO: 18404494 NR Description: dTDP-D-glucose 4,6-dehydratase, putative
MASYTPKNILITGAAGFIASHVANRLIRSYPDYKIVVLDKLDYCSNLKNLNPSKHSPNFKFVKGDIASADLVNHLLITEGIDTIMHFAAQTHVDNSFGNSFEFTKNNIYGTHVLLEACKVTGQIRRFIHVSTDEVYGETDEDALVGNHEASQLLPTNPYSATKAGAEMLVMAYGRSYGLPVITTRGNNVYGPNQFPEKLIPKFILLAMRGQVLPIHGDGSNVRSYLYCEDVAEAFEVVLHKGEVGHVYNIGTKKERRVNDVAKDICKLFNMDPEANIKFVDNRPFNDQRYFLDDQKLKKLGWSERTTWEEGLKKTMDWYTQNPEWWGDVSGALLPHPRMLMMPGGRHFDGSEDNSLAATLSEKPSQTHMVVPSQRSNGTPQKPSLKFLIYGKTGWIGGLLGKICDKQGIAYEYGKGRLEDRSSLLQDIQSVKPTHVFNSAGVTGRPNVDWCESHKTETIRANVAGTLTLADVCREHGLLMMNFATGCIFEYDDKHPEGSGIGFKEEDTPNFTGSFYSKTKAMVEELLKEYDNVCTLRVRMPISSDLNNPRNFITKISRYNKVVNIPNSMTVLDELLPISIEMAKRNLKGIWNFTNPGVVSHNEILEMYRDYINPEFKWANFTLEEQAKVIVAPRSNNEMDASKLKKEFPELLSIKESLIKYAYGPNKKT

SEQ ID NO: 21091 - protein, 585 aa, Arabidopsis thaliana
  peptide (1)..(585): Ceres Seq. ID no. 12674677
  misc_feature (1)..(239): Pfam Name: NAD dependent epimerase/dehydratase family Pfam Description: NAD dependent epimerase/dehydratase family
  misc_feature (305)..(577): Homolog of NCBI NO: 39595079 NR Description: Hypothetical protein CBG03656 [Caenorhabditis
  misc_feature (1)..(232): Homolog of NCBI NO: 39595079 NR Description: Hypothetical protein CBG03656 [Caenorhabditis
  misc_feature (305)..(577): Homolog of NCBI NO: 17531421 NR Description: 4 6-dehydratase (71.1 kD) [Caenorhabditis
  misc_feature (1)..(232): Homolog of NCBI NO: 17531421 NR Description: 4 6-dehydratase (71.1 kD) [Caenorhabditis
  misc_feature (318)..(585): Homolog of NCBI NO: 2982303 NR Description: hypothetical protein [Picea mariana]
  misc_feature (292)..(585): Homolog of NCBI NO: 14423536 NR Description: Unknown protein [Arabidopsis thaliana]
  misc_feature (292)..(585): Homolog of NCBI NO: 21593701 NR Description: unknown [Arabidopsis thaliana]
  misc_feature (292)..(585): Homolog of NCBI NO: 18407710 NR Description: expressed protein
  misc_feature (84)..(585): Homolog of NCBI NO: 15081769 NR Description: At1g53500/F22G10_13 [Arabidopsis thaliana]
  misc_feature (84)..(585): Homolog of NCBI NO: 18404494 NR Description: dTDP-D-glucose 4,6-dehydratase, putative
MHFAAQTHVDNSFGNSFEFTKNNIYGTHVLLEACKVTGQIRRFIHVSTDEVYGETDEDALVGNHEASQLLPTNPYSATKAGAEMLVMAYGRSYGLPVITTRGNNVYGPNQFPEKLIPKFILLAMRGQVLPIHGDGSNVRSYLYCEDVAEAFEVVLHKGEVGHVYNIGTKKERRVNDVAKDICKLFNMDPEANIKFVDNRPFNDQRYFLDDQKLKKLGWSERTTWEEGLKKTMDWYTQNPEWWGDVSGALLPHPRMLMMPGGRHFDGSEDNSLAATLSEKPSQTHMVVPSQRSNGTPQKPSLKFLIYGKTGWIGGLLGKICDKQGIAYEYGKGRLEDRSSLLQDIQSVKPTHVFNSAGVTGRPNVDWCESHKTETIRANVAGTLTLADVCREHGLLMMNFATGCIFEYDDKHPEGSGIGFKEEDTPNFTGSFYSKTKAMVEELLKEYDNVCTLRVRMPISSDLNNPRNFITKISRYNKVVNIPNSMTVLDELLPISIEMAKRNLKGIWNFTNPGVVSHNEILEMYRDYINPEFKWANFTLEEQAKVIVAPRSNNEMDASKLKKEFPELLSIKESLIKYAYGPNKKT

SEQ ID NO: 21092 - protein, 502 aa, Arabidopsis thaliana
  peptide (1)..(502): Ceres Seq. ID no. 12674678
  misc_feature (1)..(156): Pfam Name: NAD dependent epimerase/dehydratase family Pfam Description: NAD dependent epimerase/dehydratase family
  misc_feature (222)..(494): Homolog of NCBI NO: 39595079 NR Description: Hypothetical protein CBG03656 [Caenorhabditis
  misc_feature (1)..(149): Homolog of NCBI NO: 39595079 NR Description: Hypothetical protein CBG03656 [Caenorhabditis
  misc_feature (222)..(494): Homolog of NCBI NO: 17531421 NR Description: 4 6-dehydratase (71.1 kD) [Caenorhabditis
  misc_feature (1)..(149): Homolog of NCBI NO: 17531421 NR Description: 4 6-dehydratase (71.1 kD) [Caenorhabditis
  misc_feature (235)..(502): Homolog of NCBI NO: 2982303 NR Description: hypothetical protein [Picea mariana]
  misc_feature (209)..(502): Homolog of NCBI NO: 14423536 NR Description: Unknown protein [Arabidopsis thaliana]
  misc_feature (209)..(502): Homolog of NCBI NO: 21593701 NR Description: unknown [Arabidopsis thaliana]
  misc_feature (209)..(502): Homolog of NCBI NO: 18407710 NR Description: expressed protein
  misc_feature (1)..(502): Homolog of NCBI NO: 15081769 NR Description: At1g53500/F22G10_13 [Arabidopsis thaliana]
  misc_feature (1)..(502): Homolog of NCBI NO: 18404494 NR Description: dTDP-D-glucose 4,6-dehydratase, putative
MLVMAYGRSYGLPVITTRGNNVYGPNQFPEKLIPKFILLAMRGQVLPIHGDGSNVRSYLYCEDVAEAFEVVLHKGEVGHVYNIGTKKERRVNDVAKDICKLFNMDPEANIKFVDNRPFNDQRYFLDDQKLKKLGWSERTTWEEGLKKTMDWYTQNPEWWGDVSGALLPHPRMLMMPGGRHFDGSEDNSLAATLSEKPSQTHMVVPSQRSNGTPQKPSLKFLIYGKTGWIGGLLGKICDKQGIAYEYGKGRLEDRSSLLQDIQSVKPTHVFNSAGVTGRPNVDWCESHKTETIRANVAGTLTLADVCREHGLLMMNFATGCIFEYDDKHPEGSGIGFKEEDTPNFTGSFYSKTKAMVEELLKEYDNVCTLRVRMPISSDLNNPRNFITKISRYNKVVNIPNSMTVLDELLPISIEMAKRNLKGIWNFTNPGVVSHNEILEMYRDYINPEFKWANFTLEEQAKVIVAPRSNNEMDASKLKKEFPELLSIKESLIKYAYGPNKKT

SEQ ID NO: 21093 - DNA, 816 bp, Arabidopsis thaliana
  misc_feature (1)..(816): Ceres Seq. ID no. 13499732
  misc_feature: MA Experiment ID: 108434 Result: Up-regulated in Transcription
  misc_feature: MA Experiment 108434 PARAMETER Experiment Name: At_Root_Tips_cDNA_P Parameter: Tissue Value: Root Tips
  misc_feature: MA Experiment ID: 108435 Result: Up-regulated in Transcription
  misc_feature: MA Experiment 108435 PARAMETER Experiment Name: At_stm_Mutants_cDNA_P Parameter: Plant Line Value: wt Landsburg vs stm
  misc_feature: MA Experiment 108435 PARAMETER Experiment Name: At_stm_Mutants_cDNA_P Parameter: Tissue Value: Shoot Apical Meristem Region
  misc_feature: MA Experiment ID: 108462 Result: Up-regulated in Transcription
  misc_feature: MA Experiment 108462 PARAMETER Experiment Name: At_Germinating_Seeds_cDNA_P Parameter: Age (day) Value: 2 vs. 0
  misc_feature: MA Experiment 108462 PARAMETER Experiment Name: At_Germinating_Seeds_cDNA_P Parameter: Tissue Value: Germinating Seeds
  misc_feature: MA Experiment ID: 108469 Result: Up-regulated in Transcription
  misc_feature: MA Experiment ID: 108488 Result: Down-regulated in Transcription
  misc_feature: MA Experiment ID: 108561 Result: Up-regulated in Transcription
  misc_feature: MA Experiment 108561 PARAMETER Experiment Name: At_100uM_ABA_cDNA_P Parameter: Timepoint (hr) Value: 6
  misc_feature: MA Experiment 108561 PARAMETER Experiment Name: At_100uM_ABA_cDNA_P Parameter: Tissue Value: Aerial
  misc_feature: MA Experiment 108561 PARAMETER Experiment Name: At_100uM_ABA_cDNA_P Parameter: Treatment Value: 100uM ABA vs. No Treatment
  misc_feature: MA Experiment ID: 108572 Result: Up-regulated in Transcription
  misc_feature: MA Experiment 108572 PARAMETER Experiment Name: At_Drought_cDNA_P Parameter: Timepoint (hr) Value: 1
  misc_feature: MA Experiment 108572 PARAMETER Experiment Name: At_Drought_cDNA_P Parameter: Tissue Value: Aerial
  misc_feature: MA Experiment 108572 PARAMETER Experiment Name: At_Drought_cDNA_P Parameter: Treatment Value: Drought vs. No Drought
  misc_feature: MA Experiment ID: 108573 Result: Up-regulated in Transcription
  misc_feature: MA Experiment 108573 PARAMETER Experiment Name: At_Drought_cDNA_P Parameter: Timepoint (hr) Value: 6
  misc_feature: MA Experiment 108573 PARAMETER Experiment Name: At_Drought_cDNA_P Parameter: Tissue Value: Aerial
  misc_feature: MA Experiment 108573 PARAMETER Experiment Name: At_Drought_cDNA_P Parameter: Treatment Value: Drought vs. No Drought
  misc_feature: MA Experiment ID: 108574 Result: Up-regulated in Transcription
  misc_feature: MA Experiment 108574 PARAMETER Experiment Name: At_Wounding__cDNA_P Parameter: Timepoint (hr) Value: 1
  misc_feature: MA Experiment 108574 PARAMETER Experiment Name: At_Wounding__cDNA_P Parameter: Tissue Value: Aerial
  misc_feature: MA Experiment 108574 PARAMETER Experiment Name: At_Wounding__cDNA_P Parameter: Treatment Value: Wounding vs. No Wounding
  misc_feature: MA Experiment ID: 108576 Result: Up-regulated in Transcription
  misc_feature: MA Experiment 108576 PARAMETER Experiment Name: At_42deg_Heat_cDNA_P Parameter: Temperature (deg C) Value: 42 vs. 22
  misc_feature: MA Experiment 108576 PARAMETER Experiment Name: At_42deg_Heat_cDNA_P Parameter: Timepoint (hr) Value: 1
  misc_feature: MA Experiment 108576 PARAMETER Experiment Name: At_42deg_Heat_cDNA_P Parameter: Tissue Value: Aerial
  misc_feature: MA Experiment ID: 108585 Result: Up-regulated in Transcription
  misc_feature: MA Experiment 108585 PARAMETER Experiment Name: At_5mM_NaNP_cDNA_P Parameter: Timepoint (hr) Value: 6
  misc_feature: MA Experiment 108585 PARAMETER Experiment Name: At_5mM_NaNP_cDNA_P Parameter: Tissue Value: Aerial
  misc_feature: MA Experiment 108585 PARAMETER Experiment Name: At_5mM_NaNP_cDNA_P Parameter: Treatment Value: null
  misc_feature: MA Experiment ID: 108595 Result: Up-regulated in Transcription
  misc_feature: MA Experiment 108595 PARAMETER Experiment Name: At_Ler-pi_Ovule_cDNA_P Parameter: Plant Line Value: null
  misc_feature: MA Experiment ID: 108607 Result: Up-regulated in Transcription
  misc_feature: MA Experiment 108607 PARAMETER Experiment Name: At_100uM_ABA_cDNA_P Parameter: Timepoint (hr) Value: 4
  misc_feature: MA Experiment 108607 PARAMETER Experiment Name: At_100uM_ABA_cDNA_P Parameter: Tissue Value: Aerial
  misc_feature: MA Experiment 108607 PARAMETER Experiment Name: At_100uM_ABA_cDNA_P Parameter: Treatment Value: 100uM ABA vs. No Treatment
  misc_feature: MA Experiment ID: 108667 Result: Up-regulated in Transcription
  misc_feature: MA Experiment 108667 PARAMETER Experiment Name: At_2mM_SA_cDNA_P Parameter: Plant Line Value: WS
  misc_feature: MA Experiment 108667 PARAMETER Experiment Name: At_2mM_SA_cDNA_P Parameter: Timepoint (hr) Value: 1
  misc_feature: MA Experiment 108667 PARAMETER Experiment Name: At_2mM_SA_cDNA_P Parameter: Treatment Value: 2mM SA vs. No Treatment
  misc_feature: MA Experiment ID: 108668 Result: Up-regulated in Transcription
  misc_feature: MA Experiment 108668 PARAMETER Experiment Name: At_2mM_SA_cDNA_P Parameter: Plant Line Value: WS
  misc_feature: MA Experiment 108668 PARAMETER Experiment Name: At_2mM_SA_cDNA_P Parameter: Timepoint (hr) Value: 6
  misc_feature: MA Experiment 108668 PARAMETER Experiment Name: At_2mM_SA_cDNA_P Parameter: Treatment Value: 2mM SA vs. No Treatment
  misc_feature: MA Experiment ID: 20000069 Result: Up-regulated in Transcription
  misc_feature: MA Experiment 20000069 PARAMETER Experiment Name: At_100uM_ABA_Mutants_cDNA_P Parameter: Plant Line Value: CS23
  misc_feature: MA Experiment 20000069 PARAMETER Experiment Name: At_100uM_ABA_Mutants_cDNA_P Parameter: Timepoint (hr) Value: 6
  misc_feature: MA Experiment 20000069 PARAMETER Experiment Name: At_100uM_ABA_Mutants_cDNA_P Parameter: Tissue Value: Aerial
  misc_feature: MA Experiment 20000069 PARAMETER Experiment Name: At_100uM_ABA_Mutants_cDNA_P Parameter: Treatment Value: 100uM ABA vs. No Treatment
  misc_feature: MA Experiment ID: 20000089 Result: Up-regulated in Transcription
  misc_feature: MA Experiment ID: 20000090 Result: Up-regulated in Transcription
  misc_feature: MA Experiment ID: 20000093 Result: Up-regulated in Transcription
  misc_feature: MA Experiment 20000093 PARAMETER Experiment Name: At_42deg_Heat_cDNA_P Parameter: Temperature (deg C) Value: 42 vs. 22
  misc_feature: MA Experiment 20000093 PARAMETER Experiment Name: At_42deg_Heat_cDNA_P Parameter: Timepoint (hr) Value: 0.5
  misc_feature: MA Experiment 20000093 PARAMETER Experiment Name: At_42deg_Heat_cDNA_P Parameter: Tissue Value: Aerial
  misc_feature: MA Experiment ID: 20000144 Result: Up-regulated in Transcription
  misc_feature: MA Experiment 20000144 PARAMETER Experiment Name: At_42deg_Heat_cDNA_P Parameter: Temperature (deg C) Value: 42 vs. 22
  misc_feature: MA Experiment 20000144 PARAMETER Experiment Name: At_42deg_Heat_cDNA_P Parameter: Timepoint (hr) Value: 1
  misc_feature: MA Experiment 20000144 PARAMETER Experiment Name: At_42deg_Heat_cDNA_P Parameter: Tissue Value: Aerial
  misc_feature: MA Experiment ID: 20000171 Result: Up-regulated in Transcription
  misc_feature: MA Experiment 20000171 PARAMETER Experiment Name: At_42deg_Heat_P Parameter: Age (day) Value: 14
  misc_feature: MA Experiment 20000171 PARAMETER Experiment Name: At_42deg_Heat_P Parameter: Organism Value: A. thaliana
  misc_feature: MA Experiment 20000171 PARAMETER Experiment Name: At_42deg_Heat_P Parameter: Plant Line Value: WS
  misc_feature: MA Experiment 20000171 PARAMETER Experiment Name: At_42deg_Heat_P Parameter: Temperature (deg C) Value: 42 vs. 22
  misc_feature: MA Experiment 20000171 PARAMETER Experiment Name: At_42deg_Heat_P Parameter: Timepoint (hr) Value: 1
  misc_feature: MA Experiment 20000171 PARAMETER Experiment Name: At_42deg_Heat_P Parameter: Tissue Value: Aerial
  misc_feature: MA Experiment ID: 20000173 Result: Up-regulated in Transcription
  misc_feature: MA Experiment 20000173 PARAMETER Experiment Name: At_42deg_Heat_P Parameter: Age (day) Value: 14
  misc_feature: MA Experiment 20000173 PARAMETER Experiment Name: At_42deg_Heat_P Parameter: Organism Value: A. thaliana
  misc_feature: MA Experiment 20000173 PARAMETER Experiment Name: At_42deg_Heat_P Parameter: Plant Line Value: WS
  misc_feature: MA Experiment 20000173 PARAMETER Experiment Name: At_42deg_Heat_P Parameter: Temperature (deg C) Value: 42 vs. 22
  misc_feature: MA Experiment 20000173 PARAMETER Experiment Name: At_42deg_Heat_P Parameter: Timepoint (hr) Value: 6
  misc_feature: MA Experiment 20000173 PARAMETER Experiment Name: At_42deg_Heat_P Parameter: Tissue Value: Aerial
  misc_feature: MA Experiment ID: 20000179 Result: Up-regulated in Transcription
  misc_feature: MA Experiment 20000179 PARAMETER Experiment Name: At_Germinating_Seeds_P Parameter: Age (hr) Value: 6 vs. 0
  misc_feature: MA Experiment 20000179 PARAMETER Experiment Name: At_Germinating_Seeds_P Parameter: Tissue Value: Germinating Seeds
  misc_feature: MA Experiment ID: 20000180 Result: Up-regulated in Transcription
  misc_feature: MA Experiment 20000180 PARAMETER Experiment Name: At_Germinating_Seeds_P Parameter: Age (hr) Value: 24 vs. 0
  misc_feature: MA Experiment 20000180 PARAMETER Experiment Name: At_Germinating_Seeds_P Parameter: Tissue Value: Germinating Seeds
  misc_feature: MA Experiment ID: 20000182 Result: Up-regulated in Transcription
  misc_feature: MA Experiment 20000182 PARAMETER Experiment Name: At_2mM_SA_P Parameter: Age (day) Value: 14
  misc_feature: MA Experiment 20000182 PARAMETER Experiment Name: At_2mM_SA_P Parameter: Organism Value: A. thaliana
  misc_feature: MA Experiment 20000182 PARAMETER Experiment Name: At_2mM_SA_P Parameter: Plant Line Value: WS
  misc_feature: MA Experiment 20000182 PARAMETER Experiment Name: At_2mM_SA_P Parameter: Timepoint (hr) Value: 6
  misc_feature: MA Experiment 20000182 PARAMETER Experiment Name: At_2mM_SA_P Parameter: Tissue Value: Aerial
  misc_feature: MA Experiment 20000182 PARAMETER Experiment Name: At_2mM_SA_P Parameter: Treatment Value: 2mM SA vs. No Treatment
  misc_feature: MA Experiment ID: 20000227 Result: Up-regulated in Transcription
  misc_feature: MA Experiment 20000227 PARAMETER Experiment Name: At_Root-Tips-vs-Tops_P Parameter: Tissue Value: Root Tips vs. Root Tops
  misc_feature: MA Experiment ID: 20000436 Result: Up-regulated in Transcription
  misc_feature: MA Experiment 20000436 PARAMETER Experiment Name: At_Drought_P Parameter: Age (day) Value: 7
  misc_feature: MA Experiment 20000436 PARAMETER Experiment Name: At_Drought_P Parameter: Organism Value: A. thaliana
  misc_feature: MA Experiment 20000436 PARAMETER Experiment Name: At_Drought_P Parameter: Plant Line Value: WS
  misc_feature: MA Experiment 20000436 PARAMETER Experiment Name: At_Drought_P Parameter: Timepoint (hr) Value: 12
  misc_feature: MA Experiment 20000436 PARAMETER Experiment Name: At_Drought_P Parameter: Tissue Value: Whole Plant
  misc_feature: MA Experiment 20000436 PARAMETER Experiment Name: At_Drought_P Parameter: Treatment Value: Drought vs. No Drought
  misc_feature: MA Experiment ID: 20000437 Result: Up-regulated in Transcription
  misc_feature: MA Experiment 20000437 PARAMETER Experiment Name: At_Drought_P Parameter: Age (day) Value: 8
  misc_feature: MA Experiment 20000437 PARAMETER Experiment Name: At_Drought_P Parameter: Organism Value: A. thaliana
  misc_feature: MA Experiment 20000437 PARAMETER Experiment Name: At_Drought_P Parameter: Plant Line Value: WS
  misc_feature: MA Experiment 20000437 PARAMETER Experiment Name: At_Drought_P Parameter: Timepoint (hr) Value: 24
  misc_feature: MA Experiment 20000437 PARAMETER Experiment Name: At_Drought_P Parameter: Tissue Value: Whole Plant
  misc_feature: MA Experiment 20000437 PARAMETER Experiment Name: At_Drought_P Parameter: Treatment Value: Drought vs. No Drought
  misc_feature: MA Experiment ID: 20000441 Result: Up-regulated in Transcription
  misc_feature: MA Experiment 20000441 PARAMETER Experiment Name: At_1uM_BR-BRZ__P Parameter: Tissue Value: Shoot Apices
  misc_feature: MA Experiment 20000441 PARAMETER Experiment Name: At_1uM_BR-BRZ__P Parameter: Treatment Value: 1uM BR vs. No Treatment
  misc_feature: MA Experiment ID: 20000443 Result: Up-regulated in Transcription
  misc_feature: MA Experiment 20000443 PARAMETER Experiment Name: At_1uM_BR-BRZ__P Parameter: Tissue Value: Shoot Apices
  misc_feature: MA Experiment 20000443 PARAMETER Experiment Name: At_1uM_BR-BRZ__P Parameter: Treatment Value: 1uM BRZ vs. No Treatment
  misc_feature: MA Experiment ID: 20000453 Result: Up-regulated in Transcription
  misc_feature: MA Experiment 20000453 PARAMETER Experiment Name: At_100uM_ABA_P Parameter: Age (day) Value: 15
  misc_feature: MA Experiment 20000453 PARAMETER Experiment Name: At_100uM_ABA_P Parameter: Organism Value: A. thaliana
  misc_feature: MA Experiment 20000453 PARAMETER Experiment Name: At_100uM_ABA_P Parameter: Plant Line Value: WS
  misc_feature: MA Experiment 20000453 PARAMETER Experiment Name: At_100uM_ABA_P Parameter: Timepoint (hr) Value: 24
  misc_feature: MA Experiment 20000453 PARAMETER Experiment Name: At_100uM_ABA_P Parameter: Tissue Value: Aerial
  misc_feature: MA Experiment 20000453 PARAMETER Experiment Name: At_100uM_ABA_P Parameter: Treatment Value: 100uM ABA vs. No Treatment
  misc_feature: MA Experiment ID: 20000456 Result: Up-regulated in Transcription
  misc_feature: MA Experiment 20000456 PARAMETER Experiment Name: At_100uM_BA_P Parameter: Age (day) Value: 14
  misc_feature: MA Experiment 20000456 PARAMETER Experiment Name: At_100uM_BA_P Parameter: Organism Value: A. thaliana
  misc_feature: MA Experiment 20000456 PARAMETER Experiment Name: At_100uM_BA_P Parameter: Plant Line Value: WS
  misc_feature: MA Experiment 20000456 PARAMETER Experiment Name: At_100uM_BA_P Parameter: Timepoint (hr) Value: 6
  misc_feature: MA Experiment 20000456 PARAMETER Experiment Name: At_100uM_BA_P Parameter: Tissue Value: Aerial
  misc_feature: MA Experiment 20000456 PARAMETER Experiment Name: At_100uM_BA_P Parameter: Treatment Value: 100uM BA vs. No Treatment
  misc_feature: MA Experiment ID: 20000506 Result: Up-regulated in Transcription
  misc_feature: MA Experiment 20000506 PARAMETER Experiment Name: At_Wounding_P Parameter: Organism Value: A. thaliana
  misc_feature: MA Experiment 20000506 PARAMETER Experiment Name: At_Wounding_P Parameter: Plant Line Value: WS
  misc_feature: MA Experiment 20000506 PARAMETER Experiment Name: At_Wounding_P Parameter: Timepoint (hr) Value: 6
  misc_feature: MA Experiment 20000506 PARAMETER Experiment Name: At_Wounding_P Parameter: Tissue Value: Aerial
  misc_feature: MA Experiment 20000506 PARAMETER Experiment Name: At_Wounding_P Parameter: Treatment Value: Wounding vs. No Wounding
  misc_feature: MA Experiment ID: 20000709 Result: Up-regulated in Transcription
  misc_feature: MA Experiment 20000709 PARAMETER Experiment Name: At_15mM_NH4NO3_L-to-H_P Parameter: Age (hr) Value: 14
  misc_feature: MA Experiment 20000709 PARAMETER Experiment Name: At_15mM_NH4NO3_L-to-H_P Parameter: Organism Value: A. thaliana
  misc_feature: MA Experiment 20000709 PARAMETER Experiment Name: At_15mM_NH4NO3_L-to-H_P Parameter: Plant Line Value: WS
  misc_feature: MA Experiment 20000709 PARAMETER Experiment Name: At_15mM_NH4NO3_L-to-H_P Parameter: Timepoint (hr) Value: 4
  misc_feature: MA Experiment 20000709 PARAMETER Experiment Name: At_15mM_NH4NO3_L-to-H_P Parameter: Tissue Value: Aerial
  misc_feature: MA Experiment 20000709 PARAMETER Experiment Name: At_15mM_NH4NO3_L-to-H_P Parameter: Treatment Value: 15mM NH4NO3 vs. 30mM Mannitol
  misc_feature: MA Experiment ID: 20001247 Result: Down-regulated in Transcription
  misc_feature: MA Experiment 20001247 PARAMETER Experiment Name: At_Far-red-induction_P Parameter: Age (day) Value: 7
  misc_feature: MA Experiment 20001247 PARAMETER Experiment Name: At_Far-red-induction_P Parameter: Light Value: Far-red vs. White
  misc_feature: MA Experiment 20001247 PARAMETER Experiment Name: At_Far-red-induction_P Parameter: Organism Value: A. thaliana
  misc_feature: MA Experiment 20001247 PARAMETER Experiment Name: At_Far-red-induction_P Parameter: Plant Line Value: Columbia
  misc_feature: MA Experiment 20001247 PARAMETER Experiment Name: At_Far-red-induction_P Parameter: Timepoint (hr) Value: 1
  misc_feature: MA Experiment 20001247 PARAMETER Experiment Name: At_Far-red-induction_P Parameter: Tissue Value: Whole Plant
  misc_feature: MA Experiment ID: 20001248 Result: Down-regulated in Transcription
  misc_feature: MA Experiment 20001248 PARAMETER Experiment Name: At_Far-red-induction_P Parameter: Age (day) Value: 7
  misc_feature: MA Experiment 20001248 PARAMETER Experiment Name: At_Far-red-induction_P Parameter: Light Value: Far-red vs. White
  misc_feature: MA Experiment 20001248 PARAMETER Experiment Name: At_Far-red-induction_P Parameter: Organism Value: A. thaliana
  misc_feature: MA Experiment 20001248 PARAMETER Experiment Name: At_Far-red-induction_P Parameter: Plant Line Value: Columbia
  misc_feature: MA Experiment 20001248 PARAMETER Experiment Name: At_Far-red-induction_P Parameter: Timepoint (hr) Value: 4
  misc_feature: MA Experiment 20001248 PARAMETER Experiment Name: At_Far-red-induction_P Parameter: Tissue Value: Whole Plant
  misc_feature: MA Experiment ID: 20001555 Result: Up-regulated in Transcription
  misc_feature: MA Experiment 20001555 PARAMETER Experiment Name: At_Drought_Soil_Dry_P Parameter: Age (day) Value: 24
  misc_feature: MA Experiment 20001555 PARAMETER Experiment Name: At_Drought_Soil_Dry_P Parameter: Organism Value: A. thaliana
  misc_feature: MA Experiment 20001555 PARAMETER Experiment Name: At_Drought_Soil_Dry_P Parameter: Plant Line Value: WS
  misc_feature: MA Experiment 20001555 PARAMETER Experiment Name: At_Drought_Soil_Dry_P Parameter: Post Timepoint (hr) Value: None
  misc_feature: MA Experiment 20001555 PARAMETER Experiment Name: At_Drought_Soil_Dry_P Parameter: Post-Treatment Value: None
  misc_feature: MA Experiment 20001555 PARAMETER Experiment Name: At_Drought_Soil_Dry_P Parameter: Timepoint (day) Value: 10
  misc_feature: MA Experiment 20001555 PARAMETER Experiment Name: At_Drought_Soil_Dry_P Parameter: Treatment Value: Drought vs. No Drought
  misc_feature: MA Experiment ID: 20001556 Result: Up-regulated in Transcription
  misc_feature: MA Experiment 20001556 PARAMETER Experiment Name: At_Drought_Soil_Dry_P Parameter: Age (day) Value: 26
  misc_feature: MA Experiment 20001556 PARAMETER Experiment Name: At_Drought_Soil_Dry_P Parameter: Organism Value: A. thaliana
  misc_feature: MA Experiment 20001556 PARAMETER Experiment Name: At_Drought_Soil_Dry_P Parameter: Plant Line Value: WS
  misc_feature: MA Experiment 20001556 PARAMETER Experiment Name: At_Drought_Soil_Dry_P Parameter: Post Timepoint (hr) Value: None
  misc_feature: MA Experiment 20001556 PARAMETER Experiment Name: At_Drought_Soil_Dry_P Parameter: Post-Treatment Value: None
  misc_feature: MA Experiment 20001556 PARAMETER Experiment Name: At_Drought_Soil_Dry_P Parameter: Timepoint (day) Value: 12
  misc_feature: MA Experiment 20001556 PARAMETER Experiment Name: At_Drought_Soil_Dry_P Parameter: Treatment Value: Drought vs. No Drought
  misc_feature: MA Experiment ID: 20001557 Result: Up-regulated in Transcription
  misc_feature: MA Experiment 20001557 PARAMETER Experiment Name: At_Drought_Soil_Dry_P Parameter: Age (day) Value: 27
  misc_feature: MA Experiment 20001557 PARAMETER Experiment Name: At_Drought_Soil_Dry_P Parameter: Organism Value: A. thaliana
  misc_feature: MA Experiment 20001557 PARAMETER Experiment Name: At_Drought_Soil_Dry_P Parameter: Plant Line Value: WS
  misc_feature: MA Experiment 20001557 PARAMETER Experiment Name: At_Drought_Soil_Dry_P Parameter: Post Timepoint (hr) Value: 3
  misc_feature: MA Experiment 20001557 PARAMETER Experiment Name: At_Drought_Soil_Dry_P Parameter: Post-Treatment Value: Re-Water vs. No Drought
  misc_feature: MA Experiment 20001557 PARAMETER Experiment Name: At_Drought_Soil_Dry_P Parameter: Timepoint (day) Value: 13
  misc_feature: MA Experiment 20001557 PARAMETER Experiment Name: At_Drought_Soil_Dry_P Parameter: Treatment Value: Drought vs. No Drought
  misc_feature: MA Experiment ID: 20001558 Result: Up-regulated in Transcription
  misc_feature: MA Experiment 20001558 PARAMETER Experiment Name: At_Drought_Soil_Dry_P Parameter: Age (day) Value: 27
  misc_feature: MA Experiment 20001558 PARAMETER Experiment Name: At_Drought_Soil_Dry_P Parameter: Organism Value: A. thaliana
  misc_feature: MA Experiment 20001558 PARAMETER Experiment Name: At_Drought_Soil_Dry_P Parameter: Plant Line Value: WS
  misc_feature: MA Experiment 20001558 PARAMETER Experiment Name: At_Drought_Soil_Dry_P Parameter: Post Timepoint (hr) Value: 6
  misc_feature: MA Experiment 20001558 PARAMETER Experiment Name: At_Drought_Soil_Dry_P Parameter: Post-Treatment Value: Re-Water vs. No Drought
  misc_feature: MA Experiment 20001558 PARAMETER Experiment Name: At_Drought_Soil_Dry_P Parameter: Timepoint (day) Value: 13
  misc_feature: MA Experiment 20001558 PARAMETER Experiment Name: At_Drought_Soil_Dry_P Parameter: Treatment Value: Drought vs. No Drought
  misc_feature: MA Experiment ID: 20001559 Result: Up-regulated in Transcription
  misc_feature: MA Experiment 20001559 PARAMETER Experiment Name: At_Drought_Soil_Dry_P Parameter: Age (day) Value: 28
  misc_feature: MA Experiment 20001559 PARAMETER Experiment Name: At_Drought_Soil_Dry_P Parameter: Organism Value: A. thaliana
  misc_feature: MA Experiment 20001559 PARAMETER Experiment Name: At_Drought_Soil_Dry_P Parameter: Plant Line Value: WS
  misc_feature: MA Experiment 20001559 PARAMETER Experiment Name: At_Drought_Soil_Dry_P Parameter: Post Timepoint (hr) Value: 29
  misc_feature: MA Experiment 20001559 PARAMETER Experiment Name: At_Drought_Soil_Dry_P Parameter: Post-Treatment Value: Re-Water vs. No Drought
  misc_feature: MA Experiment 20001559 PARAMETER Experiment Name: At_Drought_Soil_Dry_P Parameter: Timepoint (day) Value: 14
  misc_feature: MA Experiment 20001559 PARAMETER Experiment Name: At_Drought_Soil_Dry_P Parameter: Treatment Value: Drought vs. No Drought
  misc_feature: MA Experiment ID: 20001560 Result: Up-regulated in Transcription
  misc_feature: MA Experiment 20001560 PARAMETER Experiment Name: At_Drought_Soil_Dry_P Parameter: Age (day) Value: 28
  misc_feature: MA Experiment 20001560 PARAMETER Experiment Name: At_Drought_Soil_Dry_P Parameter: Organism Value: A. thaliana
  misc_feature: MA Experiment 20001560 PARAMETER Experiment Name: At_Drought_Soil_Dry_P Parameter: Plant Line Value: WS
  misc_feature: MA Experiment 20001560 PARAMETER Experiment Name: At_Drought_Soil_Dry_P Parameter: Post Timepoint (hr) Value: None
  misc_feature: MA Experiment 20001560 PARAMETER Experiment Name: At_Drought_Soil_Dry_P Parameter: Post-Treatment Value: None
  misc_feature: MA Experiment 20001560 PARAMETER Experiment Name: At_Drought_Soil_Dry_P Parameter: Timepoint (day) Value: 14
  misc_feature: MA Experiment 20001560 PARAMETER Experiment Name: At_Drought_Soil_Dry_P Parameter: Treatment Value: Drought vs. No Drought
  misc_feature: MA Experiment ID: 20001757 Result: Down-regulated in Transcription
  misc_feature: MA Experiment 20001757 PARAMETER Experiment Name: At_50mM_NH4NO3_L-to-H_P Parameter: Timepoint (hr) Value: 6
  misc_feature: MA Experiment 20001757 PARAMETER Experiment Name: At_50mM_NH4NO3_L-to-H_P Parameter: Tissue Value: Leaf
  misc_feature: MA Experiment 20001757 PARAMETER Experiment Name: At_50mM_NH4NO3_L-to-H_P Parameter: Treatment Value: 50mM NH4NO3 vs 100mM Mannitol
  misc_feature: MA Experiment ID: 20001768 Result: Up-regulated in Transcription
  misc_feature: MA Experiment 20001768 PARAMETER Experiment Name: At_Far-red-enriched-adult_P Parameter: Age (day) Value: 28
  misc_feature: MA Experiment 20001768 PARAMETER Experiment Name: At_Far-red-enriched-adult_P Parameter: Light Value: Far-red enriched vs. White
  misc_feature: MA Experiment 20001768 PARAMETER Experiment Name: At_Far-red-enriched-adult_P Parameter: Organism Value: A. thaliana
  misc_feature: MA Experiment 20001768 PARAMETER Experiment Name: At_Far-red-enriched-adult_P Parameter: Plant Line Value: Columbia
  misc_feature: MA Experiment 20001768 PARAMETER Experiment Name: At_Far-red-enriched-adult_P Parameter: Timepoint (hr) Value: 1
  misc_feature: MA Experiment 20001768 PARAMETER Experiment Name: At_Far-red-enriched-adult_P Parameter: Tissue Value: Aerial
  misc_feature: MA Experiment ID: 20001905 Result: Up-regulated in Transcription
  misc_feature: MA Experiment 20001905 PARAMETER Experiment Name: At_Drought_Reproduction_P Parameter: Age (day) Value: 40
  misc_feature: MA Experiment 20001905 PARAMETER Experiment Name: At_Drought_Reproduction_P Parameter: Organism Value: A. thaliana
  misc_feature: MA Experiment 20001905 PARAMETER Experiment Name: At_Drought_Reproduction_P Parameter: Plant Line Value: WS
  misc_feature: MA Experiment 20001905 PARAMETER Experiment Name: At_Drought_Reproduction_P Parameter: Timepoint (day) Value: 10
  misc_feature: MA Experiment 20001905 PARAMETER Experiment Name: At_Drought_Reproduction_P Parameter: Tissue Value: Rosettes
  misc_feature: MA Experiment 20001905 PARAMETER Experiment Name: At_Drought_Reproduction_P Parameter: Treatment Value: Drought vs. No Drought
  misc_feature: MA Experiment ID: 20001906 Result: Up-regulated in Transcription
  misc_feature: MA Experiment 20001906 PARAMETER Experiment Name: At_Drought_Reproduction_P Parameter: Age (day) Value: 35
  misc_feature: MA Experiment 20001906 PARAMETER Experiment Name: At_Drought_Reproduction_P Parameter: Organism Value: A. thaliana
  misc_feature: MA Experiment 20001906 PARAMETER Experiment Name: At_Drought_Reproduction_P Parameter: Plant Line Value: WS
  misc_feature: MA Experiment 20001906 PARAMETER Experiment Name: At_Drought_Reproduction_P Parameter: Timepoint (day) Value: 5
  misc_feature: MA Experiment 20001906 PARAMETER Experiment Name: At_Drought_Reproduction_P Parameter: Tissue Value: Siliques
  misc_feature: MA Experiment 20001906 PARAMETER Experiment Name: At_Drought_Reproduction_P Parameter: Treatment Value: Drought vs. No Drought
  misc_feature: MA Experiment ID: 20001911 Result: Up-regulated in Transcription
  misc_feature: MA Experiment 20001911 PARAMETER Experiment Name: At_Drought_Reproduction_P Parameter: Age (day) Value: 40
  misc_feature: MA Experiment 20001911 PARAMETER Experiment Name: At_Drought_Reproduction_P Parameter: Organism Value: A. thaliana
  misc_feature: MA Experiment 20001911 PARAMETER Experiment Name: At_Drought_Reproduction_P Parameter: Plant Line Value: WS
  misc_feature: MA Experiment 20001911 PARAMETER Experiment Name: At_Drought_Reproduction_P Parameter: Timepoint (day) Value: 10
  misc_feature: MA Experiment 20001911 PARAMETER Experiment Name: At_Drought_Reproduction_P Parameter: Tissue Value: Flowers
  misc_feature: MA Experiment 20001911 PARAMETER Experiment Name: At_Drought_Reproduction_P Parameter: Treatment Value: Drought vs. No Drought
  misc_feature: Phenotype: ROSETTE LEAVES Curled-Curled 3
  misc_feature: Phenotype: ROSETTE LEAVES Shape-Lanceolate
  misc_feature: Phenotype: ROSETTE LEAVES Other
  misc_feature: Phenotype: ROSETTE LEAVES Curled-Curled 1
  misc_feature: Phenotype: ROSETTE LEAVES Shape-Lanceolate
  misc_feature: Phenotype: ROSETTE LEAVES Shape-Lanceolate
  misc_feature: Phenotype: HYPOCOTYL Length-Long
  misc_feature: Phenotype: ROSETTE LEAVES Shape-Oval
  misc_feature: Phenotype: WHOLE PLANT Color-Dark Green
  misc_feature: Phenotype: WHOLE PLANT Rosette Shape-Standing
  misc_feature: Phenotype: WHOLE PLANT Size-Small
aatcttttcatcgttttcgtgtgaagtttaaagaagtttgggacccgtaaattctagaagctctggagatttcttgttcaccactataaatacatcatccgagtcaccagctttgctcagaagtagaaatcgaactcgccggaaaatcgtaattagctatctcagcattccaaacatctctttcgctttcgaaatcaaatcgagaatgtcgcttattccaagcttcttcggcaacaacaggcgaagcaacagcatcttcgacccgttctcactcgacgtttgggatccattcaaggaactgcaattcccgtcgtcgctctccggagaaacatcggcgataacgaacgcacgtgtggactggaaagagacggcggaggcgcacgtgttcaaggccgatctgccggggatgaagaaagaggaggttaaagtggagatagaggacgacagtgtgctcaagatcagtggagagagacacgtggagaaagaggagaagcaggacacgtggcatcgtgtggagaggtcgagcgggcaattctcgaggaagtttaagctgccggagaatgtgaagatggatcaagtcaaggcttccatggagaacggagttctgactgtgacggtgcctaaagtggaagaggctaagaagaaggctcaagttaagtctattgatatctctggctaaagccaattagcttatgggtttcatgtttatgcgtaaagactcttctgattatggctcttgatttgaatatggctctgtgttttggtaatgatgtattataactgttaatcctaataattaagcaaggcctttatatt

SEQ ID NO: 21094 - protein, 157 aa, Arabidopsis thaliana
  peptide (1)..(157): Ceres Seq. ID no. 13499733
  misc_feature (1)..(157): Homolog of NCBI NO: 123538 NR Description: 17.5 KD CLASS I HEAT SHOCK PROTEIN (HSP 17.5-M)
  misc_feature (1)..(157): Homolog of NCBI NO: 4836473 NR Description: 17.6 kD class I small heat shock protein
  misc_feature (1)..(157): Homolog of NCBI NO: 3341464 NR Description: Hsp20.1 protein [Lycopersicon peruvianum]
  misc_feature (1)..(157): Homolog of NCBI NO: 15227552 NR Description: small heat shock protein -related [Arabidopsis
  misc_feature (1)..(157): Homolog of NCBI NO: 21592809 NR Description: heat shock protein, putative [Arabidopsis
  misc_feature (1)..(157): Homolog of NCBI NO: 15218934 NR Description: heat shock protein, putative [Arabidopsis
  misc_feature (1)..(157): Homolog of NCBI NO: 15222395 NR Description: heat shock protein, putative [Arabidopsis
MSLIPSFFGNNRRSNSIFDPFSLDVWDPFKELQFPSSLSGETSAITNARVDWKETAEAHVFKADLPGMKKEEVKVEIEDDSVLKISGERHVEKEEKQDTWHRVERSSGQFSRKFKLPENVKMDQVKASMENGVLTVTVPKVEEAKKKAQVKSIDISG

SEQ ID NO: 21095 - protein, 90 aa, Arabidopsis thaliana
  peptide (1)..(90): Ceres Seq. ID no. 13499734
  misc_feature (1)..(90): Homolog of NCBI NO: 123538 NR Description: 17.5 KD CLASS I HEAT SHOCK PROTEIN (HSP 17.5-M)
  misc_feature (1)..(90): Homolog of NCBI NO: 4836473 NR Description: 17.6 kD class I small heat shock protein
  misc_feature (1)..(90): Homolog of NCBI NO: 3341464 NR Description: Hsp20.1 protein [Lycopersicon peruvianum]
  misc_feature (1)..(90): Homolog of NCBI NO: 15227552 NR Description: small heat shock protein -related [Arabidopsis
  misc_feature (1)..(90): Homolog of NCBI NO: 21592809 NR Description: heat shock protein, putative [Arabidopsis
  misc_feature (1)..(90): Homolog of NCBI NO: 15218934 NR Description: heat shock protein, putative [Arabidopsis
  misc_feature (1)..(90): Homolog of NCBI NO: 15222395 NR Description: heat shock protein, putative [Arabidopsis
MKKEEVKVEIEDDSVLKISGERHVEKEEKQDTWHRVERSSGQFSRKFKLPENVKMDQVKASMENGVLTVTVPKVEEAKKKAQVKSIDISG

SEQ ID NO: 21096 - DNA, 1267 bp, Arabidopsis thaliana
  misc_feature (1)..(1267): Ceres Seq. ID no. 13490634
  misc_feature: MA Experiment ID: 108501 Result: Up-regulated in Transcription
  misc_feature: MA Experiment 108501 PARAMETER Experiment Name: At_ap2_floral_buds_cDNA_P Parameter: Plant Line Value: ap2 (Ler.)
  misc_feature: MA Experiment 108501 PARAMETER Experiment Name: At_ap2_floral_buds_cDNA_P Parameter: Tissue Value: Closed Flower
  misc_feature: MA Experiment ID: 20000235 Result: Up-regulated in Transcription
  misc_feature: MA Experiment 20000235 PARAMETER Experiment Name: At_Siliques_P Parameter: Age (day) Value: 21
  misc_feature: MA Experiment 20000235 PARAMETER Experiment Name: At_Siliques_P Parameter: Organism Value: A. thaliana
  misc_feature: MA Experiment 20000235 PARAMETER Experiment Name: At_Siliques_P Parameter: Plant Line Value: WS
  misc_feature: MA Experiment 20000235 PARAMETER Experiment Name: At_Siliques_P Parameter: Tissue Value: 5-10mm Siliques vs. Whole Plant
agatctgaccaaagcaagaagggcttttactaagagtaaaacagaggaatatggagaccaccgtgaaaaacaagcaagtgatactgagaaattatgtgaagggtatccctaaagaatctgacctaatgattatcacagcttcagaccccgtggaactcaaggttaagcccggatcagcggcggttatggtgaggaatctttacttgtcttgtgacccttacatggggattctcatgagagaaccaactccttccactctagcacttttggatgccttcatccccggaaagcctatagctggaattggagtgtctcaagtaatagattctgatgatccatcttttacgaaaggcgatatgatttggggaattgtgaactgggaggagtttagtactatcaacccggctgctatattcaaaatcgacgtcaatatcaatgttcctctcagctactatactggaatcctcggtatgataggtttaactgcttacgccgggtttttcgagatatgttcacctaagaaaggagacacagtgttcgtgtctgctgcttctggcgcggttggacagctcgtgggtcagtttgcaaagttgatgggctgctatgttgttggaagtgccggaagtaaacaaaaggtcgatctcctgctgaacaaattcggttacgatgatgcattcaattataaggaagagcctgaccttgactccgccttgaagaggtgtgtaccaaaaggtattgacatatactttgagaacgtgggaggcaaaatgcttgacgcggttctacttaacatgaaaacgtatggacgaatcgctgtatgtgggatgatatctcagtaccatcttgaaaccagagacaggttacaaaatctacctgacatcatattcaagaagataaggatgcaagggtttgcttcttatgactttatagatagattcccaaagttcttggagtttgttcttccctacataaaagaagagaaattagcgtacgtggaagacattgttgaaggactcgagaatggtcctgctgctcttgtaggacttcttcatggaaaaaacgttggtaagcaagttctcaaggttgcttgagagtaaagaaatctatccatgtatggatatatgtaaaattacaaaaaaactaccttgtatgtcgtattttaagggtatgggttctaattggaatttatatgaaataaaagggcatatagttaaattccatattttcgtgtttaaatgggcccaagtgaagcgcagcttaataatcc

SEQ ID NO: 21097 - protein, 346 aa, Arabidopsis thaliana
  peptide (1)..(346): Ceres Seq. ID no. 13490635
  misc_feature (110)..(345): Pfam Name: Zinc-binding dehydrogenase Pfam Description: Zinc-binding dehydrogenase
  misc_feature (4)..(346): Homolog of NCBI NO: 17529140 NR Description: putative quinone oxidoreductase [Arabidopsis
  misc_feature (4)..(346): Homolog of NCBI NO: 22326861 NR Description: NADP-dependent oxidoreductase, putative
  misc_feature (4)..(346): Homolog of NCBI NO: 15228456 NR Description: NADP-dependent oxidoreductase (P2), putative
  misc_feature (7)..(346): Homolog of NCBI NO: 21554121 NR Description: quinone oxidoreductase-like protein [Arabidopsis
  misc_feature (4)..(346): Homolog of NCBI NO: 15237888 NR Description: NADP-dependent oxidoreductase (P1), putative
  misc_feature (7)..(346): Homolog of NCBI NO: 15237890 NR Description: allyl alcohol dehydrogenase, putative
  misc_feature (3)..(346): Homolog of NCBI NO: 21536967 NR Description: quinone oxidoreductase-like protein [Arabidopsis
  misc_feature (1)..(344): Homolog of NCBI NO: 11357163 NR Description: allyl alcohol dehydrogenase-like protein -
  misc_feature (1)..(346): Homolog of NCBI NO: 21555641 NR Description: allyl alcohol dehydrogenase-like protein
  misc_feature (1)..(346): Homolog of NCBI NO: 18411352 NR Description: NADP-dependent oxidoreductase, putative
METTVKNKQVILRNYVKGIPKESDLMIITASDPVELKVKPGSAAVMVRNLYLSCDPYMGILMREPTPSTLALLDAFIPGKPIAGIGVSQVIDSDDPSFTKGDMIWGIVNWEEFSTINPAAIFKIDVNINVPLSYYTGILGMIGLTAYAGFFEICSPKKGDTVFVSAASGAVGQLVGQFAKLMGCYVVGSAGSKQKVDLLLNKFGYDDAFNYKEEPDLDSALKRCVPKGIDIYFENVGGKMLDAVLLNMKTYGRIAVCGMISQYHLETRDRLQNLPDIIFKKIRMQGFASYDFIDRFPKFLEFVLPYIKEEKLAYVEDIVEGLENGPAALVGLLHGKNVGKQVLKVA

SEQ ID NO: 21098 - protein, 321 aa, Arabidopsis thaliana
  peptide (1)..(321): Ceres Seq. ID no. 13490636
  misc_feature (85)..(320): Pfam Name: Zinc-binding dehydrogenase Pfam Description: Zinc-binding dehydrogenase
  misc_feature (1)..(321): Homolog of NCBI NO: 21554121 NR Description: quinone oxidoreductase-like protein [Arabidopsis
  misc_feature (1)..(321): Homolog of NCBI NO: 21536967 NR Description: quinone oxidoreductase-like protein [Arabidopsis
  misc_feature (1)..(321): Homolog of NCBI NO: 15237888 NR Description: NADP-dependent oxidoreductase (P1), putative
  misc_feature (1)..(321): Homolog of NCBI NO: 15237890 NR Description: allyl alcohol dehydrogenase, putative
  misc_feature (1)..(321): Homolog of NCBI NO: 17529140 NR Description: putative quinone oxidoreductase [Arabidopsis
  misc_feature (1)..(321): Homolog of NCBI NO: 22326861 NR Description: NADP-dependent oxidoreductase, putative
  misc_feature (1)..(321): Homolog of NCBI NO: 15228456 NR Description: NADP-dependent oxidoreductase (P2), putative
  misc_feature (1)..(319): Homolog of NCBI NO: 11357163 NR Description: allyl alcohol dehydrogenase-like protein -
  misc_feature (1)..(321): Homolog of NCBI NO: 21555641 NR Description: allyl alcohol dehydrogenase-like protein
  misc_feature (1)..(321): Homolog of NCBI NO: 18411352 NR Description: NADP-dependent oxidoreductase, putative
MIITASDPVELKVKPGSAAVMVRNLYLSCDPYMGILMREPTPSTLALLDAFIPGKPIAGIGVSQVIDSDDPSFTKGDMIWGIVNWEEFSTINPAAIFKIDVNINVPLSYYTGILGMIGLTAYAGFFEICSPKKGDTVFVSAASGAVGQLVGQFAKLMGCYVVGSAGSKQKVDLLLNKFGYDDAFNYKEEPDLDSALKRCVPKGIDIYFENVGGKMLDAVLLNMKTYGRIAVCGMISQYHLETRDRLQNLPDIIFKKIRMQGFASYDFIDRFPKFLEFVLPYIKEEKLAYVEDIVEGLENGPAALVGLLHGKNVGKQVLKVA

SEQ ID NO: 21099 - protein, 301 aa, Arabidopsis thaliana
  peptide (1)..(301): Ceres Seq. ID no. 13490637
  misc_feature (65)..(300): Pfam Name: Zinc-binding dehydrogenase Pfam Description: Zinc-binding dehydrogenase
  misc_feature (1)..(301): Homolog of NCBI NO: 21554121 NR Description: quinone oxidoreductase-like protein [Arabidopsis
  misc_feature (1)..(301): Homolog of NCBI NO: 21536967 NR Description: quinone oxidoreductase-like protein [Arabidopsis
  misc_feature (1)..(301): Homolog of NCBI NO: 15237888 NR Description: NADP-dependent oxidoreductase (P1), putative
  misc_feature (1)..(301): Homolog of NCBI NO: 15237890 NR Description: allyl alcohol dehydrogenase, putative
  misc_feature (1)..(301): Homolog of NCBI NO: 17529140 NR Description: putative quinone oxidoreductase [Arabidopsis
  misc_feature (1)..(301): Homolog of NCBI NO: 22326861 NR Description: NADP-dependent oxidoreductase, putative
  misc_feature (1)..(301): Homolog of NCBI NO: 15228456 NR Description: NADP-dependent oxidoreductase (P2), putative
  misc_feature (1)..(299): Homolog of NCBI NO: 11357163 NR Description: allyl alcohol dehydrogenase-like protein -
  misc_feature (1)..(301): Homolog of NCBI NO: 21555641 NR Description: allyl alcohol dehydrogenase-like protein
  misc_feature (1)..(301): Homolog of NCBI NO: 18411352 NR Description: NADP-dependent oxidoreductase, putative
MVRNLYLSCDPYMGILMREPTPSTLALLDAFIPGKPIAGIGVSQVIDSDDPSFTKGDMIWGIVNWEEFSTINPAAIFKIDVNINVPLSYYTGILGMIGLTAYAGFFEICSPKKGDTVFVSAASGAVGQLVGQFAKLMGCYVVGSAGSKQKVDLLLNKFGYDDAFNYKEEPDLDSALKRCVPKGIDIYFENVGGKMLDAVLLNMKTYGRIAVCGMISQYHLETRDRLQNLPDIIFKKIRMQGFASYDFIDRFPKFLEFVLPYIKEEKLAYVEDIVEGLENGPAALVGLLHGKNVGKQVLKVA

SEQ ID NO: 21100 - DNA, 731 bp, Arabidopsis thaliana
  misc_feature (1)..(731): Ceres Seq. ID no. 12396498
  misc_feature: MA Experiment ID: 108461 Result: Down-regulated in Transcription
  misc_feature: MA Experiment 108461 PARAMETER Experiment Name: At_Germinating_Seeds_cDNA_P Parameter: Age (day) Value: 1 vs. 0
  misc_feature: MA Experiment 108461 PARAMETER Experiment Name: At_Germinating_Seeds_cDNA_P Parameter: Tissue Value: Germinating Seeds
  misc_feature: MA Experiment ID: 108573 Result: Up-regulated in Transcription
  misc_feature: MA Experiment 108573 PARAMETER Experiment Name: At_Drought_cDNA_P Parameter: Timepoint (hr) Value: 6
  misc_feature: MA Experiment 108573 PARAMETER Experiment Name: At_Drought_cDNA_P Parameter: Tissue Value: Aerial
  misc_feature: MA Experiment 108573 PARAMETER Experiment Name: At_Drought_cDNA_P Parameter: Treatment Value: Drought vs. No Drought
  misc_feature: MA Experiment ID: 20000224 Result: Down-regulated in Transcription
aactttaacaaaagattgttcctgagaaattctagggtttctgaaatcgaggagagatccaatcggcaatggcgaatcaagtgatcaccggaatcaaagaaacagctcagtcaattactggagcggctcgtccatggggcgatttcctcgatctttccgccttcagcttcccttcctccatcgccgatgcaacaactcgcgtaactcagaacctgactcacttccgcatcaactacagtatcattctctctatcctcctaggtctaaccctaatcacacgtccaatcgccatcctcgcgtttatagccgttggcttagcttggttcttcctctacttcgctcgcgaggagccactcacgatcttcggattcactattgatgacggcatcgtcgctgtgcttctcattggtctttcgattgggtcgctagttaccaccggagtttggctcagagctctcaccaccgttggatttggtgttctggttttgatcttacacgctgcgttaagaggaacggatgatcttgtgagtgacgatctggaatcaccttatggaccgatgctctctacctctggcggtggtaacgacggtgctcgtggtgattacagtggaatctgatcaacacgatttgataatgagtttggggatttagggttttgttgttttgtaaattgtcattgtttgttttgtgtcccattaaacattgttaatgacaaaatatgttttaagacc

SEQ ID NO: 21101 - protein, 182 aa, Arabidopsis thaliana
  peptide (1)..(182): Ceres Seq. ID no. 12396499
  misc_feature (5)..(159): Homolog of NCBI NO: 15240698 NR Description: putative protein
  misc_feature (14)..(175): Homolog of NCBI NO: 18072825 NR Description: prenylated Rab receptor 2 [Arabidopsis thaliana]
  misc_feature (14)..(175): Homolog of NCBI NO: 15239101 NR Description: putative protein; protein id: At5g05380.1
  misc_feature (13)..(157): Homolog of NCBI NO: 34903576 NR Description: P0419B01.1 [Oryza sativa (japonica
  misc_feature (5)..(159): Homolog of NCBI NO: 15220814 NR Description: hypothetical protein; protein id: At1g17700.1
  misc_feature (1)..(169): Homolog of NCBI NO: 40539036 NR Description: putative prenylated rab acceptor protein
  misc_feature (1)..(172): Homolog of NCBI NO: 21594668 NR Description: unknown [Arabidopsis thaliana]
  misc_feature (1)..(172): Homolog of NCBI NO: 18390939 NR Description: expressed protein
  misc_feature (1)..(182): Homolog of NCBI NO: 21555645 NR Description: unknown [Arabidopsis thaliana]
  misc_feature (1)..(182): Homolog of NCBI NO: 18379300 NR Description: expressed protein
MANQVITGIKETAQSITGAARPWGDFLDLSAFSFPSSIADATTRVTQNLTHFRINYSIILSILLGLTLITRPIAILAFIAVGLAWFFLYFAREEPLTIFGFTIDDGIVAVLLIGLSIGSLVTTGVWLRALTTVGFGVLVLILHAALRGTDDLVSDDLESPYGPMLSTSGGGNDGARGDYSGI

SEQ ID NO: 21102 - DNA, 675 bp, Arabidopsis thaliana
  misc_feature (1)..(675): Ceres Seq. ID no. 12322771
  misc_feature: MA Experiment ID: 108435 Result: Down-regulated in Transcription
  misc_feature: MA Experiment 108435 PARAMETER Experiment Name: At_stm_Mutants_cDNA_P Parameter: Plant Line Value: wt Landsburg vs stm
  misc_feature: MA Experiment 108435 PARAMETER Experiment Name: At_stm_Mutants_cDNA_P Parameter: Tissue Value: Shoot Apical Meristem Region
  misc_feature: MA Experiment ID: 108461 Result: Up-regulated in Transcription
  misc_feature: MA Experiment 108461 PARAMETER Experiment Name: At_Germinating_Seeds_cDNA_P Parameter: Age (day) Value: 1 vs. 0
  misc_feature: MA Experiment 108461 PARAMETER Experiment Name: At_Germinating_Seeds_cDNA_P Parameter: Tissue Value: Germinating Seeds
  misc_feature: MA Experiment ID: 108462 Result: Up-regulated in Transcription
  misc_feature: MA Experiment 108462 PARAMETER Experiment Name: At_Germinating_Seeds_cDNA_P Parameter: Age (day) Value: 2 vs. 0
  misc_feature: MA Experiment 108462 PARAMETER Experiment Name: At_Germinating_Seeds_cDNA_P Parameter: Tissue Value: Germinating Seeds
  misc_feature: MA Experiment ID: 108463 Result: Up-regulated in Transcription
  misc_feature: MA Experiment 108463 PARAMETER Experiment Name: At_Germinating_Seeds_cDNA_P Parameter: Age (day) Value: 3 vs. 0
  misc_feature: MA Experiment 108463 PARAMETER Experiment Name: At_Germinating_Seeds_cDNA_P Parameter: Tissue Value: Germinating Seeds
  misc_feature: MA Experiment ID: 108464 Result: Up-regulated in Transcription
  misc_feature: MA Experiment 108464 PARAMETER Experiment Name: At_Germinating_Seeds_cDNA_P Parameter: Age (day) Value: 4 vs. 0
  misc_feature: MA Experiment 108464 PARAMETER Experiment Name: At_Germinating_Seeds_cDNA_P Parameter: Tissue Value: Germinating Seeds
  misc_feature: MA Experiment ID: 108489 Result: Down-regulated in Transcription
  misc_feature: MA Experiment ID: 108595 Result: Down-regulated in Transcription
  misc_feature: MA Experiment 108595 PARAMETER Experiment Name: At_Ler-pi_Ovule_cDNA_P Parameter: Plant Line Value: null
  misc_feature: MA Experiment ID: 20000086 Result: Down-regulated in Transcription
  misc_feature: MA Experiment 20000086 PARAMETER Experiment Name: At_100uM_ABA_Mutants_cDNA_P Parameter: Plant Line Value: CS22
  misc_feature: MA Experiment 20000086 PARAMETER Experiment Name: At_100uM_ABA_Mutants_cDNA_P Parameter: Timepoint (hr) Value: 6
  misc_feature: MA Experiment 20000086 PARAMETER Experiment Name: At_100uM_ABA_Mutants_cDNA_P Parameter: Tissue Value: Aerial
  misc_feature: MA Experiment 20000086 PARAMETER Experiment Name: At_100uM_ABA_Mutants_cDNA_P Parameter: Treatment Value: 100uM ABA vs. No Treatment
  misc_feature: MA Experiment ID: 20000113 Result: Up-regulated in Transcription
  misc_feature: MA Experiment 20000113 PARAMETER Experiment Name: At_42deg_Heat_cDNA_P Parameter: Temperature (deg C) Value: 42 vs. 22
  misc_feature: MA Experiment 20000113 PARAMETER Experiment Name: At_42deg_Heat_cDNA_P Parameter: Timepoint (hr) Value: 8
  misc_feature: MA Experiment 20000113 PARAMETER Experiment Name: At_42deg_Heat_cDNA_P Parameter: Tissue Value: Aerial
  misc_feature: MA Experiment ID: 20000179 Result: Up-regulated in Transcription
  misc_feature: MA Experiment 20000179 PARAMETER Experiment Name: At_Germinating_Seeds_P Parameter: Age (hr) Value: 6 vs. 0
  misc_feature: MA Experiment 20000179 PARAMETER Experiment Name: At_Germinating_Seeds_P Parameter: Tissue Value: Germinating Seeds
  misc_feature: MA Experiment ID: 20001450 Result: Down-regulated in Transcription
  misc_feature: MA Experiment 20001450 PARAMETER Experiment Name: At_Far-red-induction_P Parameter: Age (day) Value: 7
  misc_feature: MA Experiment 20001450 PARAMETER Experiment Name: At_Far-red-induction_P Parameter: Light Value: Far-red vs. White
  misc_feature: MA Experiment 20001450 PARAMETER Experiment Name: At_Far-red-induction_P Parameter: Organism Value: A. thaliana
  misc_feature: MA Experiment 20001450 PARAMETER Experiment Name: At_Far-red-induction_P Parameter: Plant Line Value: Columbia
  misc_feature: MA Experiment 20001450 PARAMETER Experiment Name: At_Far-red-induction_P Parameter: Timepoint (hr) Value: 8
  misc_feature: MA Experiment 20001450 PARAMETER Experiment Name: At_Far-red-induction_P Parameter: Tissue Value: Whole Plant
  misc_feature: MA Experiment ID: 20001557 Result: Down-regulated in Transcription
  misc_feature: MA Experiment 20001557 PARAMETER Experiment Name: At_Drought_Soil_Dry_P Parameter: Age (day) Value: 27
  misc_feature: MA Experiment 20001557 PARAMETER Experiment Name: At_Drought_Soil_Dry_P Parameter: Organism Value: A. thaliana
  misc_feature: MA Experiment 20001557 PARAMETER Experiment Name: At_Drought_Soil_Dry_P Parameter: Plant Line Value: WS
  misc_feature: MA Experiment 20001557 PARAMETER Experiment Name: At_Drought_Soil_Dry_P Parameter: Post Timepoint (hr) Value: 3
  misc_feature: MA Experiment 20001557 PARAMETER Experiment Name: At_Drought_Soil_Dry_P Parameter: Post-Treatment Value: Re-Water vs. No Drought
  misc_feature: MA Experiment 20001557 PARAMETER Experiment Name: At_Drought_Soil_Dry_P Parameter: Timepoint (day) Value: 13
  misc_feature: MA Experiment 20001557 PARAMETER Experiment Name: At_Drought_Soil_Dry_P Parameter: Treatment Value: Drought vs. No Drought
  misc_feature: MA Experiment ID: 20001558 Result: Down-regulated in Transcription
  misc_feature: MA Experiment 20001558 PARAMETER Experiment Name: At_Drought_Soil_Dry_P Parameter: Age (day) Value: 27
  misc_feature: MA Experiment 20001558 PARAMETER Experiment Name: At_Drought_Soil_Dry_P Parameter: Organism Value: A. thaliana
  misc_feature: MA Experiment 20001558 PARAMETER Experiment Name: At_Drought_Soil_Dry_P Parameter: Plant Line Value: WS
  misc_feature: MA Experiment 20001558 PARAMETER Experiment Name: At_Drought_Soil_Dry_P Parameter: Post Timepoint (hr) Value: 6
  misc_feature: MA Experiment 20001558 PARAMETER Experiment Name: At_Drought_Soil_Dry_P Parameter: Post-Treatment Value: Re-Water vs. No Drought
  misc_feature: MA Experiment 20001558 PARAMETER Experiment Name: At_Drought_Soil_Dry_P Parameter: Timepoint (day) Value: 13
  misc_feature: MA Experiment 20001558 PARAMETER Experiment Name: At_Drought_Soil_Dry_P Parameter: Treatment Value: Drought vs. No Drought
  misc_feature: MA Experiment ID: 20001905 Result: Down-regulated in Transcription
  misc_feature: MA Experiment 20001905 PARAMETER Experiment Name: At_Drought_Reproduction_P Parameter: Age (day) Value: 40
  misc_feature: MA Experiment 20001905 PARAMETER Experiment Name: At_Drought_Reproduction_P Parameter: Organism Value: A. thaliana
  misc_feature: MA Experiment 20001905 PARAMETER Experiment Name: At_Drought_Reproduction_P Parameter: Plant Line Value: WS
  misc_feature: MA Experiment 20001905 PARAMETER Experiment Name: At_Drought_Reproduction_P Parameter: Timepoint (day) Value: 10
  misc_feature: MA Experiment 20001905 PARAMETER Experiment Name: At_Drought_Reproduction_P Parameter: Tissue Value: Rosettes
  misc_feature: MA Experiment 20001905 PARAMETER Experiment Name: At_Drought_Reproduction_P Parameter: Treatment Value: Drought vs. No Drought
aatcttcgtaccaaagtcgccggagatcggaagctaacacgggaagatttagccggaagaaatggcttcgttaggtttcaacctcggcttcaccttctccaatgcacaaattcagcagcatcgaaaagtttccggaggtggaagagctcgcgtaatctcctgtaacagctcttcttcttcttcttctcaagcatcatctcctcaggggatttctgcagtgacgcctcttgagatagagctcgagttcttcggtccgaagccgggtagcgacgggtcatatccggtagataaagcaaaggctgtgagtggagataagcttctcagaagcattatgcaggataacaaaattgaactctacgctgcttacgggaaagtgatgaactgtggtggtggaggaagctgtggaacttgcattgtggagatactcgatggcagagatcttctgaatgagagaacagatacagaaaaccggtacctgaaaaagaagccggaatcttggagactcgcatgtcaaacaatagtagggaacaaagaaaactcaggaaaggttgtcgtgcagcggattccacagtggaagaagtgaattaatgtaaaggttatttgtctcagatttatgtgtatataacacatctctgtatgaatgttgtctcgtattaatggaagattcgtttgtct

SEQ ID NO: 21103 - protein, 173 aa, Arabidopsis thaliana
  peptide (1)..(173): Ceres Seq. ID no. 12322772
  misc_feature (108)..(156): Pfam Name: 2Fe-2S iron-sulfur cluster binding domain Pfam Description: 2Fe-2S iron-sulfur cluster binding domain
  misc_feature (80)..(154): Homolog of NCBI NO: 22299072 NR Description: ORF_ID:tll1529~probable ferredoxin
  misc_feature (86)..(157): Homolog of NCBI NO: 37522567 NR Description: probable ferredoxin [Gloeobacter violaceus]
  misc_feature (87)..(154): Homolog of NCBI NO: 16330969 NR Description: hydrogenase component [Synechocystis sp. PCC
  misc_feature (76)..(154): Homolog of NCBI NO: 15638595 NR Description: putative [2Fe-2S] ferredoxin [Anabaena variabilis]
  misc_feature (76)..(154): Homolog of NCBI NO: 17228379 NR Description: probable ferredoxin [2Fe-2S] [Nostoc sp. PCC
  misc_feature (40)..(172): Homolog of NCBI NO: 15228165 NR Description: putative 2Fe-2S iron-sulfur cluster protein
  misc_feature (19)..(172): Homolog of NCBI NO: 33146986 NR Description: 2Fe-2S iron-sulfur cluster protein-like
  misc_feature (121)..(141): Homolog of NCBI NO: 7486413 NR Description: hypothetical protein F4D11.210 - Arabidopsis
  misc_feature (1)..(102): Homolog of NCBI NO: 7486413 NR Description: hypothetical protein F4D11.210 - Arabidopsis
  misc_feature (1)..(173): Homolog of NCBI NO: 18418042 NR Description: expressed protein; protein id: At4g32590.1
MASLGFNLGFTFSNAQIQQHRKVSGGGRARVISCNSSSSSSSQASSPQGISAVTPLEIELEFFGPKPGSDGSYPVDKAKAVSGDKLLRSIMQDNKIELYAAYGKVMNCGGGGSCGTCIVEILDGRDLLNERTDTENRYLKKKPESWRLACQTIVGNKENSGKVVVQRIPQWKK

SEQ ID NO: 21104 - DNA, 1700 bp, Arabidopsis thaliana
  misc_feature (1)..(1700): Ceres Seq. ID no. 13488833
  misc_feature: MA Experiment ID: 108434 Result: Up-regulated in Transcription
  misc_feature: MA Experiment 108434 PARAMETER Experiment Name: At_Root_Tips_cDNA_P Parameter: Tissue Value: Root Tips
  misc_feature: MA Experiment ID: 108461 Result: Up-regulated in Transcription
  misc_feature: MA Experiment 108461 PARAMETER Experiment Name: At_Germinating_Seeds_cDNA_P Parameter: Age (day) Value: 1 vs. 0
  misc_feature: MA Experiment 108461 PARAMETER Experiment Name: At_Germinating_Seeds_cDNA_P Parameter: Tissue Value: Germinating Seeds
  misc_feature: MA Experiment ID: 108462 Result: Up-regulated in Transcription
  misc_feature: MA Experiment 108462 PARAMETER Experiment Name: At_Germinating_Seeds_cDNA_P Parameter: Age (day) Value: 2 vs. 0
  misc_feature: MA Experiment 108462 PARAMETER Experiment Name: At_Germinating_Seeds_cDNA_P Parameter: Tissue Value: Germinating Seeds
  misc_feature: MA Experiment ID: 20000087 Result: Down-regulated in Transcription
  misc_feature: MA Experiment 20000087 PARAMETER Experiment Name: At_100uM_ABA_Mutants_cDNA_P Parameter: Plant Line Value: WS
  misc_feature: MA Experiment 20000087 PARAMETER Experiment Name: At_100uM_ABA_Mutants_cDNA_P Parameter: Timepoint (hr) Value: 6
  misc_feature: MA Experiment 20000087 PARAMETER Experiment Name: At_100uM_ABA_Mutants_cDNA_P Parameter: Tissue Value: Aerial
  misc_feature: MA Experiment 20000087 PARAMETER Experiment Name: At_100uM_ABA_Mutants_cDNA_P Parameter: Treatment Value: 100uM ABA vs. No Treatment
  misc_feature: MA Experiment ID: 20000173 Result: Down-regulated in Transcription
  misc_feature: MA Experiment 20000173 PARAMETER Experiment Name: At_42deg_Heat_P Parameter: Age (day) Value: 14
  misc_feature: MA Experiment 20000173 PARAMETER Experiment Name: At_42deg_Heat_P Parameter: Organism Value: A. thaliana
  misc_feature: MA Experiment 20000173 PARAMETER Experiment Name: At_42deg_Heat_P Parameter: Plant Line Value: WS
  misc_feature: MA Experiment 20000173 PARAMETER Experiment Name: At_42deg_Heat_P Parameter: Temperature (deg C) Value: 42 vs. 22
  misc_feature: MA Experiment 20000173 PARAMETER Experiment Name: At_42deg_Heat_P Parameter: Timepoint (hr) Value: 6
  misc_feature: MA Experiment 20000173 PARAMETER Experiment Name: At_42deg_Heat_P Parameter: Tissue Value: Aerial
  misc_feature: MA Experiment ID: 20000179 Result: Up-regulated in Transcription
  misc_feature: MA Experiment 20000179 PARAMETER Experiment Name: At_Germinating_Seeds_P Parameter: Age (hr) Value: 6 vs. 0
  misc_feature: MA Experiment 20000179 PARAMETER Experiment Name: At_Germinating_Seeds_P Parameter: Tissue Value: Germinating Seeds
  misc_feature: MA Experiment ID: 20000180 Result: Up-regulated in Transcription
  misc_feature: MA Experiment 20000180 PARAMETER Experiment Name: At_Germinating_Seeds_P Parameter: Age (hr) Value: 24 vs. 0
  misc_feature: MA Experiment 20000180 PARAMETER Experiment Name: At_Germinating_Seeds_P Parameter: Tissue Value: Germinating Seeds
  misc_feature: MA Experiment ID: 20001911 Result: Down-regulated in Transcription
  misc_feature: MA Experiment 20001911 PARAMETER Experiment Name: At_Drought_Reproduction_P Parameter: Age (day) Value: 40
  misc_feature: MA Experiment 20001911 PARAMETER Experiment Name: At_Drought_Reproduction_P Parameter: Organism Value: A. thaliana
  misc_feature: MA Experiment 20001911 PARAMETER Experiment Name: At_Drought_Reproduction_P Parameter: Plant Line Value: WS
  misc_feature: MA Experiment 20001911 PARAMETER Experiment Name: At_Drought_Reproduction_P Parameter: Timepoint (day) Value: 10
  misc_feature: MA Experiment 20001911 PARAMETER Experiment Name: At_Drought_Reproduction_P Parameter: Tissue Value: Flowers
  misc_feature: MA Experiment 20001911 PARAMETER Experiment Name: At_Drought_Reproduction_P Parameter: Treatment Value: Drought vs. No Drought
aaaaaaaaaaaaagaaagaaaaaaaattcagaagcctttgttttcatcgatgaataaattaacaaacaaaactaaaaaataggatattcgctggccgaatcgcgtcgatccacatcgcaggtgagggttcctgcaatttatccctcgtggtctctgaatctcagatcgtcgtcaacgaatcctccattttctgaatcaaaattttctggaaacaatggggagcttggggacgatgctgagatatccggatgacatatatccgctcctgaagatgaaacgagcgattgagaaagcggagaagcagatccctcctgagccacactggggtttctgctattcgatgctccacaaggtttctcgaagcttttctctcgttattcagcaactcaacaccgagctccgtaacgccgtgtgtgtgttctacttggttctccgagctcttgatactgttgaggatgatactagcataccaactgatgaaaaggttcccatcctgatagcttttcaccggcacatatacgatactgattggcattattcatgtggtacgaaggagtacaagattctaatggaccaatttcaccatgtttctgcagcttttttggaacttgaaaaagggtatcaagaggctatcgaggaaattactagaagaatgggtgcagggatggccaagtttatctgccaagaggtagaaactgttgatgactacgatgaatactgccactatgttgctgggcttgttggtttaggtttgtcgaaactcttcctcgctgcaggatcagaggttttgacaccagattgggaggcgatttccaattcaatgggtttatttctgcagaaaacaaacattatcagagattatcttgaggacattaatgagataccaaaatcccgcatgttttggcctcgcgagatttggggcaaatatgctgacaagcttgaggatttaaaatacgaggagaacacaaacaaatccgtacagtgcttaaatgaaatggttaccaatgcgttgatgcatattgaagattgcctgaaatacatggtttccttgcgtgatccttccatatttcggttctgtgccatccctcagatcatggcgattggaacacttgcattatgctataacaatgaacaagtattcagaggcgttgtgaaactgaggcgaggtcttactgctaaagtcattgatcgtacaaagacaatggctgatgtctatggtgctttctatgatttttcctgcatgctgaagacaaaggttgacaagaacgatccaaatgccagtaagacactaaaccgacttgaagccgttcagaaactctgcagagacgctggagttcttcaaaacagaaaatcttatgttaatgacaaaggacaaccaaacagtgtctttattataatggttgtgattctactggccatagtctttgcatatctcagagcaaactgagtgatccatgtaagcgagtctgattgtatcaccatcattcaagatgttcagagcaaatttgagtgatgaagtaatctaggttgattcttattcacgccactgaatcctaagcaagattgtttccagaacaaacagagtttaagcatggtttagtctaaaaccatggattctattttagttactaccttcgttatctaaacgtgcatttgttcatctatttttattccttgtgtttaaagttctttctttgttt

SEQ ID NO: 21105 - protein, 410 aa, Arabidopsis thaliana
  peptide (1)..(410): Ceres Seq. ID no. 13488834
  misc_feature (44)..(333): Pfam Name: Squalene/phytoene synthase Pfam Description: Squalene/phytoene synthase
  misc_feature (1)..(410): Homolog of NCBI NO: 11258828 NR Description: farnesyl-diphosphate farnesyltransferase (EC
  misc_feature (1)..(410): Homolog of NCBI NO: 15236168 NR Description: farnesyl-diphosphate farnesyltransferase
MGSLGTMLRYPDDIYPLLKMKRAIEKAEKQIPPEPHWGFCYSMLHKVSRSFSLVIQQLNTELRNAVCVFYLVLRALDTVEDDTSIPTDEKVPILIAFHRHIYDTDWHYSCGTKEYKILMDQFHHVSAAFLELEKGYQEAIEEITRRMGAGMAKFICQEVETVDDYDEYCHYVAGLVGLGLSKLFLAAGSEVLTPDWEAISNSMGLFLQKTNIIRDYLEDINEIPKSRMFWPREIWGKYADKLEDLKYEENTNKSVQCLNEMVTNALMHIEDCLKYMVSLRDPSIFRFCAIPQIMAIGTLALCYNNEQVFRGVVKLRRGLTAKVIDRTKTMADVYGAFYDFSCMLKTKVDKNDPNASKTLNRLEAVQKLCRDAGVLQNRKSYVNDKGQPNSVFIIMVVILLAIVFAYLRAN

SEQ ID NO: 21106 - protein, 404 aa, Arabidopsis thaliana
  peptide (1)..(404): Ceres Seq. ID no. 13488835
  misc_feature (38)..(327): Pfam Name: Squalene/phytoene synthase Pfam Description: Squalene/phytoene synthase
  misc_feature (1)..(404): Homolog of NCBI NO: 11258828 NR Description: farnesyl-diphosphate farnesyltransferase (EC
  misc_feature (1)..(404): Homolog of NCBI NO: 15236168 NR Description: farnesyl-diphosphate farnesyltransferase
MLRYPDDIYPLLKMKRAIEKAEKQIPPEPHWGFCYSMLHKVSRSFSLVIQQLNTELRNAVCVFYLVLRALDTVEDDTSIPTDEKVPILIAFHRHIYDTDWHYSCGTKEYKILMDQFHHVSAAFLELEKGYQEAIEEITRRMGAGMAKFICQEVETVDDYDEYCHYVAGLVGLGLSKLFLAAGSEVLTPDWEAISNSMGLFLQKTNIIRDYLEDINEIPKSRMFWPREIWGKYADKLEDLKYEENTNKSVQCLNEMVTNALMHIEDCLKYMVSLRDPSIFRFCAIPQIMAIGTLALCYNNEQVFRGVVKLRRGLTAKVIDRTKTMADVYGAFYDFSCMLKTKVDKNDPNASKTLNRLEAVQKLCRDAGVLQNRKSYVNDKGQPNSVFIIMVVILLAIVFAYLRAN

SEQ ID NO: 21107 - protein, 391 aa, Arabidopsis thaliana
  peptide (1)..(391): Ceres Seq. ID no. 13488836
  misc_feature (25)..(314): Pfam Name: Squalene/phytoene synthase Pfam Description: Squalene/phytoene synthase
  misc_feature (1)..(391): Homolog of NCBI NO: 11258828 NR Description: farnesyl-diphosphate farnesyltransferase (EC
  misc_feature (1)..(391): Homolog of NCBI NO: 15236168 NR Description: farnesyl-diphosphate farnesyltransferase
MKRAIEKAEKQIPPEPHWGFCYSMLHKVSRSFSLVIQQLNTELRNAVCVFYLVLRALDTVEDDTSIPTDEKVPILIAFHRHIYDTDWHYSCGTKEYKILMDQFHHVSAAFLELEKGYQEAIEEITRRMGAGMAKFICQEVETVDDYDEYCHYVAGLVGLGLSKLFLAAGSEVLTPDWEAISNSMGLFLQKTNIIRDYLEDINEIPKSRMFWPREIWGKYADKLEDLKYEENTNKSVQCLNEMVTNALMHIEDCLKYMVSLRDPSIFRFCAIPQIMAIGTLALCYNNEQVFRGVVKLRRGLTAKVIDRTKTMADVYGAFYDFSCMLKTKVDKNDPNASKTLNRLEAVQKLCRDAGVLQNRKSYVNDKGQPNSVFIIMVVILLAIVFAYLRAN

SEQ ID NO: 21108 - DNA, 1879 bp, Arabidopsis thaliana
  misc_feature (1)..(1879): Ceres Seq. ID no. 13509253
  misc_feature: MA Experiment ID: 108461 Result: Up-regulated in Transcription
  misc_feature: MA Experiment 108461 PARAMETER Experiment Name: At_Germinating_Seeds_cDNA_P Parameter: Age (day) Value: 1 vs. 0
  misc_feature: MA Experiment 108461 PARAMETER Experiment Name: At_Germinating_Seeds_cDNA_P Parameter: Tissue Value: Germinating Seeds
  misc_feature: MA Experiment ID: 108462 Result: Up-regulated in Transcription
  misc_feature: MA Experiment 108462 PARAMETER Experiment Name: At_Germinating_Seeds_cDNA_P Parameter: Age (day) Value: 2 vs. 0
  misc_feature: MA Experiment 108462 PARAMETER Experiment Name: At_Germinating_Seeds_cDNA_P Parameter: Tissue Value: Germinating Seeds
  misc_feature: MA Experiment ID: 108463 Result: Up-regulated in Transcription
  misc_feature: MA Experiment 108463 PARAMETER Experiment Name: At_Germinating_Seeds_cDNA_P Parameter: Age (day) Value: 3 vs. 0
  misc_feature: MA Experiment 108463 PARAMETER Experiment Name: At_Germinating_Seeds_cDNA_P Parameter: Tissue Value: Germinating Seeds
  misc_feature: MA Experiment ID: 108464 Result: Up-regulated in Transcription
  misc_feature: MA Experiment 108464 PARAMETER Experiment Name: At_Germinating_Seeds_cDNA_P Parameter: Age (day) Value: 4 vs. 0
  misc_feature: MA Experiment 108464 PARAMETER Experiment Name: At_Germinating_Seeds_cDNA_P Parameter: Tissue Value: Germinating Seeds
  misc_feature: MA Experiment ID: 108561 Result: Down-regulated in Transcription
  misc_feature: MA Experiment 108561 PARAMETER Experiment Name: At_100uM_ABA_cDNA_P Parameter: Timepoint (hr) Value: 6
  misc_feature: MA Experiment 108561 PARAMETER Experiment Name: At_100uM_ABA_cDNA_P Parameter: Tissue Value: Aerial
  misc_feature: MA Experiment 108561 PARAMETER Experiment Name: At_100uM_ABA_cDNA_P Parameter: Treatment Value: 100uM ABA vs. No Treatment
  misc_feature: MA Experiment ID: 108577 Result: Down-regulated in Transcription
  misc_feature: MA Experiment 108577 PARAMETER Experiment Name: At_42deg_Heat_cDNA_P Parameter: Temperature (deg C) Value: 42 vs. 22
  misc_feature: MA Experiment 108577 PARAMETER Experiment Name: At_42deg_Heat_cDNA_P Parameter: Timepoint (hr) Value: 6
  misc_feature: MA Experiment 108577 PARAMETER Experiment Name: At_42deg_Heat_cDNA_P Parameter: Tissue Value: Aerial
  misc_feature: MA Experiment ID: 108595 Result: Down-regulated in Transcription
  misc_feature: MA Experiment 108595 PARAMETER Experiment Name: At_Ler-pi_Ovule_cDNA_P Parameter: Plant Line Value: null
  misc_feature: MA Experiment ID: 20000030 Result: Down-regulated in Transcription
  misc_feature: MA Experiment 20000030 PARAMETER Experiment Name: At_CS6630_Roots_cDNA_P Parameter: Plant Line Value: CS6630 vs. WS
  misc_feature: MA Experiment 20000030 PARAMETER Experiment Name: At_CS6630_Roots_cDNA_P Parameter: Tissue Value: Roots
  misc_feature: MA Experiment ID: 20000069 Result: Down-regulated in Transcription
  misc_feature: MA Experiment 20000069 PARAMETER Experiment Name: At_100uM_ABA_Mutants_cDNA_P Parameter: Plant Line Value: CS23
  misc_feature: MA Experiment 20000069 PARAMETER Experiment Name: At_100uM_ABA_Mutants_cDNA_P Parameter: Timepoint (hr) Value: 6
  misc_feature: MA Experiment 20000069 PARAMETER Experiment Name: At_100uM_ABA_Mutants_cDNA_P Parameter: Tissue Value: Aerial
  misc_feature: MA Experiment 20000069 PARAMETER Experiment Name: At_100uM_ABA_Mutants_cDNA_P Parameter: Treatment Value: 100uM ABA vs. No Treatment
  misc_feature: MA Experiment ID: 20000086 Result: Down-regulated in Transcription
  misc_feature: MA Experiment 20000086 PARAMETER Experiment Name: At_100uM_ABA_Mutants_cDNA_P Parameter: Plant Line Value: CS22
  misc_feature: MA Experiment 20000086 PARAMETER Experiment Name: At_100uM_ABA_Mutants_cDNA_P Parameter: Timepoint (hr) Value: 6
  misc_feature: MA Experiment 20000086 PARAMETER Experiment Name: At_100uM_ABA_Mutants_cDNA_P Parameter: Tissue Value: Aerial
  misc_feature: MA Experiment 20000086 PARAMETER Experiment Name: At_100uM_ABA_Mutants_cDNA_P Parameter: Treatment Value: 100uM ABA vs. No Treatment
  misc_feature: MA Experiment ID: 20000087 Result: Down-regulated in Transcription
  misc_feature: MA Experiment 20000087 PARAMETER Experiment Name: At_100uM_ABA_Mutants_cDNA_P Parameter: Plant Line Value: WS
  misc_feature: MA Experiment 20000087 PARAMETER Experiment Name: At_100uM_ABA_Mutants_cDNA_P Parameter: Timepoint (hr) Value: 6
  misc_feature: MA Experiment 20000087 PARAMETER Experiment Name: At_100uM_ABA_Mutants_cDNA_P Parameter: Tissue Value: Aerial
  misc_feature: MA Experiment 20000087 PARAMETER Experiment Name: At_100uM_ABA_Mutants_cDNA_P Parameter: Treatment Value: 100uM ABA vs. No Treatment
  misc_feature: MA Experiment ID: 20000113 Result: Down-regulated in Transcription
  misc_feature: MA Experiment 20000113 PARAMETER Experiment Name: At_42deg_Heat_cDNA_P Parameter: Temperature (deg C) Value: 42 vs. 22
  misc_feature: MA Experiment 20000113 PARAMETER Experiment Name: At_42deg_Heat_cDNA_P Parameter: Timepoint (hr) Value: 8
  misc_feature: MA Experiment 20000113 PARAMETER Experiment Name: At_42deg_Heat_cDNA_P Parameter: Tissue Value: Aerial
  misc_feature: MA Experiment ID: 20000117 Result: Down-regulated in Transcription
  misc_feature: MA Experiment 20000117 PARAMETER Experiment Name: At_100uM_ABA_Mutants_cDNA_P Parameter: Plant Line Value: Columbia
  misc_feature: MA Experiment 20000117 PARAMETER Experiment Name: At_100uM_ABA_Mutants_cDNA_P Parameter: Timepoint (hr) Value: 6
  misc_feature: MA Experiment 20000117 PARAMETER Experiment Name: At_100uM_ABA_Mutants_cDNA_P Parameter: Tissue Value: Aerial
  misc_feature: MA Experiment 20000117 PARAMETER Experiment Name: At_100uM_ABA_Mutants_cDNA_P Parameter: Treatment Value: 100uM ABA vs. No Treatment
  misc_feature: MA Experiment ID: 20000307 Result: Up-regulated in Transcription
  misc_feature: MA Experiment 20000307 PARAMETER Experiment Name: At_Germinating_Seeds_Sub_P Parameter: Age (hr) Value: 24 vs. 0
  misc_feature: MA Experiment 20000307 PARAMETER Experiment Name: At_Germinating_Seeds_Sub_P Parameter: Organism Value: A. thaliana
  misc_feature: MA Experiment 20000307 PARAMETER Experiment Name: At_Germinating_Seeds_Sub_P Parameter: Plant Line Value: WS
  misc_feature: MA Experiment 20000307 PARAMETER Experiment Name: At_Germinating_Seeds_Sub_P Parameter: Tissue Value: Germinating Seeds
  misc_feature: MA Experiment ID: 20000314 Result: Down-regulated in Transcription
  misc_feature: MA Experiment 20000314 PARAMETER Experiment Name: At_14day_Shoots-Roots_Sub_P Parameter: Age (day) Value: 14
  misc_feature: MA Experiment 20000314 PARAMETER Experiment Name: At_14day_Shoots-Roots_Sub_P Parameter: Organism Value: A. thaliana
  misc_feature: MA Experiment 20000314 PARAMETER Experiment Name: At_14day_Shoots-Roots_Sub_P Parameter: Plant Line Value: WS
  misc_feature: MA Experiment 20000314 PARAMETER Experiment Name: At_14day_Shoots-Roots_Sub_P Parameter: Tissue Value: Roots vs. Whole Plant
  misc_feature: MA Experiment ID: 20000315 Result: Up-regulated in Transcription
  misc_feature: MA Experiment 20000315 PARAMETER Experiment Name: At_14day_Shoots-Roots_Sub_P Parameter: Age (day) Value: 14
  misc_feature: MA Experiment 20000315 PARAMETER Experiment Name: At_14day_Shoots-Roots_Sub_P Parameter: Organism Value: A. thaliana
  misc_feature: MA Experiment 20000315 PARAMETER Experiment Name: At_14day_Shoots-Roots_Sub_P Parameter: Plant Line Value: WS
  misc_feature: MA Experiment 20000315 PARAMETER Experiment Name: At_14day_Shoots-Roots_Sub_P Parameter: Tissue Value: Shoots vs. Whole Plant
  misc_feature: MA Experiment ID: 20000328 Result: Down-regulated in Transcription
  misc_feature: MA Experiment 20000328 PARAMETER Experiment Name: At_42deg_Heat_Sub_P Parameter: Age (day) Value: 14
  misc_feature: MA Experiment 20000328 PARAMETER Experiment Name: At_42deg_Heat_Sub_P Parameter: Organism Value: A. thaliana
  misc_feature: MA Experiment 20000328 PARAMETER Experiment Name: At_42deg_Heat_Sub_P Parameter: Plant Line Value: WS
  misc_feature: MA Experiment 20000328 PARAMETER Experiment Name: At_42deg_Heat_Sub_P Parameter: Temperature (deg C) Value: 42 vs. 22
  misc_feature: MA Experiment 20000328 PARAMETER Experiment Name: At_42deg_Heat_Sub_P Parameter: Timepoint (hr) Value: 6
  misc_feature: MA Experiment 20000328 PARAMETER Experiment Name: At_42deg_Heat_Sub_P Parameter: Tissue Value: Aerial
  misc_feature: MA Experiment ID: 20000440 Result: Up-regulated in Transcription
  misc_feature: MA Experiment 20000440 PARAMETER Experiment Name: At_Closed-Flower__Sub_P Parameter: Tissue Value: Closed Flower vs. Whole Plant
atagattatagatataacccactgaattaatattacggtcttcaatataggtgcatttaaaacataacgttccctctcttgtcttcttatttttgctctctgttctttagaactgccattaacgagagtgagagagagacacacacacacagcgagtgaaaatgtctccggagaagaagagtcaaaacttccctccaataacggaatgcagagacggagagtacgattcgatagccgccgatcttgacgggactctgcttctctcaagaagctccttcccttacttcatgctcgtcgctgttgaagctggaagccttttacgtggactaatcctccttctctcgttaccattcgtcattatctcttacctattcgtatccgaatctcttggtatccagatcctcatcttcatctcattcgctggtctcaaaatccgcgatatcgaacttgtctctcgcgcagttcttccacggtacgagatctaacatagagtgttttcttgttagtagatcactttagtttttttccgatgaactatgtttaggttttacgcggcggatgtgaggaaagacagttttgaggtgtttgataagtgtaagaagaaagtggtagtgacggcgaatccgattgtgatggtggaggcgtttgtgaaggattatcttggaggtgataaagttttgggaacagagattgaagttaaccctaaaaccaatagagccactggatttgtgaagaagcctggtgttcttgttggtgatcttaagaggttagccattttaaaagagtttggtaacgaatcacctgatctcggcctcggtgatcgaacctctgatcatgatttcatgtctctctgcaagaaaggttacatggttcatgcgaccaagtcagccacaacgattccaaaagaacgcttaaagaaccgcatagtcttccatgatgggcgtttagcgcaacgtccaactccgttaaacgccattatcacatacctatggcttccttttggtttcatcctctccatcattcgcgtctacttcaacctccctttacctgaaagatttgtccgttacacttacgagatgctcgggatccacttaaccattcgtggtcatcgtcctccacctccttcccctggaactcttggcaacctctatgtccttaaccaccgtaccgcgcttgatcccatcatcgttgctattgctcttggacgtaagatctgttgcgtcacttacagtgtctctcgtctctcccttatgctttctcctattcctgctgttgccctcacccgtgaccgtgccaccgatgctgccaacatgagaaaacttctcgagaaaggcgacttggtgatatgtcccgaaggcacgacgtgcagagaagagtatctactgagatttagcgctctattcgcagagctaagcgaccggattgtgccagtagcgatgaactgtaaacaaggaatgttcaacgggaccacagttaggggtgtgaagttttgggacccttacttcttcttcatgaacccaagaccaagctatgaagccactttcttggatcgtttgcctgaagaaatgactgtcaacggtggtggcaagactcctatagaggtggctaattacgtccagaaagttatcggcgcggttttgggcttcgaatgcaccgaacttactcgcaaggataaatatcttttgcttggaggtaatgacggcaaggtagagtctatcaacaacaccaagaagtgaaaatccaaacaagggttttttcttgttatgtcgtatacgaattttcatgtgtgtaattgctggagctcttgtcatcattatggtacgtttttgttatgtgtaatacgacgtatatatgtttgaataaaactatgtttcggtgg

SEQ ID NO: 21109 - protein, 399 aa, Arabidopsis thaliana
  peptide (1)..(399): Ceres Seq. ID no. 13509254
  misc_feature (185)..(302): Pfam Name: Acyltransferase Pfam Description: Acyltransferase
  misc_feature (185)..(302): Pfam Name: Acyltransferase Pfam Description: Acyltransferase
  misc_feature (3)..(107): Homolog of NCBI NO: 15236810 NR Description: expressed protein [Arabidopsis thaliana]
  misc_feature (3)..(395): Homolog of NCBI NO: 15239924 NR Description: phospholipid/glycerol acyltransferase family
  misc_feature (3)..(395): Homolog of NCBI NO: 15229747 NR Description: expressed protein [Arabidopsis thaliana]
  misc_feature (3)..(393): Homolog of NCBI NO: 37534314 NR Description: hypothetical protein [Oryza sativa (japonica
  misc_feature (3)..(399): Homolog of NCBI NO: 29788867 NR Description: hypothetical protein [Oryza sativa (japonica
  misc_feature (3)..(107): Homolog of NCBI NO: 15236810 NR Description: expressed protein [Arabidopsis thaliana]
  misc_feature (3)..(395): Homolog of NCBI NO: 15229747 NR Description: expressed protein [Arabidopsis thaliana]
  misc_feature (3)..(399): Homolog of NCBI NO: 29788867 NR Description: hypothetical protein [Oryza sativa (japonica
  misc_feature (1)..(398): Homolog of NCBI NO: 15223437 NR Description: expressed protein [Arabidopsis thaliana]
  misc_feature (1)..(398): Homolog of NCBI NO: 17064780 NR Description: Unknown protein [Arabidopsis thaliana]
  misc_feature (3)..(391): Homolog of NCBI NO: 15224445 NR Description: phospholipid/glycerol acyltransferase family
  misc_feature (111)..(399): Homolog of NCBI NO: 15236797 NR Description: expressed protein [Arabidopsis thaliana]
  misc_feature (3)..(399): Homolog of NCBI NO: 38000002 NR Description: unknown protein [Oryza sativa (japonica
  misc_feature (3)..(393): Homolog of NCBI NO: 37534314 NR Description: hypothetical protein [Oryza sativa (japonica
  misc_feature (3)..(395): Homolog of NCBI NO: 15239924 NR Description: phospholipid/glycerol acyltransferase family
  misc_feature (3)..(399): Homolog of NCBI NO: 38000002 NR Description: unknown protein [Oryza sativa (japonica
  misc_feature (111)..(399): Homolog of NCBI NO: 15236797 NR Description: expressed protein [Arabidopsis thaliana]
  misc_feature (3)..(391): Homolog of NCBI NO: 15224445 NR Description: phospholipid/glycerol acyltransferase family
  misc_feature (1)..(398): Homolog of NCBI NO: 17064780 NR Description: Unknown protein [Arabidopsis thaliana]
  misc_feature (1)..(398): Homolog of NCBI NO: 15223437 NR Description: expressed protein [Arabidopsis thaliana]
MFRFYAADVRKDSFEVFDKCKKKVVVTANPIVMVEAFVKDYLGGDKVLGTEIEVNPKTNRATGFVKKPGVLVGDLKRLAILKEFGNESPDLGLGDRTSDHDFMSLCKKGYMVHATKSATTIPKERLKNRIVFHDGRLAQRPTPLNAIITYLWLPFGFILSIIRVYFNLPLPERFVRYTYEMLGIHLTIRGHRPPPPSPGTLGNLYVLNHRTALDPIIVAIALGRKICCVTYSVSRLSLMLSPIPAVALTRDRATDAANMRKLLEKGDLVICPEGTTCREEYLLRFSALFAELSDRIVPVAMNCKQGMFNGTTVRGVKFWDPYFFFMNPRPSYEATFLDRLPEEMTVNGGGKTPIEVANYVQKVIGAVLGFECTELTRKDKYLLLGGNDGKVESINNTKK

SEQ ID NO: 21110 - protein, 367 aa, Arabidopsis thaliana
  peptide (1)..(367): Ceres Seq. ID no. 13509255
  misc_feature (153)..(270): Pfam Name: Acyltransferase Pfam Description: Acyltransferase
  misc_feature (153)..(270): Pfam Name: Acyltransferase Pfam Description: Acyltransferase
  misc_feature (1)..(75): Homolog of NCBI NO: 15236810 NR Description: expressed protein [Arabidopsis thaliana]
  misc_feature (1)..(363): Homolog of NCBI NO: 15239924 NR Description: phospholipid/glycerol acyltransferase family
  misc_feature (1)..(363): Homolog of NCBI NO: 15229747 NR Description: expressed protein [Arabidopsis thaliana]
  misc_feature (1)..(361): Homolog of NCBI NO: 37534314 NR Description: hypothetical protein [Oryza sativa (japonica
  misc_feature (1)..(367): Homolog of NCBI NO: 29788867 NR Description: hypothetical protein [Oryza sativa (japonica
  misc_feature (1)..(75): Homolog of NCBI NO: 15236810 NR Description: expressed protein [Arabidopsis thaliana]
  misc_feature (1)..(363): Homolog of NCBI NO: 15229747 NR Description: expressed protein [Arabidopsis thaliana]
  misc_feature (1)..(367): Homolog of NCBI NO: 29788867 NR Description: hypothetical protein [Oryza sativa (japonica
  misc_feature (1)..(366): Homolog of NCBI NO: 15223437 NR Description: expressed protein [Arabidopsis thaliana]
  misc_feature (1)..(366): Homolog of NCBI NO: 17064780 NR Description: Unknown protein [Arabidopsis thaliana]
  misc_feature (1)..(359): Homolog of NCBI NO: 15224445 NR Description: phospholipid/glycerol acyltransferase family
  misc_feature (79)..(367): Homolog of NCBI NO: 15236797 NR Description: expressed protein [Arabidopsis thaliana]
  misc_feature (1)..(367): Homolog of NCBI NO: 38000002 NR Description: unknown protein [Oryza sativa (japonica
  misc_feature (1)..(361): Homolog of NCBI NO: 37534314 NR Description: hypothetical protein [Oryza sativa (japonica
  misc_feature (1)..(363): Homolog of NCBI NO: 15239924 NR Description: phospholipid/glycerol acyltransferase family
  misc_feature (1)..(367): Homolog of NCBI NO: 38000002 NR Description: unknown protein [Oryza sativa (japonica
  misc_feature (79)..(367): Homolog of NCBI NO: 15236797 NR Description: expressed protein [Arabidopsis thaliana]
  misc_feature (1)..(359): Homolog of NCBI NO: 15224445 NR Description: phospholipid/glycerol acyltransferase family
  misc_feature (1)..(366): Homolog of NCBI NO: 17064780 NR Description: Unknown protein [Arabidopsis thaliana]
  misc_feature (1)..(366): Homolog of NCBI NO: 15223437 NR Description: expressed protein [Arabidopsis thaliana]
MVEAFVKDYLGGDKVLGTEIEVNPKTNRATGFVKKPGVLVGDLKRLAILKEFGNESPDLGLGDRTSDHDFMSLCKKGYMVHATKSATTIPKERLKNRIVFHDGRLAQRPTPLNAIITYLWLPFGFILSIIRVYFNLPLPERFVRYTYEMLGIHLTIRGHRPPPPSPGTLGNLYVLNHRTALDPIIVAIALGRKICCVTYSVSRLSLMLSPIPAVALTRDRATDAANMRKLLEKGDLVICPEGTTCREEYLLRFSALFAELSDRIVPVAMNCKQGMFNGTTVRGVKFWDPYFFFMNPRPSYEATFLDRLPEEMTVNGGGKTPIEVANYVQKVIGAVLGFECTELTRKDKYLLLGGNDGKVESINNTKK

SEQ ID NO: 21111 - protein, 297 aa, Arabidopsis thaliana
  peptide (1)..(297): Ceres Seq. ID no. 13509256
  misc_feature (83)..(200): Pfam Name: Acyltransferase Pfam Description: Acyltransferase
  misc_feature (83)..(200): Pfam Name: Acyltransferase Pfam Description: Acyltransferase
  misc_feature (1)..(290): Homolog of NCBI NO: 18378959 NR Description: phospholipid/glycerol acyltransferase family
  misc_feature (1)..(293): Homolog of NCBI NO: 15239924 NR Description: phospholipid/glycerol acyltransferase family
  misc_feature (1)..(293): Homolog of NCBI NO: 15229747 NR Description: expressed protein [Arabidopsis thaliana]
  misc_feature (1)..(291): Homolog of NCBI NO: 37534314 NR Description: hypothetical protein [Oryza sativa (japonica
  misc_feature (1)..(297): Homolog of NCBI NO: 29788867 NR Description: hypothetical protein [Oryza sativa (japonica
  misc_feature (1)..(290): Homolog of NCBI NO: 18378959 NR Description: phospholipid/glycerol acyltransferase family
  misc_feature (1)..(293): Homolog of NCBI NO: 15229747 NR Description: expressed protein [Arabidopsis thaliana]
  misc_feature (1)..(296): Homolog of NCBI NO: 17064780 NR Description: Unknown protein [Arabidopsis thaliana]
  misc_feature (1)..(289): Homolog of NCBI NO: 15224445 NR Description: phospholipid/glycerol acyltransferase family
  misc_feature (9)..(297): Homolog of NCBI NO: 15236797 NR Description: expressed protein [Arabidopsis thaliana]
  misc_feature (1)..(297): Homolog of NCBI NO: 38000002 NR Description: unknown protein [Oryza sativa (japonica
  misc_feature (1)..(297): Homolog of NCBI NO: 29788867 NR Description: hypothetical protein [Oryza sativa (japonica
  misc_feature (1)..(291): Homolog of NCBI NO: 37534314 NR Description: hypothetical protein [Oryza sativa (japonica
  misc_feature (1)..(293): Homolog of NCBI NO: 15239924 NR Description: phospholipid/glycerol acyltransferase family
  misc_feature (1)..(296): Homolog of NCBI NO: 15223437 NR Description: expressed protein [Arabidopsis thaliana]
  misc_feature (1)..(297): Homolog of NCBI NO: 38000002 NR Description: unknown protein [Oryza sativa (japonica
  misc_feature (9)..(297): Homolog of NCBI NO: 15236797 NR Description: expressed protein [Arabidopsis thaliana]
  misc_feature (1)..(289): Homolog of NCBI NO: 15224445 NR Description: phospholipid/glycerol acyltransferase family
  misc_feature (1)..(296): Homolog of NCBI NO: 17064780 NR Description: Unknown protein [Arabidopsis thaliana]
  misc_feature (1)..(296): Homolog of NCBI NO: 15223437 NR Description: expressed protein [Arabidopsis thaliana]
MSLCKKGYMVHATKSATTIPKERLKNRIVFHDGRLAQRPTPLNAIITYLWLPFGFILSIIRVYFNLPLPERFVRYTYEMLGIHLTIRGHRPPPPSPGTLGNLYVLNHRTALDPIIVAIALGRKICCVTYSVSRLSLMLSPIPAVALTRDRATDAANMRKLLEKGDLVICPEGTTCREEYLLRFSALFAELSDRIVPVAMNCKQGMFNGTTVRGVKFWDPYFFFMNPRPSYEATFLDRLPEEMTVNGGGKTPIEVANYVQKVIGAVLGFECTELTRKDKYLLLGGNDGKVESINNTKK

SEQ ID NO: 21112 - DNA, 1488 bp, Arabidopsis thaliana
  misc_feature (1)..(1488): Ceres Seq. ID no. 13487558
  misc_feature: MA Experiment ID: 108473 Result: Down-regulated in Transcription
  misc_feature: MA Experiment 108473 PARAMETER Experiment Name: At_Drought_Flowers_cDNA_P Parameter: Timepoint (hr) Value: 7 d
  misc_feature: MA Experiment 108473 PARAMETER Experiment Name: At_Drought_Flowers_cDNA_P Parameter: Tissue Value: Flower
  misc_feature: MA Experiment 108473 PARAMETER Experiment Name: At_Drought_Flowers_cDNA_P Parameter: Treatment Value: Drought vs. No Drought
  misc_feature: MA Experiment ID: 108474 Result: Down-regulated in Transcription
  misc_feature: MA Experiment 108474 PARAMETER Experiment Name: At_Drought_Flowers_cDNA_P Parameter: Timepoint (hr) Value: null
  misc_feature: MA Experiment 108474 PARAMETER Experiment Name: At_Drought_Flowers_cDNA_P Parameter: Treatment Value: Drought vs. No Drought
  misc_feature: MA Experiment ID: 108489 Result: Down-regulated in Transcription
  misc_feature: MA Experiment ID: 108501 Result: Up-regulated in Transcription
  misc_feature: MA Experiment 108501 PARAMETER Experiment Name: At_ap2_floral_buds_cDNA_P Parameter: Plant Line Value: ap2 (Ler.)
  misc_feature: MA Experiment 108501 PARAMETER Experiment Name: At_ap2_floral_buds_cDNA_P Parameter: Tissue Value: Closed Flower
  misc_feature: MA Experiment ID: 108569 Result: Up-regulated in Transcription
  misc_feature: MA Experiment 108569 PARAMETER Experiment Name: At_0.001%_MeJA__cDNA_P Parameter: Timepoint (hr) Value: 6
  misc_feature: MA Experiment 108569 PARAMETER Experiment Name: At_0.001%_MeJA__cDNA_P Parameter: Tissue Value: Aerial
  misc_feature: MA Experiment 108569 PARAMETER Experiment Name: At_0.001%_MeJA__cDNA_P Parameter: Treatment Value: 0.001% MeJA vs. No Treatment
  misc_feature: MA Experiment ID: 108572 Result: Down-regulated in Transcription
  misc_feature: MA Experiment 108572 PARAMETER Experiment Name: At_Drought_cDNA_P Parameter: Timepoint (hr) Value: 1
  misc_feature: MA Experiment 108572 PARAMETER Experiment Name: At_Drought_cDNA_P Parameter: Tissue Value: Aerial
  misc_feature: MA Experiment 108572 PARAMETER Experiment Name: At_Drought_cDNA_P Parameter: Treatment Value: Drought vs. No Drought
  misc_feature: MA Experiment ID: 108573 Result: Down-regulated in Transcription
  misc_feature: MA Experiment 108573 PARAMETER Experiment Name: At_Drought_cDNA_P Parameter: Timepoint (hr) Value: 6
  misc_feature: MA Experiment 108573 PARAMETER Experiment Name: At_Drought_cDNA_P Parameter: Tissue Value: Aerial
  misc_feature: MA Experiment 108573 PARAMETER Experiment Name: At_Drought_cDNA_P Parameter: Treatment Value: Drought vs. No Drought
  misc_feature: MA Experiment ID: 108574 Result: Up-regulated in Transcription
  misc_feature: MA Experiment 108574 PARAMETER Experiment Name: At_Wounding__cDNA_P Parameter: Timepoint (hr) Value: 1
  misc_feature: MA Experiment 108574 PARAMETER Experiment Name: At_Wounding__cDNA_P Parameter: Tissue Value: Aerial
  misc_feature: MA Experiment 108574 PARAMETER Experiment Name: At_Wounding__cDNA_P Parameter: Treatment Value: Wounding vs. No Wounding
  misc_feature: MA Experiment ID: 108595 Result: Up-regulated in Transcription
  misc_feature: MA Experiment 108595 PARAMETER Experiment Name: At_Ler-pi_Ovule_cDNA_P Parameter: Plant Line Value: null
  misc_feature: MA Experiment ID: 20000069 Result: Down-regulated in Transcription
  misc_feature: MA Experiment 20000069 PARAMETER Experiment Name: At_100uM_ABA_Mutants_cDNA_P Parameter: Plant Line Value: CS23
  misc_feature: MA Experiment 20000069 PARAMETER Experiment Name: At_100uM_ABA_Mutants_cDNA_P Parameter: Timepoint (hr) Value: 6
  misc_feature: MA Experiment 20000069 PARAMETER Experiment Name: At_100uM_ABA_Mutants_cDNA_P Parameter: Tissue Value: Aerial
  misc_feature: MA Experiment 20000069 PARAMETER Experiment Name: At_100uM_ABA_Mutants_cDNA_P Parameter: Treatment Value: 100uM ABA vs. No Treatment
  misc_feature: MA Experiment ID: 20000070 Result: Down-regulated in Transcription
  misc_feature: MA Experiment 20000070 PARAMETER Experiment Name: At_100uM_ABA_Mutants_cDNA_P Parameter: Plant Line Value: CS24
  misc_feature: MA Experiment 20000070 PARAMETER Experiment Name: At_100uM_ABA_Mutants_cDNA_P Parameter: Timepoint (hr) Value: 6
  misc_feature: MA Experiment 20000070 PARAMETER Experiment Name: At_100uM_ABA_Mutants_cDNA_P Parameter: Tissue Value: Aerial
  misc_feature: MA Experiment 20000070 PARAMETER Experiment Name: At_100uM_ABA_Mutants_cDNA_P Parameter: Treatment Value: 100uM ABA vs. No Treatment
  misc_feature: MA Experiment ID: 20000071 Result: Down-regulated in Transcription
  misc_feature: MA Experiment 20000071 PARAMETER Experiment Name: At_100uM_ABA_Mutants_cDNA_P Parameter: Plant Line Value: CS8104
  misc_feature: MA Experiment 20000071 PARAMETER Experiment Name: At_100uM_ABA_Mutants_cDNA_P Parameter: Timepoint (hr) Value: 6
  misc_feature: MA Experiment 20000071 PARAMETER Experiment Name: At_100uM_ABA_Mutants_cDNA_P Parameter: Tissue Value: Aerial
  misc_feature: MA Experiment 20000071 PARAMETER Experiment Name: At_100uM_ABA_Mutants_cDNA_P Parameter: Treatment Value: 100uM ABA vs. No Treatment
  misc_feature: MA Experiment ID: 20000087 Result: Down-regulated in Transcription
  misc_feature: MA Experiment 20000087 PARAMETER Experiment Name: At_100uM_ABA_Mutants_cDNA_P Parameter: Plant Line Value: WS
  misc_feature: MA Experiment 20000087 PARAMETER Experiment Name: At_100uM_ABA_Mutants_cDNA_P Parameter: Timepoint (hr) Value: 6
  misc_feature: MA Experiment 20000087 PARAMETER Experiment Name: At_100uM_ABA_Mutants_cDNA_P Parameter: Tissue Value: Aerial
  misc_feature: MA Experiment 20000087 PARAMETER Experiment Name: At_100uM_ABA_Mutants_cDNA_P Parameter: Treatment Value: 100uM ABA vs. No Treatment
  misc_feature: MA Experiment ID: 20000089 Result: Down-regulated in Transcription
  misc_feature: MA Experiment ID: 20000117 Result: Down-regulated in Transcription
  misc_feature: MA Experiment 20000117 PARAMETER Experiment Name: At_100uM_ABA_Mutants_cDNA_P Parameter: Plant Line Value: Columbia
  misc_feature: MA Experiment 20000117 PARAMETER Experiment Name: At_100uM_ABA_Mutants_cDNA_P Parameter: Timepoint (hr) Value: 6
  misc_feature: MA Experiment 20000117 PARAMETER Experiment Name: At_100uM_ABA_Mutants_cDNA_P Parameter: Tissue Value: Aerial
  misc_feature: MA Experiment 20000117 PARAMETER Experiment Name: At_100uM_ABA_Mutants_cDNA_P Parameter: Treatment Value: 100uM ABA vs. No Treatment
  misc_feature: MA Experiment ID: 20000171 Result: Down-regulated in Transcription
  misc_feature: MA Experiment 20000171 PARAMETER Experiment Name: At_42deg_Heat_P Parameter: Age (day) Value: 14
  misc_feature: MA Experiment 20000171 PARAMETER Experiment Name: At_42deg_Heat_P Parameter: Organism Value: A. thaliana
  misc_feature: MA Experiment 20000171 PARAMETER Experiment Name: At_42deg_Heat_P Parameter: Plant Line Value: WS
  misc_feature: MA Experiment 20000171 PARAMETER Experiment Name: At_42deg_Heat_P Parameter: Temperature (deg C) Value: 42 vs. 22
  misc_feature: MA Experiment 20000171 PARAMETER Experiment Name: At_42deg_Heat_P Parameter: Timepoint (hr) Value: 1
  misc_feature: MA Experiment 20000171 PARAMETER Experiment Name: At_42deg_Heat_P Parameter: Tissue Value: Aerial
  misc_feature: MA Experiment ID: 20000211 Result: Up-regulated in Transcription
  misc_feature: MA Experiment 20000211 PARAMETER Experiment Name: At_0.001percent_MeJA__P Parameter: Age (day) Value: 14
  misc_feature: MA Experiment 20000211 PARAMETER Experiment Name: At_0.001percent_MeJA__P Parameter: Organism Value: A. thaliana
  misc_feature: MA Experiment 20000211 PARAMETER Experiment Name: At_0.001percent_MeJA__P Parameter: Plant Line Value: WS
  misc_feature: MA Experiment 20000211 PARAMETER Experiment Name: At_0.001percent_MeJA__P Parameter: Timepoint (hr) Value: 1
  misc_feature: MA Experiment 20000211 PARAMETER Experiment Name: At_0.001percent_MeJA__P Parameter: Tissue Value: Aerial
  misc_feature: MA Experiment 20000211 PARAMETER Experiment Name: At_0.001percent_MeJA__P Parameter: Treatment Value: 0.001percent MeJA vs. No Treatment
  misc_feature: MA Experiment ID: 20000234 Result: Up-regulated in Transcription
  misc_feature: MA Experiment 20000234 PARAMETER Experiment Name: At_Siliques_P Parameter: Age (day) Value: 21
  misc_feature: MA Experiment 20000234 PARAMETER Experiment Name: At_Siliques_P Parameter: Organism Value: A. thaliana
  misc_feature: MA Experiment 20000234 PARAMETER Experiment Name: At_Siliques_P Parameter: Plant Line Value: WS
  misc_feature: MA Experiment 20000234 PARAMETER Experiment Name: At_Siliques_P Parameter: Tissue Value: Less Than 5mm Siliques vs. Whole Plant
  misc_feature: MA Experiment ID: 20000235 Result: Up-regulated in Transcription
  misc_feature: MA Experiment 20000235 PARAMETER Experiment Name: At_Siliques_P Parameter: Age (day) Value: 21
  misc_feature: MA Experiment 20000235 PARAMETER Experiment Name: At_Siliques_P Parameter: Organism Value: A. thaliana
  misc_feature: MA Experiment 20000235 PARAMETER Experiment Name: At_Siliques_P Parameter: Plant Line Value: WS
  misc_feature: MA Experiment 20000235 PARAMETER Experiment Name: At_Siliques_P Parameter: Tissue Value: 5-10mm Siliques vs. Whole Plant
  misc_feature: MA Experiment ID: 20000264 Result: Up-regulated in Transcription
  misc_feature: MA Experiment 20000264 PARAMETER Experiment Name: At_Open_Flower_P Parameter: Age (day) Value: 21
  misc_feature: MA Experiment 20000264 PARAMETER Experiment Name: At_Open_Flower_P Parameter: Plant Line Value: WS
  misc_feature: MA Experiment 20000264 PARAMETER Experiment Name: At_Open_Flower_P Parameter: Tissue Value: Open Flower vs. Whole Plant
  misc_feature: MA Experiment ID: 20000265 Result: Up-regulated in Transcription
  misc_feature: MA Experiment 20000265 PARAMETER Experiment Name: At_Open_Flower_P Parameter: Age (day) Value: 21
  misc_feature: MA Experiment 20000265 PARAMETER Experiment Name: At_Open_Flower_P Parameter: Plant Line Value: WS
  misc_feature: MA Experiment 20000265 PARAMETER Experiment Name: At_Open_Flower_P Parameter: Tissue Value: Closed Flower vs. Whole Plant
  misc_feature: MA Experiment ID: 20000286 Result: Up-regulated in Transcription
  misc_feature: MA Experiment 20000286 PARAMETER Experiment Name: At_Open_Flower_P Parameter: Age (day) Value: 21
  misc_feature: MA Experiment 20000286 PARAMETER Experiment Name: At_Open_Flower_P Parameter: Plant Line Value: WS
  misc_feature: MA Experiment 20000286 PARAMETER Experiment Name: At_Open_Flower_P Parameter: Tissue Value: Half Open vs. Whole Plant
  misc_feature: MA Experiment ID: 20000437 Result: Down-regulated in Transcription
  misc_feature: MA Experiment 20000437 PARAMETER Experiment Name: At_Drought_P Parameter: Age (day) Value: 8
  misc_feature: MA Experiment 20000437 PARAMETER Experiment Name: At_Drought_P Parameter: Organism Value: A. thaliana
  misc_feature: MA Experiment 20000437 PARAMETER Experiment Name: At_Drought_P Parameter: Plant Line Value: WS
  misc_feature: MA Experiment 20000437 PARAMETER Experiment Name: At_Drought_P Parameter: Timepoint (hr) Value: 24
  misc_feature: MA Experiment 20000437 PARAMETER Experiment Name: At_Drought_P Parameter: Tissue Value: Whole Plant
  misc_feature: MA Experiment 20000437 PARAMETER Experiment Name: At_Drought_P Parameter: Treatment Value: Drought vs. No Drought
  misc_feature: MA Experiment ID: 20000441 Result: Down-regulated in Transcription
  misc_feature: MA Experiment 20000441 PARAMETER Experiment Name: At_1uM_BR-BRZ__P Parameter: Tissue Value: Shoot Apices
  misc_feature: MA Experiment 20000441 PARAMETER Experiment Name: At_1uM_BR-BRZ__P Parameter: Treatment Value: 1uM BR vs. No Treatment
  misc_feature: MA Experiment ID: 20000443 Result: Down-regulated in Transcription
  misc_feature: MA Experiment 20000443 PARAMETER Experiment Name: At_1uM_BR-BRZ__P Parameter: Tissue Value: Shoot Apices
  misc_feature: MA Experiment 20000443 PARAMETER Experiment Name: At_1uM_BR-BRZ__P Parameter: Treatment Value: 1uM BRZ vs. No Treatment
  misc_feature: MA Experiment ID: 20000495 Result: Down-regulated in Transcription
  misc_feature: MA Experiment 20000495 PARAMETER Experiment Name: At_Guard_Cells_P Parameter: Harvest Date Value: 8/2/2002
  misc_feature: MA Experiment 20000495 PARAMETER Experiment Name: At_Guard_Cells_P Parameter: Organism Value: A. thaliana
  misc_feature: MA Experiment 20000495 PARAMETER Experiment Name: At_Guard_Cells_P Parameter: Tissue Value: Guard Cells vs. Leaves
  misc_feature: MA Experiment ID: 20001248 Result: Down-regulated in Transcription
  misc_feature: MA Experiment 20001248 PARAMETER Experiment Name: At_Far-red-induction_P Parameter: Age (day) Value: 7
  misc_feature: MA Experiment 20001248 PARAMETER Experiment Name: At_Far-red-induction_P Parameter: Light Value: Far-red vs. White
  misc_feature: MA Experiment 20001248 PARAMETER Experiment Name: At_Far-red-induction_P Parameter: Organism Value: A. thaliana
  misc_feature: MA Experiment 20001248 PARAMETER Experiment Name: At_Far-red-induction_P Parameter: Plant Line Value: Columbia
  misc_feature: MA Experiment 20001248 PARAMETER Experiment Name: At_Far-red-induction_P Parameter: Timepoint (hr) Value: 4
  misc_feature: MA Experiment 20001248 PARAMETER Experiment Name: At_Far-red-induction_P Parameter: Tissue Value: Whole Plant
  misc_feature: MA Experiment ID: 20001757 Result: Down-regulated in Transcription
  misc_feature: MA Experiment 20001757 PARAMETER Experiment Name: At_50mM_NH4NO3_L-to-H_P Parameter: Timepoint (hr) Value: 6
  misc_feature: MA Experiment 20001757 PARAMETER Experiment Name: At_50mM_NH4NO3_L-to-H_P Parameter: Tissue Value: Leaf
  misc_feature: MA Experiment 20001757 PARAMETER Experiment Name: At_50mM_NH4NO3_L-to-H_P Parameter: Treatment Value: 50mM NH4NO3 vs 100mM Mannitol
  misc_feature: MA Experiment ID: 20001770 Result: Up-regulated in Transcription
  misc_feature: MA Experiment 20001770 PARAMETER Experiment Name: At_Far-red-enriched-adult_P Parameter: Age (day) Value: 28
  misc_feature: MA Experiment 20001770 PARAMETER Experiment Name: At_Far-red-enriched-adult_P Parameter: Light Value: Far-red enriched vs. White
  misc_feature: MA Experiment 20001770 PARAMETER Experiment Name: At_Far-red-enriched-adult_P Parameter: Organism Value: A. thaliana
  misc_feature: MA Experiment 20001770 PARAMETER Experiment Name: At_Far-red-enriched-adult_P Parameter: Plant Line Value: Columbia
  misc_feature: MA Experiment 20001770 PARAMETER Experiment Name: At_Far-red-enriched-adult_P Parameter: Timepoint (hr) Value: 8
  misc_feature: MA Experiment 20001770 PARAMETER Experiment Name: At_Far-red-enriched-adult_P Parameter: Tissue Value: Aerial
  misc_feature: MA Experiment ID: 20001906 Result: Down-regulated in Transcription
  misc_feature: MA Experiment 20001906 PARAMETER Experiment Name: At_Drought_Reproduction_P Parameter: Age (day) Value: 35
  misc_feature: MA Experiment 20001906 PARAMETER Experiment Name: At_Drought_Reproduction_P Parameter: Organism Value: A. thaliana
  misc_feature: MA Experiment 20001906 PARAMETER Experiment Name: At_Drought_Reproduction_P Parameter: Plant Line Value: WS
  misc_feature: MA Experiment 20001906 PARAMETER Experiment Name: At_Drought_Reproduction_P Parameter: Timepoint (day) Value: 5
  misc_feature: MA Experiment 20001906 PARAMETER Experiment Name: At_Drought_Reproduction_P Parameter: Tissue Value: Siliques
  misc_feature: MA Experiment 20001906 PARAMETER Experiment Name: At_Drought_Reproduction_P Parameter: Treatment Value: Drought vs. No Drought
  misc_feature: MA Experiment ID: 20001911 Result: Down-regulated in Transcription
  misc_feature: MA Experiment 20001911 PARAMETER Experiment Name: At_Drought_Reproduction_P Parameter: Age (day) Value: 40
  misc_feature: MA Experiment 20001911 PARAMETER Experiment Name: At_Drought_Reproduction_P Parameter: Organism Value: A. thaliana
  misc_feature: MA Experiment 20001911 PARAMETER Experiment Name: At_Drought_Reproduction_P Parameter: Plant Line Value: WS
  misc_feature: MA Experiment 20001911 PARAMETER Experiment Name: At_Drought_Reproduction_P Parameter: Timepoint (day) Value: 10
  misc_feature: MA Experiment 20001911 PARAMETER Experiment Name: At_Drought_Reproduction_P Parameter: Tissue Value: Flowers
  misc_feature: MA Experiment 20001911 PARAMETER Experiment Name: At_Drought_Reproduction_P Parameter: Treatment Value: Drought vs. No Drought
actgtgctctcttcttcaatggaacaacaattaaccttagtattgcttgatagcccaaaaggcgccaaatatgtagaaacctttgaagaagccgcttcttcttcttcttcttcttcttcttcttctgttccctcctgcactgatcaccgccatcgaaccttcgtcaaattcttcctttacttctctctcgtcgctcttgcttactatttaatcatctccagtctcgccgtctctccaattcccccaacattgccgcaatcttctcccggaaacgtttcatcagcaaagtgtgatcttttcaccggagattggataccagatccaacaggtcctctgtacacaaatgtcacttgtcgtcacattcaagattttcagaactgcctattgaatggacgaccagatgtgaattatctcttctggagatggaagcctcgtgattgtgatcttcctaggtttagtccatcgcagtttcttgcttcagtgaagaacaaatggtgggcttttatcggtgattccattgctcgtaatcatgtccagtctctcatctgcattctctctcaggtggaagaagtggaggaaatctatcacgataaggagttcagatccaagatatggagattcccttctcacaacttcacactatcagtcatttggtctcctttccttctcaaatccgaaacatctagcaactcggatattcagctttacctcgaccagcttgaccacaaatggactgtccaatacccgaaattcgactacgttgttatctctggaggcaaatggtttcttaaaacaacaattttccatgaaaacaacgtagtcacgggctgtcattactgccaaggaagaaacaacctaactgatctcggctatgattactcctaccgcaaaaccctaaaccttctccgtgacttcgtcctaaactcaacccacaaaccgctggttctgtttcgaacaacaacgcctgaccatttcgaaaacggagagtggaacactggtgggtattgcaacagaacgatgccgtttaaagaaggccaagcaaatatgaaaactgtagatgatgtgatgcgtgatgttgagcttgaggtgtttcagaaatttgggaaaggttttggcttaggttccaacatcaggctattagacacgactggaatgtctcttctccgtccagacgggcatccgggaccataccggcatccaaatccttttgctggagttaagaataagagcaatgttcagaatgattgtctgcattggtgcttacctggtccaattgattcatggaatgatgtgatggtggaaaccacgcttaaccgggaacgggaactatacgatttaaccggttaatgtaccacgatatcgcttgtagctagttacagtcaatagccattccacttgtcaatgtctcgtatatgatagttctatattttaattttgtaatggttctaaacaagaataaacgatgcaaaattttgcagtgtgaatttt

SEQ ID NO: 21113 - protein, 448 aa, Arabidopsis thaliana
  peptide (1)..(448): Ceres Seq. ID no. 13487559
  misc_feature (262)..(436): Pfam Name: Arabidopsis proteins of unknown function Pfam Description: Arabidopsis proteins of unknown function
  misc_feature (93)..(442): Homolog of NCBI NO: 15237213 NR Description: expressed protein [Arabidopsis thaliana]
  misc_feature (62)..(434): Homolog of NCBI NO: 15223079 NR Description: expressed protein [Arabidopsis thaliana]
  misc_feature (78)..(434): Homolog of NCBI NO: 15237211 NR Description: expressed protein [Arabidopsis thaliana]
  misc_feature (54)..(438): Homolog of NCBI NO: 30686312 NR Description: expressed protein [Arabidopsis thaliana]
  misc_feature (54)..(438): Homolog of NCBI NO: 7486743 NR Description: hypothetical protein F9D16.260 - Arabidopsis
  misc_feature (52)..(438): Homolog of NCBI NO: 15237044 NR Description: expressed protein [Arabidopsis thaliana]
  misc_feature (35)..(442): Homolog of NCBI NO: 25518737 NR Description: hypothetical protein F6F3.23 [imported] -
  misc_feature (81)..(442): Homolog of NCBI NO: 30678135 NR Description: expressed protein [Arabidopsis thaliana]
  misc_feature (7)..(448): Homolog of NCBI NO: 15234058 NR Description: expressed protein [Arabidopsis thaliana]
  misc_feature (7)..(448): Homolog of NCBI NO: 28393189 NR Description: unknown protein [Arabidopsis thaliana]
TVLSSSMEQQLTLVLLDSPKGAKYVETFEEAASSSSSSSSSSVPSCTDHRHRTFVKFFLYFSLVALAYYLIISSLAVSPIPPTLPQSSPGNVSSAKCDLFTGDWIPDPTGPLYTNVTCRHIQDFQNCLLNGRPDVNYLFWRWKPRDCDLPRFSPSQFLASVKNKWWAFIGDSIARNHVQSLICILSQVEEVEEIYHDKEFRSKIWRFPSHNFTLSVIWSPFLLKSETSSNSDIQLYLDQLDHKWTVQYPKFDYVVISGGKWFLKTTIFHENNVVTGCHYCQGRNNLTDLGYDYSYRKTLNLLRDFVLNSTHKPLVLFRTTTPDHFENGEWNTGGYCNRTMPFKEGQANMKTVDDVMRDVELEVFQKFGKGFGLGSNIRLLDTTGMSLLRPDGHPGPYRHPNPFAGVKNKSNVQNDCLHWCLPGPIDSWNDVMVETTLNRERELYDLTG

SEQ ID NO: 21114 - protein, 442 aa, Arabidopsis thaliana
  peptide (1)..(442): Ceres Seq. ID no. 13487560
  misc_feature (256)..(430): Pfam Name: Arabidopsis proteins of unknown function Pfam Description: Arabidopsis proteins of unknown function
  misc_feature (87)..(436): Homolog of NCBI NO: 15237213 NR Description: expressed protein [Arabidopsis thaliana]
  misc_feature (56)..(428): Homolog of NCBI NO: 15223079 NR Description: expressed protein [Arabidopsis thaliana]
  misc_feature (72)..(428): Homolog of NCBI NO: 15237211 NR Description: expressed protein [Arabidopsis thaliana]
  misc_feature (48)..(432): Homolog of NCBI NO: 30686312 NR Description: expressed protein [Arabidopsis thaliana]
  misc_feature (48)..(432): Homolog of NCBI NO: 7486743 NR Description: hypothetical protein F9D16.260 - Arabidopsis
  misc_feature (46)..(432): Homolog of NCBI NO: 15237044 NR Description: expressed protein [Arabidopsis thaliana]
  misc_feature (29)..(436): Homolog of NCBI NO: 25518737 NR Description: hypothetical protein F6F3.23 [imported] -
  misc_feature (75)..(436): Homolog of NCBI NO: 30678135 NR Description: expressed protein [Arabidopsis thaliana]
  misc_feature (1)..(442): Homolog of NCBI NO: 15234058 NR Description: expressed protein [Arabidopsis thaliana]
  misc_feature (1)..(442): Homolog of NCBI NO: 28393189 NR Description: unknown protein [Arabidopsis thaliana]
MEQQLTLVLLDSPKGAKYVETFEEAASSSSSSSSSSVPSCTDHRHRTFVKFFLYFSLVALAYYLIISSLAVSPIPPTLPQSSPGNVSSAKCDLFTGDWIPDPTGPLYTNVTCRHIQDFQNCLLNGRPDVNYLFWRWKPRDCDLPRFSPSQFLASVKNKWWAFIGDSIARNHVQSLICILSQVEEVEEIYHDKEFRSKIWRFPSHNFTLSVIWSPFLLKSETSSNSDIQLYLDQLDHKWTVQYPKFDYVVISGGKWFLKTTIFHENNVVTGCHYCQGRNNLTDLGYDYSYRKTLNLLRDFVLNSTHKPLVLFRTTTPDHFENGEWNTGGYCNRTMPFKEGQANMKTVDDVMRDVELEVFQKFGKGFGLGSNIRLLDTTGMSLLRPDGHPGPYRHPNPFAGVKNKSNVQNDCLHWCLPGPIDSWNDVMVETTLNRERELYDLTG

SEQ ID NO: 21115 - DNA, 2501 bp, Arabidopsis thaliana
  misc_feature (1)..(2501): Ceres Seq. ID no. 13488102
  misc_feature: MA Experiment ID: 108434 Result: Up-regulated in Transcription
  misc_feature: MA Experiment 108434 PARAMETER Experiment Name: At_Root_Tips_cDNA_P Parameter: Tissue Value: Root Tips
  misc_feature: MA Experiment ID: 108573 Result: Up-regulated in Transcription
  misc_feature: MA Experiment 108573 PARAMETER Experiment Name: At_Drought_cDNA_P Parameter: Timepoint (hr) Value: 6
  misc_feature: MA Experiment 108573 PARAMETER Experiment Name: At_Drought_cDNA_P Parameter: Tissue Value: Aerial
  misc_feature: MA Experiment 108573 PARAMETER Experiment Name: At_Drought_cDNA_P Parameter: Treatment Value: Drought vs. No Drought
  misc_feature: MA Experiment ID: 108576 Result: Down-regulated in Transcription
  misc_feature: MA Experiment 108576 PARAMETER Experiment Name: At_42deg_Heat_cDNA_P Parameter: Temperature (deg C) Value: 42 vs. 22
  misc_feature: MA Experiment 108576 PARAMETER Experiment Name: At_42deg_Heat_cDNA_P Parameter: Timepoint (hr) Value: 1
  misc_feature: MA Experiment 108576 PARAMETER Experiment Name: At_42deg_Heat_cDNA_P Parameter: Tissue Value: Aerial
  misc_feature: MA Experiment ID: 108595 Result: Down-regulated in Transcription
  misc_feature: MA Experiment 108595 PARAMETER Experiment Name: At_Ler-pi_Ovule_cDNA_P Parameter: Plant Line Value: null
  misc_feature: MA Experiment ID: 108608 Result: Down-regulated in Transcription
  misc_feature: MA Experiment 108608 PARAMETER Experiment Name: At_100uM_ABA_cDNA_P Parameter: Timepoint (hr) Value: 1
  misc_feature: MA Experiment 108608 PARAMETER Experiment Name: At_100uM_ABA_cDNA_P Parameter: Tissue Value: Aerial
  misc_feature: MA Experiment 108608 PARAMETER Experiment Name: At_100uM_ABA_cDNA_P Parameter: Treatment Value: 100uM ABA vs. No Treatment
  misc_feature: MA Experiment ID: 20000087 Result: Down-regulated in Transcription
  misc_feature: MA Experiment 20000087 PARAMETER Experiment Name: At_100uM_ABA_Mutants_cDNA_P Parameter: Plant Line Value: WS
  misc_feature: MA Experiment 20000087 PARAMETER Experiment Name: At_100uM_ABA_Mutants_cDNA_P Parameter: Timepoint (hr) Value: 6
  misc_feature: MA Experiment 20000087 PARAMETER Experiment Name: At_100uM_ABA_Mutants_cDNA_P Parameter: Tissue Value: Aerial
  misc_feature: MA Experiment 20000087 PARAMETER Experiment Name: At_100uM_ABA_Mutants_cDNA_P Parameter: Treatment Value: 100uM ABA vs. No Treatment
  misc_feature: MA Experiment ID: 20000185 Result: Up-regulated in Transcription
  misc_feature: MA Experiment 20000185 PARAMETER Experiment Name: At_Roots__P Parameter: Age (day) Value: 7 vs. 21
  misc_feature: MA Experiment 20000185 PARAMETER Experiment Name: At_Roots__P Parameter: Organism Value: A. thaliana
  misc_feature: MA Experiment 20000185 PARAMETER Experiment Name: At_Roots__P Parameter: Tissue Value: Roots vs. Whole Plant
  misc_feature: MA Experiment ID: 20001557 Result: Up-regulated in Transcription
  misc_feature: MA Experiment 20001557 PARAMETER Experiment Name: At_Drought_Soil_Dry_P Parameter: Age (day) Value: 27
  misc_feature: MA Experiment 20001557 PARAMETER Experiment Name: At_Drought_Soil_Dry_P Parameter: Organism Value: A. thaliana
  misc_feature: MA Experiment 20001557 PARAMETER Experiment Name: At_Drought_Soil_Dry_P Parameter: Plant Line Value: WS
  misc_feature: MA Experiment 20001557 PARAMETER Experiment Name: At_Drought_Soil_Dry_P Parameter: Post Timepoint (hr) Value: 3
  misc_feature: MA Experiment 20001557 PARAMETER Experiment Name: At_Drought_Soil_Dry_P Parameter: Post-Treatment Value: Re-Water vs. No Drought
  misc_feature: MA Experiment 20001557 PARAMETER Experiment Name: At_Drought_Soil_Dry_P Parameter: Timepoint (day) Value: 13
  misc_feature: MA Experiment 20001557 PARAMETER Experiment Name: At_Drought_Soil_Dry_P Parameter: Treatment Value: Drought vs. No Drought
  misc_feature: MA Experiment ID: 20001757 Result: Down-regulated in Transcription
  misc_feature: MA Experiment 20001757 PARAMETER Experiment Name: At_50mM_NH4NO3_L-to-H_P Parameter: Timepoint (hr) Value: 6
  misc_feature: MA Experiment 20001757 PARAMETER Experiment Name: At_50mM_NH4NO3_L-to-H_P Parameter: Tissue Value: Leaf
  misc_feature: MA Experiment 20001757 PARAMETER Experiment Name: At_50mM_NH4NO3_L-to-H_P Parameter: Treatment Value: 50mM NH4NO3 vs 100mM Mannitol
gggacacccattaaaatatttcatcaacttgtcggtaaaattaattcttggcttattctatctttctttctctgtcttcttctttcaatttttcaataacaataatacagatgtgtatacattagatacacgtatactagtactaaacttcactgtgtgatctgatctagagtttttatactatcagaataaataatagtcgacaatttgggatttgtttatggtttacttcacatgaatcacatacgttcatgtcgattcctttgagatactgtctcgatttcgtttttttctcttgtttaatttaaaattattgtaaagcacgtggatttgcttgtcttggttttgttttctccttcgacctctttgatgaaatcgaggaacctacaatttcttcgtcgatccaaatggtagcttagtggtggtgataataggtttctcctcttgattggctccagctttaggtttttttttttatctttgtttctgcttcgattcccaaaatttaccctttcgattttgagtctaactagtcgagttgactcagtagagtcgaaagcttctgggtttacgaagagacatctcctaattgaaacaaaacctttcctttccattgggctgagaaaaaagcaagagtctttgaatattttttggagcgtggttttatttagatgggaggtcaatgctctagcctgagttgttgcaggaacacttcacacaagacagctgttcttgaagctcctgatgttgataatggagagagtagtgagatcactgatgttcctaatttccgggagtatactttagaacagcttaaggcagctacttctggttttgccgtggagtatattgtatctgaacatggagaaaaggctccaaatgttgtctataaagggaaattggagaaccaaaagaagattgctgtcaagcgttttactagaatggcctggcctgattcacgacagttcttggaggaagcgaggtcggttggtcagctacggagtgagagaatggccaatttactcggatgttgctgcgaaggtgacgagaggttacttgtagcagagtttatgcctaatgaaacactagccaaacacctttttcactgggaaactcaacctatgaaatggactatgaggctacgagttgttttatatctagcacaagctcttgaatactgcaccagcaaaggccgtactctttaccacgacctcaatgcttaccgggttttgtttgatgaggaatgcaatccaagactatctacttttggcttgatgaagaatagtcgggatggaaaaagttacagcactaatcttgctttcacccctcctgaatatctacgaactgggagaattactccagagagtgtaatatacagctttggcactcttctgcttgatcttctcagcggaaaacatatacctcctagccatgcccttgatctgattagagacagaaatctccagacgctaactgattcttgcctagatgggcagttttctgatagtgatggtacagagctagtacgcctagcttctcgttgtcttcagtatgaagctcgtgagcggccaaacaccaaatctttagtgactgccttgacacctcttcagaaggagacagaggtcctgtctcatgttctaatgggtctacctcacagtggttcagtctctcctctgtcccctcttggtgaggcttgttcaagaagggacctgaccgctatgcttgagatcctggagaaacttggatacaaagacgacgagggtgtcaccaatgagctctcgtttcatatgtggacagaccagatgcaagagtctttgaactcgaagaagaagggtgatgtggctttcaggcaaaaagactttagagaggccatcgagtgttacacacagtttattgatggaggaatgatctctccaacagtgtgtgctcggcgtagtctgtgttacctaatgagtgacatgccgaaagaagctttagatgatgcaattcaggctcaagtgatctctcccgtgtggcatgtcgcatcatatctgcagtctgcttcccttggtatcctgggaatggagaaggaatctcaaatcgcactgaaagagggctcgaaccttgaagcaaagatgaatggagttccccgagtgaagtaagatatatagcatttaagatttttcttgttgggaaagatgaaagaacatcttaccaagtaaaaggggtatgaatcttttgagcacaatgatgggaaaacactcaagagcaatgcaaaactatagaccctcttcttctggttgtatgaggtgttttgcccttcttgtgcctctttttatgggcattgaattgaaggagtcatttcctttattagctttgaaatccatttcctgaaactttattgtactaaaaaacccattattgcagaaaccaaaagagggttttgtttcttttgatctataggtcacacagactaaacatgtatgaactcttgtcttttgactaaagagatattcgacagc

SEQ ID NO: 21116 - protein, 489 aa, Arabidopsis thaliana
  peptide (1)..(489): Ceres Seq. ID no. 13488103
  misc_feature (26)..(100): Homolog of NCBI NO: 6633851 NR Description: F2K11.13 [Arabidopsis thaliana]
  misc_feature (329)..(483): Homolog of NCBI NO: 6633851 NR Description: F2K11.13 [Arabidopsis thaliana]
  misc_feature (99)..(312): Homolog of NCBI NO: 6633851 NR Description: F2K11.13 [Arabidopsis thaliana]
  misc_feature (1)..(481): Homolog of NCBI NO: 21553556 NR Description: protein kinase-like protein [Arabidopsis thaliana]
  misc_feature (1)..(481): Homolog of NCBI NO: 15232406 NR Description: protein kinase family [Arabidopsis thaliana]
  misc_feature (1)..(481): Homolog of NCBI NO: 22327962 NR Description: protein kinase - related [Arabidopsis thaliana]
  misc_feature (1)..(483): Homolog of NCBI NO: 15237604 NR Description: protein kinase family [Arabidopsis thaliana]
  misc_feature (1)..(481): Homolog of NCBI NO: 15223469 NR Description: protein kinase family [Arabidopsis thaliana]
  misc_feature (1)..(489): Homolog of NCBI NO: 7486564 NR Description: hypothetical protein F6N23.9 - Arabidopsis
  misc_feature (1)..(489): Homolog of NCBI NO: 22328189 NR Description: protein kinase family [Arabidopsis thaliana]
MGGQCSSLSCCRNTSHKTAVLEAPDVDNGESSEITDVPNFREYTLEQLKAATSGFAVEYIVSEHGEKAPNVVYKGKLENQKKIAVKRFTRMAWPDSRQFLEEARSVGQLRSERMANLLGCCCEGDERLLVAEFMPNETLAKHLFHWETQPMKWTMRLRVVLYLAQALEYCTSKGRTLYHDLNAYRVLFDEECNPRLSTFGLMKNSRDGKSYSTNLAFTPPEYLRTGRITPESVIYSFGTLLLDLLSGKHIPPSHALDLIRDRNLQTLTDSCLDGQFSDSDGTELVRLASRCLQYEARERPNTKSLVTALTPLQKETEVLSHVLMGLPHSGSVSPLSPLGEACSRRDLTAMLEILEKLGYKDDEGVTNELSFHMWTDQMQESLNSKKKGDVAFRQKDFREAIECYTQFIDGGMISPTVCARRSLCYLMSDMPKEALDDAIQAQVISPVWHVASYLQSASLGILGMEKESQIALKEGSNLEAKMNGVPRVK

SEQ ID NO: 21117 - protein, 399 aa, Arabidopsis thaliana
  peptide (1)..(399): Ceres Seq. ID no. 13488104
  misc_feature (1)..(385): Homolog of NCBI NO: 32488705 NR Description: OSJNBa0088H09.6 [Oryza sativa (japonica
  misc_feature (239)..(393): Homolog of NCBI NO: 6633851 NR Description: F2K11.13 [Arabidopsis thaliana]
  misc_feature (9)..(222): Homolog of NCBI NO: 6633851 NR Description: F2K11.13 [Arabidopsis thaliana]
  misc_feature (1)..(391): Homolog of NCBI NO: 21553556 NR Description: protein kinase-like protein [Arabidopsis thaliana]
  misc_feature (1)..(391): Homolog of NCBI NO: 15232406 NR Description: protein kinase family [Arabidopsis thaliana]
  misc_feature (1)..(391): Homolog of NCBI NO: 22327962 NR Description: protein kinase - related [Arabidopsis thaliana]
  misc_feature (1)..(393): Homolog of NCBI NO: 15237604 NR Description: protein kinase family [Arabidopsis thaliana]
  misc_feature (1)..(391): Homolog of NCBI NO: 15223469 NR Description: protein kinase family [Arabidopsis thaliana]
  misc_feature (1)..(399): Homolog of NCBI NO: 7486564 NR Description: hypothetical protein F6N23.9 - Arabidopsis
  misc_feature (1)..(399): Homolog of NCBI NO: 22328189 NR Description: protein kinase family [Arabidopsis thaliana]
MAWPDSRQFLEEARSVGQLRSERMANLLGCCCEGDERLLVAEFMPNETLAKHLFHWETQPMKWTMRLRVVLYLAQALEYCTSKGRTLYHDLNAYRVLFDEECNPRLSTFGLMKNSRDGKSYSTNLAFTPPEYLRTGRITPESVIYSFGTLLLDLLSGKHIPPSHALDLIRDRNLQTLTDSCLDGQFSDSDGTELVRLASRCLQYEARERPNTKSLVTALTPLQKETEVLSHVLMGLPHSGSVSPLSPLGEACSRRDLTAMLEILEKLGYKDDEGVTNELSFHMWTDQMQESLNSKKKGDVAFRQKDFREAIECYTQFIDGGMISPTVCARRSLCYLMSDMPKEALDDAIQAQVISPVWHVASYLQSASLGILGMEKESQIALKEGSNLEAKMNGVPRVK

SEQ ID NO: 21118 - protein, 376 aa, Arabidopsis thaliana
  peptide (1)..(376): Ceres Seq. ID no. 13488105
  misc_feature (1)..(362): Homolog of NCBI NO: 32488705 NR Description: OSJNBa0088H09.6 [Oryza sativa (japonica
  misc_feature (216)..(370): Homolog of NCBI NO: 6633851 NR Description: F2K11.13 [Arabidopsis thaliana]
  misc_feature (1)..(199): Homolog of NCBI NO: 6633851 NR Description: F2K11.13 [Arabidopsis thaliana]
  misc_feature (1)..(368): Homolog of NCBI NO: 21553556 NR Description: protein kinase-like protein [Arabidopsis thaliana]
  misc_feature (1)..(368): Homolog of NCBI NO: 15232406 NR Description: protein kinase family [Arabidopsis thaliana]
  misc_feature (1)..(368): Homolog of NCBI NO: 22327962 NR Description: protein kinase - related [Arabidopsis thaliana]
  misc_feature (1)..(370): Homolog of NCBI NO: 15237604 NR Description: protein kinase family [Arabidopsis thaliana]
  misc_feature (1)..(368): Homolog of NCBI NO: 15223469 NR Description: protein kinase family [Arabidopsis thaliana]
  misc_feature (1)..(376): Homolog of NCBI NO: 7486564 NR Description: hypothetical protein F6N23.9 - Arabidopsis
  misc_feature (1)..(376): Homolog of NCBI NO: 22328189 NR Description: protein kinase family [Arabidopsis thaliana]
MANLLGCCCEGDERLLVAEFMPNETLAKHLFHWETQPMKWTMRLRVVLYLAQALEYCTSKGRTLYHDLNAYRVLFDEECNPRLSTFGLMKNSRDGKSYSTNLAFTPPEYLRTGRITPESVIYSFGTLLLDLLSGKHIPPSHALDLIRDRNLQTLTDSCLDGQFSDSDGTELVRLASRCLQYEARERPNTKSLVTALTPLQKETEVLSHVLMGLPHSGSVSPLSPLGEACSRRDLTAMLEILEKLGYKDDEGVTNELSFHMWTDQMQESLNSKKKGDVAFRQKDFREAIECYTQFIDGGMISPTVCARRSLCYLMSDMPKEALDDAIQAQVISPVWHVASYLQSASLGILGMEKESQIALKEGSNLEAKMNGVPRVK

SEQ ID NO: 21119 - DNA, 969 bp, Arabidopsis thaliana
  misc_feature (1)..(969): Ceres Seq. ID no. 13497609
  misc_feature: MA Experiment ID: 108434 Result: Down-regulated in Transcription
  misc_feature: MA Experiment 108434 PARAMETER Experiment Name: At_Root_Tips_cDNA_P Parameter: Tissue Value: Root Tips
  misc_feature: MA Experiment ID: 108462 Result: Up-regulated in Transcription
  misc_feature: MA Experiment 108462 PARAMETER Experiment Name: At_Germinating_Seeds_cDNA_P Parameter: Age (day) Value: 2 vs. 0
  misc_feature: MA Experiment 108462 PARAMETER Experiment Name: At_Germinating_Seeds_cDNA_P Parameter: Tissue Value: Germinating Seeds
  misc_feature: MA Experiment ID: 108463 Result: Up-regulated in Transcription
  misc_feature: MA Experiment 108463 PARAMETER Experiment Name: At_Germinating_Seeds_cDNA_P Parameter: Age (day) Value: 3 vs. 0
  misc_feature: MA Experiment 108463 PARAMETER Experiment Name: At_Germinating_Seeds_cDNA_P Parameter: Tissue Value: Germinating Seeds
  misc_feature: MA Experiment ID: 108464 Result: Up-regulated in Transcription
  misc_feature: MA Experiment 108464 PARAMETER Experiment Name: At_Germinating_Seeds_cDNA_P Parameter: Age (day) Value: 4 vs. 0
  misc_feature: MA Experiment 108464 PARAMETER Experiment Name: At_Germinating_Seeds_cDNA_P Parameter: Tissue Value: Germinating Seeds
  misc_feature: MA Experiment ID: 108488 Result: Down-regulated in Transcription
  misc_feature: MA Experiment ID: 108561 Result: Up-regulated in Transcription
  misc_feature: MA Experiment 108561 PARAMETER Experiment Name: At_100uM_ABA_cDNA_P Parameter: Timepoint (hr) Value: 6
  misc_feature: MA Experiment 108561 PARAMETER Experiment Name: At_100uM_ABA_cDNA_P Parameter: Tissue Value: Aerial
  misc_feature: MA Experiment 108561 PARAMETER Experiment Name: At_100uM_ABA_cDNA_P Parameter: Treatment Value: 100uM ABA vs. No Treatment
  misc_feature: MA Experiment ID: 108605 Result: Up-regulated in Transcription
  misc_feature: MA Experiment 108605 PARAMETER Experiment Name: At_100uM_ABA_cDNA_P Parameter: Timepoint (hr) Value: 6
  misc_feature: MA Experiment 108605 PARAMETER Experiment Name: At_100uM_ABA_cDNA_P Parameter: Tissue Value: Aerial
  misc_feature: MA Experiment 108605 PARAMETER Experiment Name: At_100uM_ABA_cDNA_P Parameter: Treatment Value: 100uM ABA vs. No Treatment
  misc_feature: MA Experiment ID: 108607 Result: Up-regulated in Transcription
  misc_feature: MA Experiment 108607 PARAMETER Experiment Name: At_100uM_ABA_cDNA_P Parameter: Timepoint (hr) Value: 4
  misc_feature: MA Experiment 108607 PARAMETER Experiment Name: At_100uM_ABA_cDNA_P Parameter: Tissue Value: Aerial
  misc_feature: MA Experiment 108607 PARAMETER Experiment Name: At_100uM_ABA_cDNA_P Parameter: Treatment Value: 100uM ABA vs. No Treatment
  misc_feature: MA Experiment ID: 108609 Result: Up-regulated in Transcription
  misc_feature: MA Experiment 108609 PARAMETER Experiment Name: At_100uM_ABA_cDNA_P Parameter: Timepoint (hr) Value: 24
  misc_feature: MA Experiment 108609 PARAMETER Experiment Name: At_100uM_ABA_cDNA_P Parameter: Tissue Value: Aerial
  misc_feature: MA Experiment 108609 PARAMETER Experiment Name: At_100uM_ABA_cDNA_P Parameter: Treatment Value: 100uM ABA vs. No Treatment
  misc_feature: MA Experiment ID: 108668 Result: Down-regulated in Transcription
  misc_feature: MA Experiment 108668 PARAMETER Experiment Name: At_2mM_SA_cDNA_P Parameter: Plant Line Value: WS
  misc_feature: MA Experiment 108668 PARAMETER Experiment Name: At_2mM_SA_cDNA_P Parameter: Timepoint (hr) Value: 6
  misc_feature: MA Experiment 108668 PARAMETER Experiment Name: At_2mM_SA_cDNA_P Parameter: Treatment Value: 2mM SA vs. No Treatment
  misc_feature: MA Experiment ID: 20000069 Result: Up-regulated in Transcription
  misc_feature: MA Experiment 20000069 PARAMETER Experiment Name: At_100uM_ABA_Mutants_cDNA_P Parameter: Plant Line Value: CS23
  misc_feature: MA Experiment 20000069 PARAMETER Experiment Name: At_100uM_ABA_Mutants_cDNA_P Parameter: Timepoint (hr) Value: 6
  misc_feature: MA Experiment 20000069 PARAMETER Experiment Name: At_100uM_ABA_Mutants_cDNA_P Parameter: Tissue Value: Aerial
  misc_feature: MA Experiment 20000069 PARAMETER Experiment Name: At_100uM_ABA_Mutants_cDNA_P Parameter: Treatment Value: 100uM ABA vs. No Treatment
  misc_feature: MA Experiment ID: 20000071 Result: Up-regulated in Transcription
  misc_feature: MA Experiment 20000071 PARAMETER Experiment Name: At_100uM_ABA_Mutants_cDNA_P Parameter: Plant Line Value: CS8104
  misc_feature: MA Experiment 20000071 PARAMETER Experiment Name: At_100uM_ABA_Mutants_cDNA_P Parameter: Timepoint (hr) Value: 6
  misc_feature: MA Experiment 20000071 PARAMETER Experiment Name: At_100uM_ABA_Mutants_cDNA_P Parameter: Tissue Value: Aerial
  misc_feature: MA Experiment 20000071 PARAMETER Experiment Name: At_100uM_ABA_Mutants_cDNA_P Parameter: Treatment Value: 100uM ABA vs. No Treatment
  misc_feature: MA Experiment ID: 20000113 Result: Down-regulated in Transcription
  misc_feature: MA Experiment 20000113 PARAMETER Experiment Name: At_42deg_Heat_cDNA_P Parameter: Temperature (deg C) Value: 42 vs. 22
  misc_feature: MA Experiment 20000113 PARAMETER Experiment Name: At_42deg_Heat_cDNA_P Parameter: Timepoint (hr) Value: 8
  misc_feature: MA Experiment 20000113 PARAMETER Experiment Name: At_42deg_Heat_cDNA_P Parameter: Tissue Value: Aerial
  misc_feature: MA Experiment ID: 20000117 Result: Up-regulated in Transcription
  misc_feature: MA Experiment 20000117 PARAMETER Experiment Name: At_100uM_ABA_Mutants_cDNA_P Parameter: Plant Line Value: Columbia
  misc_feature: MA Experiment 20000117 PARAMETER Experiment Name: At_100uM_ABA_Mutants_cDNA_P Parameter: Timepoint (hr) Value: 6
  misc_feature: MA Experiment 20000117 PARAMETER Experiment Name: At_100uM_ABA_Mutants_cDNA_P Parameter: Tissue Value: Aerial
  misc_feature: MA Experiment 20000117 PARAMETER Experiment Name: At_100uM_ABA_Mutants_cDNA_P Parameter: Treatment Value: 100uM ABA vs. No Treatment
  misc_feature: MA Experiment ID: 20000169 Result: Up-regulated in Transcription
  misc_feature: MA Experiment 20000169 PARAMETER Experiment Name: At_100uM_ABA_P Parameter: Age (day) Value: 14
  misc_feature: MA Experiment 20000169 PARAMETER Experiment Name: At_100uM_ABA_P Parameter: Organism Value: A. thaliana
  misc_feature: MA Experiment 20000169 PARAMETER Experiment Name: At_100uM_ABA_P Parameter: Plant Line Value: WS
  misc_feature: MA Experiment 20000169 PARAMETER Experiment Name: At_100uM_ABA_P Parameter: Timepoint (hr) Value: 6
  misc_feature: MA Experiment 20000169 PARAMETER Experiment Name: At_100uM_ABA_P Parameter: Tissue Value: Aerial
  misc_feature: MA Experiment 20000169 PARAMETER Experiment Name: At_100uM_ABA_P Parameter: Treatment Value: 100uM ABA vs. No Treatment
  misc_feature: MA Experiment ID: 20000180 Result: Up-regulated in Transcription
  misc_feature: MA Experiment 20000180 PARAMETER Experiment Name: At_Germinating_Seeds_P Parameter: Age (hr) Value: 24 vs. 0
  misc_feature: MA Experiment 20000180 PARAMETER Experiment Name: At_Germinating_Seeds_P Parameter: Tissue Value: Germinating Seeds
  misc_feature: MA Experiment ID: 20000182 Result: Down-regulated in Transcription
  misc_feature: MA Experiment 20000182 PARAMETER Experiment Name: At_2mM_SA_P Parameter: Age (day) Value: 14
  misc_feature: MA Experiment 20000182 PARAMETER Experiment Name: At_2mM_SA_P Parameter: Organism Value: A. thaliana
  misc_feature: MA Experiment 20000182 PARAMETER Experiment Name: At_2mM_SA_P Parameter: Plant Line Value: WS
  misc_feature: MA Experiment 20000182 PARAMETER Experiment Name: At_2mM_SA_P Parameter: Timepoint (hr) Value: 6
  misc_feature: MA Experiment 20000182 PARAMETER Experiment Name: At_2mM_SA_P Parameter: Tissue Value: Aerial
  misc_feature: MA Experiment 20000182 PARAMETER Experiment Name: At_2mM_SA_P Parameter: Treatment Value: 2mM SA vs. No Treatment
  misc_feature: MA Experiment ID: 20000184 Result: Down-regulated in Transcription
  misc_feature: MA Experiment 20000184 PARAMETER Experiment Name: At_Shoots__P Parameter: Age (day) Value: 7
  misc_feature: MA Experiment 20000184 PARAMETER Experiment Name: At_Shoots__P Parameter: Tissue Value: Shoots vs. Whole Plant
  misc_feature: MA Experiment ID: 20000234 Result: Down-regulated in Transcription
  misc_feature: MA Experiment 20000234 PARAMETER Experiment Name: At_Siliques_P Parameter: Age (day) Value: 21
  misc_feature: MA Experiment 20000234 PARAMETER Experiment Name: At_Siliques_P Parameter: Organism Value: A. thaliana
  misc_feature: MA Experiment 20000234 PARAMETER Experiment Name: At_Siliques_P Parameter: Plant Line Value: WS
  misc_feature: MA Experiment 20000234 PARAMETER Experiment Name: At_Siliques_P Parameter: Tissue Value: Less Than 5mm Siliques vs. Whole Plant
  misc_feature: MA Experiment ID: 20000267 Result: Up-regulated in Transcription
  misc_feature: MA Experiment 20000267 PARAMETER Experiment Name: At_Drought_P Parameter: Age (day) Value: 7
  misc_feature: MA Experiment 20000267 PARAMETER Experiment Name: At_Drought_P Parameter: Organism Value: A. thaliana
  misc_feature: MA Experiment 20000267 PARAMETER Experiment Name: At_Drought_P Parameter: Plant Line Value: WS
  misc_feature: MA Experiment 20000267 PARAMETER Experiment Name: At_Drought_P Parameter: Timepoint (hr) Value: 6
  misc_feature: MA Experiment 20000267 PARAMETER Experiment Name: At_Drought_P Parameter: Tissue Value: Whole Plant
  misc_feature: MA Experiment 20000267 PARAMETER Experiment Name: At_Drought_P Parameter: Treatment Value: Drought vs. No Drought
  misc_feature: MA Experiment ID: 20000436 Result: Up-regulated in Transcription
  misc_feature: MA Experiment 20000436 PARAMETER Experiment Name: At_Drought_P Parameter: Age (day) Value: 7
  misc_feature: MA Experiment 20000436 PARAMETER Experiment Name: At_Drought_P Parameter: Organism Value: A. thaliana
  misc_feature: MA Experiment 20000436 PARAMETER Experiment Name: At_Drought_P Parameter: Plant Line Value: WS
  misc_feature: MA Experiment 20000436 PARAMETER Experiment Name: At_Drought_P Parameter: Timepoint (hr) Value: 12
  misc_feature: MA Experiment 20000436 PARAMETER Experiment Name: At_Drought_P Parameter: Tissue Value: Whole Plant
  misc_feature: MA Experiment 20000436 PARAMETER Experiment Name: At_Drought_P Parameter: Treatment Value: Drought vs. No Drought
  misc_feature: MA Experiment ID: 20000437 Result: Up-regulated in Transcription
  misc_feature: MA Experiment 20000437 PARAMETER Experiment Name: At_Drought_P Parameter: Age (day) Value: 8
  misc_feature: MA Experiment 20000437 PARAMETER Experiment Name: At_Drought_P Parameter: Organism Value: A. thaliana
  misc_feature: MA Experiment 20000437 PARAMETER Experiment Name: At_Drought_P Parameter: Plant Line Value: WS
  misc_feature: MA Experiment 20000437 PARAMETER Experiment Name: At_Drought_P Parameter: Timepoint (hr) Value: 24
  misc_feature: MA Experiment 20000437 PARAMETER Experiment Name: At_Drought_P Parameter: Tissue Value: Whole Plant
  misc_feature: MA Experiment 20000437 PARAMETER Experiment Name: At_Drought_P Parameter: Treatment Value: Drought vs. No Drought
  misc_feature: MA Experiment ID: 20000453 Result: Up-regulated in Transcription
  misc_feature: MA Experiment 20000453 PARAMETER Experiment Name: At_100uM_ABA_P Parameter: Age (day) Value: 15
  misc_feature: MA Experiment 20000453 PARAMETER Experiment Name: At_100uM_ABA_P Parameter: Organism Value: A. thaliana
  misc_feature: MA Experiment 20000453 PARAMETER Experiment Name: At_100uM_ABA_P Parameter: Plant Line Value: WS
  misc_feature: MA Experiment 20000453 PARAMETER Experiment Name: At_100uM_ABA_P Parameter: Timepoint (hr) Value: 24
  misc_feature: MA Experiment 20000453 PARAMETER Experiment Name: At_100uM_ABA_P Parameter: Tissue Value: Aerial
  misc_feature: MA Experiment 20000453 PARAMETER Experiment Name: At_100uM_ABA_P Parameter: Treatment Value: 100uM ABA vs. No Treatment
  misc_feature: MA Experiment ID: 20000573 Result: Down-regulated in Transcription
  misc_feature: MA Experiment 20000573 PARAMETER Experiment Name: At_100uM_ABA_Mutants__P Parameter: Organism Value: A. thaliana
  misc_feature: MA Experiment 20000573 PARAMETER Experiment Name: At_100uM_ABA_Mutants__P Parameter: Plant Line Value: CS22 vs. Ler wt
  misc_feature: MA Experiment 20000573 PARAMETER Experiment Name: At_100uM_ABA_Mutants__P Parameter: Timepoint (hr) Value: N/A
  misc_feature: MA Experiment 20000573 PARAMETER Experiment Name: At_100uM_ABA_Mutants__P Parameter: Tissue Value: Whole Plant
  misc_feature: MA Experiment 20000573 PARAMETER Experiment Name: At_100uM_ABA_Mutants__P Parameter: Treatment Value: None
  misc_feature: MA Experiment ID: 20000574 Result: Down-regulated in Transcription
  misc_feature: MA Experiment 20000574 PARAMETER Experiment Name: At_100uM_ABA_Mutants__P Parameter: Organism Value: A. thaliana
  misc_feature: MA Experiment 20000574 PARAMETER Experiment Name: At_100uM_ABA_Mutants__P Parameter: Plant Line Value: CS23 vs. Ler wt
  misc_feature: MA Experiment 20000574 PARAMETER Experiment Name: At_100uM_ABA_Mutants__P Parameter: Timepoint (hr) Value: N/A
  misc_feature: MA Experiment 20000574 PARAMETER Experiment Name: At_100uM_ABA_Mutants__P Parameter: Tissue Value: Whole Plant
  misc_feature: MA Experiment 20000574 PARAMETER Experiment Name: At_100uM_ABA_Mutants__P Parameter: Treatment Value: None
  misc_feature: MA Experiment ID: 20000575 Result: Up-regulated in Transcription
  misc_feature: MA Experiment 20000575 PARAMETER Experiment Name: At_100uM_ABA_Mutants__P Parameter: Organism Value: A. thaliana
  misc_feature: MA Experiment 20000575 PARAMETER Experiment Name: At_100uM_ABA_Mutants__P Parameter: Plant Line Value: CS22
  misc_feature: MA Experiment 20000575 PARAMETER Experiment Name: At_100uM_ABA_Mutants__P Parameter: Timepoint (hr) Value: 6
  misc_feature: MA Experiment 20000575 PARAMETER Experiment Name: At_100uM_ABA_Mutants__P Parameter: Tissue Value: Whole Plant
  misc_feature: MA Experiment 20000575 PARAMETER Experiment Name: At_100uM_ABA_Mutants__P Parameter: Treatment Value: 1uM ABA vs. No Treatment
  misc_feature: MA Experiment ID: 20000576 Result: Up-regulated in Transcription
  misc_feature: MA Experiment 20000576 PARAMETER Experiment Name: At_100uM_ABA_Mutants__P Parameter: Organism Value: A. thaliana
  misc_feature: MA Experiment 20000576 PARAMETER Experiment Name: At_100uM_ABA_Mutants__P Parameter: Plant Line Value: CS23
  misc_feature: MA Experiment 20000576 PARAMETER Experiment Name: At_100uM_ABA_Mutants__P Parameter: Timepoint (hr) Value: 6
  misc_feature: MA Experiment 20000576 PARAMETER Experiment Name: At_100uM_ABA_Mutants__P Parameter: Tissue Value: Whole Plant
  misc_feature: MA Experiment 20000576 PARAMETER Experiment Name: At_100uM_ABA_Mutants__P Parameter: Treatment Value: 1uM ABA vs. No Treatment
  misc_feature: MA Experiment ID: 20000794 Result: Up-regulated in Transcription
  misc_feature: MA Experiment 20000794 PARAMETER Experiment Name: At_Petals_P Parameter: Age (day) Value: 23-25 days
  misc_feature: MA Experiment 20000794 PARAMETER Experiment Name: At_Petals_P Parameter: Plant Line Value: WS
  misc_feature: MA Experiment 20000794 PARAMETER Experiment Name: At_Petals_P Parameter: Tissue Value: Petals vs. Whole plant
  misc_feature: MA Experiment ID: 20001451 Result: Up-regulated in Transcription
  misc_feature: MA Experiment 20001451 PARAMETER Experiment Name: At_Far-red-induction_P Parameter: Age (day) Value: 7
  misc_feature: MA Experiment 20001451 PARAMETER Experiment Name: At_Far-red-induction_P Parameter: Light Value: Far-red vs. White
  misc_feature: MA Experiment 20001451 PARAMETER Experiment Name: At_Far-red-induction_P Parameter: Organism Value: A. thaliana
  misc_feature: MA Experiment 20001451 PARAMETER Experiment Name: At_Far-red-induction_P Parameter: Plant Line Value: Columbia
  misc_feature: MA Experiment 20001451 PARAMETER Experiment Name: At_Far-red-induction_P Parameter: Timepoint (hr) Value: 24
  misc_feature: MA Experiment 20001451 PARAMETER Experiment Name: At_Far-red-induction_P Parameter: Tissue Value: Whole Plant
  misc_feature: MA Experiment ID: 20001554 Result: Up-regulated in Transcription
  misc_feature: MA Experiment 20001554 PARAMETER Experiment Name: At_Drought_Soil_Dry_P Parameter: Age (day) Value: 21
  misc_feature: MA Experiment 20001554 PARAMETER Experiment Name: At_Drought_Soil_Dry_P Parameter: Organism Value: A. thaliana
  misc_feature: MA Experiment 20001554 PARAMETER Experiment Name: At_Drought_Soil_Dry_P Parameter: Plant Line Value: WS
  misc_feature: MA Experiment 20001554 PARAMETER Experiment Name: At_Drought_Soil_Dry_P Parameter: Post Timepoint (hr) Value: None
  misc_feature: MA Experiment 20001554 PARAMETER Experiment Name: At_Drought_Soil_Dry_P Parameter: Post-Treatment Value: None
  misc_feature: MA Experiment 20001554 PARAMETER Experiment Name: At_Drought_Soil_Dry_P Parameter: Timepoint (day) Value: 7
  misc_feature: MA Experiment 20001554 PARAMETER Experiment Name: At_Drought_Soil_Dry_P Parameter: Treatment Value: Drought vs. No Drought
  misc_feature: MA Experiment ID: 20001555 Result: Up-regulated in Transcription
  misc_feature: MA Experiment 20001555 PARAMETER Experiment Name: At_Drought_Soil_Dry_P Parameter: Age (day) Value: 24
  misc_feature: MA Experiment 20001555 PARAMETER Experiment Name: At_Drought_Soil_Dry_P Parameter: Organism Value: A. thaliana
  misc_feature: MA Experiment 20001555 PARAMETER Experiment Name: At_Drought_Soil_Dry_P Parameter: Plant Line Value: WS
  misc_feature: MA Experiment 20001555 PARAMETER Experiment Name: At_Drought_Soil_Dry_P Parameter: Post Timepoint (hr) Value: None
  misc_feature: MA Experiment 20001555 PARAMETER Experiment Name: At_Drought_Soil_Dry_P Parameter: Post-Treatment Value: None
  misc_feature: MA Experiment 20001555 PARAMETER Experiment Name: At_Drought_Soil_Dry_P Parameter: Timepoint (day) Value: 10
  misc_feature: MA Experiment 20001555 PARAMETER Experiment Name: At_Drought_Soil_Dry_P Parameter: Treatment Value: Drought vs. No Drought
  misc_feature: MA Experiment ID: 20001560 Result: Down-regulated in Transcription
  misc_feature: MA Experiment 20001560 PARAMETER Experiment Name: At_Drought_Soil_Dry_P Parameter: Age (day) Value: 28
  misc_feature: MA Experiment 20001560 PARAMETER Experiment Name: At_Drought_Soil_Dry_P Parameter: Organism Value: A. thaliana
  misc_feature: MA Experiment 20001560 PARAMETER Experiment Name: At_Drought_Soil_Dry_P Parameter: Plant Line Value: WS
  misc_feature: MA Experiment 20001560 PARAMETER Experiment Name: At_Drought_Soil_Dry_P Parameter: Post Timepoint (hr) Value: None
  misc_feature: MA Experiment 20001560 PARAMETER Experiment Name: At_Drought_Soil_Dry_P Parameter: Post-Treatment Value: None
  misc_feature: MA Experiment 20001560 PARAMETER Experiment Name: At_Drought_Soil_Dry_P Parameter: Timepoint (day) Value: 14
  misc_feature: MA Experiment 20001560 PARAMETER Experiment Name: At_Drought_Soil_Dry_P Parameter: Treatment Value: Drought vs. No Drought
  misc_feature: MA Experiment ID: 20001757 Result: Down-regulated in Transcription
  misc_feature: MA Experiment 20001757 PARAMETER Experiment Name: At_50mM_NH4NO3_L-to-H_P Parameter: Timepoint (hr) Value: 6
  misc_feature: MA Experiment 20001757 PARAMETER Experiment Name: At_50mM_NH4NO3_L-to-H_P Parameter: Tissue Value: Leaf
  misc_feature: MA Experiment 20001757 PARAMETER Experiment Name: At_50mM_NH4NO3_L-to-H_P Parameter: Treatment Value: 50mM NH4NO3 vs 100mM Mannitol
  misc_feature: MA Experiment ID: 20001905 Result: Up-regulated in Transcription
  misc_feature: MA Experiment 20001905 PARAMETER Experiment Name: At_Drought_Reproduction_P Parameter: Age (day) Value: 40
  misc_feature: MA Experiment 20001905 PARAMETER Experiment Name: At_Drought_Reproduction_P Parameter: Organism Value: A. thaliana
  misc_feature: MA Experiment 20001905 PARAMETER Experiment Name: At_Drought_Reproduction_P Parameter: Plant Line Value: WS
  misc_feature: MA Experiment 20001905 PARAMETER Experiment Name: At_Drought_Reproduction_P Parameter: Timepoint (day) Value: 10
  misc_feature: MA Experiment 20001905 PARAMETER Experiment Name: At_Drought_Reproduction_P Parameter: Tissue Value: Rosettes
  misc_feature: MA Experiment 20001905 PARAMETER Experiment Name: At_Drought_Reproduction_P Parameter: Treatment Value: Drought vs. No Drought
  misc_feature: MA Experiment ID: 20001906 Result: Up-regulated in Transcription
  misc_feature: MA Experiment 20001906 PARAMETER Experiment Name: At_Drought_Reproduction_P Parameter: Age (day) Value: 35
  misc_feature: MA Experiment 20001906 PARAMETER Experiment Name: At_Drought_Reproduction_P Parameter: Organism Value: A. thaliana
  misc_feature: MA Experiment 20001906 PARAMETER Experiment Name: At_Drought_Reproduction_P Parameter: Plant Line Value: WS
  misc_feature: MA Experiment 20001906 PARAMETER Experiment Name: At_Drought_Reproduction_P Parameter: Timepoint (day) Value: 5
  misc_feature: MA Experiment 20001906 PARAMETER Experiment Name: At_Drought_Reproduction_P Parameter: Tissue Value: Siliques
  misc_feature: MA Experiment 20001906 PARAMETER Experiment Name: At_Drought_Reproduction_P Parameter: Treatment Value: Drought vs. No Drought
  misc_feature: MA Experiment ID: 20001908 Result: Up-regulated in Transcription
  misc_feature: MA Experiment 20001908 PARAMETER Experiment Name: At_Drought_Reproduction_P Parameter: Age (day) Value: 40
  misc_feature: MA Experiment 20001908 PARAMETER Experiment Name: At_Drought_Reproduction_P Parameter: Organism Value: A. thaliana
  misc_feature: MA Experiment 20001908 PARAMETER Experiment Name: At_Drought_Reproduction_P Parameter: Plant Line Value: WS
  misc_feature: MA Experiment 20001908 PARAMETER Experiment Name: At_Drought_Reproduction_P Parameter: Timepoint (day) Value: 10
  misc_feature: MA Experiment 20001908 PARAMETER Experiment Name: At_Drought_Reproduction_P Parameter: Tissue Value: Siliques
  misc_feature: MA Experiment 20001908 PARAMETER Experiment Name: At_Drought_Reproduction_P Parameter: Treatment Value: Drought vs. No Drought
  misc_feature: MA Experiment ID: 20001911 Result: Up-regulated in Transcription
  misc_feature: MA Experiment 20001911 PARAMETER Experiment Name: At_Drought_Reproduction_P Parameter: Age (day) Value: 40
  misc_feature: MA Experiment 20001911 PARAMETER Experiment Name: At_Drought_Reproduction_P Parameter: Organism Value: A. thaliana
  misc_feature: MA Experiment 20001911 PARAMETER Experiment Name: At_Drought_Reproduction_P Parameter: Plant Line Value: WS
  misc_feature: MA Experiment 20001911 PARAMETER Experiment Name: At_Drought_Reproduction_P Parameter: Timepoint (day) Value: 10
  misc_feature: MA Experiment 20001911 PARAMETER Experiment Name: At_Drought_Reproduction_P Parameter: Tissue Value: Flowers
  misc_feature: MA Experiment 20001911 PARAMETER Experiment Name: At_Drought_Reproduction_P Parameter: Treatment Value: Drought vs. No Drought
aacgagaaacagaacatcactaccaaacatctccagctcagtttcttcaaataaaaacagttaatctctctaaaacaattttttgtttctctctctcttaaataaccagagagttcagaatcattttgattctctttgtaatctttagttgttgtacctaacatcatggctgaagaggaaccgaagaaggtgacagagaccgtgtcggaaccaactccaacaccggaagttccggtggagaaacctgctgctgctgcagatgttgctcctcaggagaagcctgtggctccacctcccgttcttccatctccggcaccggcagaggagaagcaagaagactctaaggctattgttcccgtcgtccctaaagaagtagaggaagagaagaaagaaggatcagttaatcgagatgctgttctggctagagttgagacagagaagaggatgtcacttatcaaagcttgggaagaggctgagaaatgcaaagtggagaacaaagctgagaagaagctttcttcaattggatcatgggagaacaacaagaaagcagctgtggaagctgagctcaagaaaatggaggagcaattggagaagaagaaggcagagtatgtggagcagatgaagaacaaaatagctcaaattcacaaggaagcagaagagaagagagcgatgattgaagctaagcgtggagaagaaattctcaaagcagaggaattagcagccaagtaccgtgccactggaaccgctcccaaaaagcttttcggatgcatgtgatctctaatcatctcgatggggaaacaaatgaaatatggtatttgatgtaatgacgttctttagtttgcttaatgtgggtttaatatggcaacatagaaagttataaggtcaacatcttatattgattgggctgcgtttgttaatttgatttgtatttgtacatcttttcattgaaaggctttctcttagctttat

SEQ ID NO: 21120 - protein, 202 aa, Arabidopsis thaliana
  peptide (1)..(202): Ceres Seq. ID no. 13497610
  misc_feature (90)..(199): Pfam Name: Remorin, C-terminal region Pfam Description: Remorin, C-terminal region
  misc_feature (77)..(200): Homolog of NCBI NO: 22758339 NR Description: putative remorin protein [Oryza sativa (japonica
  misc_feature (13)..(201): Homolog of NCBI NO: 601843 NR Description: DNA-binding protein
  misc_feature (13)..(201): Homolog of NCBI NO: 15225899 NR Description: remorin [Arabidopsis thaliana]
  misc_feature (28)..(202): Homolog of NCBI NO: 4883530 NR Description: remorin 2 [Lycopersicon esculentum]
  misc_feature (1)..(201): Homolog of NCBI NO: 15233068 NR Description: DNA-binding protein -related [Arabidopsis
  misc_feature (36)..(200): Homolog of NCBI NO: 15229057 NR Description: remorin -related protein [Arabidopsis thaliana]
  misc_feature (1)..(200): Homolog of NCBI NO: 4731573 NR Description: remorin 1 [Lycopersicon esculentum]
  misc_feature (1)..(200): Homolog of NCBI NO: 34925093 NR Description: Remorin (pp34)
  misc_feature (1)..(202): Homolog of NCBI NO: 21555669 NR Description: remorin [Arabidopsis thaliana]
  misc_feature (1)..(202): Homolog of NCBI NO: 15237822 NR Description: expressed protein [Arabidopsis thaliana]
MAEEEPKKVTETVSEPTPTPEVPVEKPAAAADVAPQEKPVAPPPVLPSPAPAEEKQEDSKAIVPVVPKEVEEEKKEGSVNRDAVLARVETEKRMSLIKAWEEAEKCKVENKAEKKLSSIGSWENNKKAAVEAELKKMEEQLEKKKAEYVEQMKNKIAQIHKEAEEKRAMIEAKRGEEILKAEELAAKYRATGTAPKKLFGCM

SEQ ID NO: 21121 - protein, 109 aa, Arabidopsis thaliana
  peptide (1)..(109): Ceres Seq. ID no. 13497611
  misc_feature (1)..(106): Pfam Name: Remorin, C-terminal region Pfam Description: Remorin, C-terminal region
  misc_feature (1)..(107): Homolog of NCBI NO: 22758339 NR Description: putative remorin protein [Oryza sativa (japonica
  misc_feature (1)..(108): Homolog of NCBI NO: 601843 NR Description: DNA-binding protein
  misc_feature (1)..(108): Homolog of NCBI NO: 15225899 NR Description: remorin [Arabidopsis thaliana]
  misc_feature (1)..(109): Homolog of NCBI NO: 4883530 NR Description: remorin 2 [Lycopersicon esculentum]
  misc_feature (1)..(108): Homolog of NCBI NO: 15233068 NR Description: DNA-binding protein -related [Arabidopsis
  misc_feature (1)..(107): Homolog of NCBI NO: 15229057 NR Description: remorin -related protein [Arabidopsis thaliana]
  misc_feature (1)..(107): Homolog of NCBI NO: 4731573 NR Description: remorin 1 [Lycopersicon esculentum]
  misc_feature (1)..(107): Homolog of NCBI NO: 34925093 NR Description: Remorin (pp34)
  misc_feature (1)..(109): Homolog of NCBI NO: 21555669 NR Description: remorin [Arabidopsis thaliana]
  misc_feature (1)..(109): Homolog of NCBI NO: 15237822 NR Description: expressed protein [Arabidopsis thaliana]
MSLIKAWEEAEKCKVENKAEKKLSSIGSWENNKKAAVEAELKKMEEQLEKKKAEYVEQMKNKIAQIHKEAEEKRAMIEAKRGEEILKAEELAAKYRATGTAPKKLFGCM

SEQ ID NO: 21122 - DNA, 1027 bp, Arabidopsis thaliana
  misc_feature (1)..(1027): Ceres Seq. ID no. 13490351
  misc_feature: MA Experiment ID: 108434 Result: Up-regulated in Transcription
  misc_feature: MA Experiment 108434 PARAMETER Experiment Name: At_Root_Tips_cDNA_P Parameter: Tissue Value: Root Tips
  misc_feature: MA Experiment ID: 108461 Result: Up-regulated in Transcription
  misc_feature: MA Experiment 108461 PARAMETER Experiment Name: At_Germinating_Seeds_cDNA_P Parameter: Age (day) Value: 1 vs. 0
  misc_feature: MA Experiment 108461 PARAMETER Experiment Name: At_Germinating_Seeds_cDNA_P Parameter: Tissue Value: Germinating Seeds
  misc_feature: MA Experiment ID: 108576 Result: Up-regulated in Transcription
  misc_feature: MA Experiment 108576 PARAMETER Experiment Name: At_42deg_Heat_cDNA_P Parameter: Temperature (deg C) Value: 42 vs. 22
  misc_feature: MA Experiment 108576 PARAMETER Experiment Name: At_42deg_Heat_cDNA_P Parameter: Timepoint (hr) Value: 1
  misc_feature: MA Experiment 108576 PARAMETER Experiment Name: At_42deg_Heat_cDNA_P Parameter: Tissue Value: Aerial
  misc_feature: MA Experiment ID: 20000093 Result: Down-regulated in Transcription
  misc_feature: MA Experiment 20000093 PARAMETER Experiment Name: At_42deg_Heat_cDNA_P Parameter: Temperature (deg C) Value: 42 vs. 22
  misc_feature: MA Experiment 20000093 PARAMETER Experiment Name: At_42deg_Heat_cDNA_P Parameter: Timepoint (hr) Value: 0.5
  misc_feature: MA Experiment 20000093 PARAMETER Experiment Name: At_42deg_Heat_cDNA_P Parameter: Tissue Value: Aerial
  misc_feature: MA Experiment ID: 20000180 Result: Up-regulated in Transcription
  misc_feature: MA Experiment 20000180 PARAMETER Experiment Name: At_Germinating_Seeds_P Parameter: Age (hr) Value: 24 vs. 0
  misc_feature: MA Experiment 20000180 PARAMETER Experiment Name: At_Germinating_Seeds_P Parameter: Tissue Value: Germinating Seeds
  misc_feature: MA Experiment ID: 20000184 Result: Down-regulated in Transcription
  misc_feature: MA Experiment 20000184 PARAMETER Experiment Name: At_Shoots__P Parameter: Age (day) Value: 7
  misc_feature: MA Experiment 20000184 PARAMETER Experiment Name: At_Shoots__P Parameter: Tissue Value: Shoots vs. Whole Plant
  misc_feature: MA Experiment ID: 20000185 Result: Down-regulated in Transcription
  misc_feature: MA Experiment 20000185 PARAMETER Experiment Name: At_Roots__P Parameter: Age (day) Value: 7 vs. 21
  misc_feature: MA Experiment 20000185 PARAMETER Experiment Name: At_Roots__P Parameter: Organism Value: A. thaliana
  misc_feature: MA Experiment 20000185 PARAMETER Experiment Name: At_Roots__P Parameter: Tissue Value: Roots vs. Whole Plant
  misc_feature: MA Experiment ID: 20000224 Result: Up-regulated in Transcription
  misc_feature: MA Experiment ID: 20000265 Result: Down-regulated in Transcription
  misc_feature: MA Experiment 20000265 PARAMETER Experiment Name: At_Open_Flower_P Parameter: Age (day) Value: 21
  misc_feature: MA Experiment 20000265 PARAMETER Experiment Name: At_Open_Flower_P Parameter: Plant Line Value: WS
  misc_feature: MA Experiment 20000265 PARAMETER Experiment Name: At_Open_Flower_P Parameter: Tissue Value: Closed Flower vs. Whole Plant
  misc_feature: MA Experiment ID: 20000286 Result: Down-regulated in Transcription
  misc_feature: MA Experiment 20000286 PARAMETER Experiment Name: At_Open_Flower_P Parameter: Age (day) Value: 21
  misc_feature: MA Experiment 20000286 PARAMETER Experiment Name: At_Open_Flower_P Parameter: Plant Line Value: WS
  misc_feature: MA Experiment 20000286 PARAMETER Experiment Name: At_Open_Flower_P Parameter: Tissue Value: Half Open vs. Whole Plant
  misc_feature: MA Experiment ID: 20000437 Result: Down-regulated in Transcription
  misc_feature: MA Experiment 20000437 PARAMETER Experiment Name: At_Drought_P Parameter: Age (day) Value: 8
  misc_feature: MA Experiment 20000437 PARAMETER Experiment Name: At_Drought_P Parameter: Organism Value: A. thaliana
  misc_feature: MA Experiment 20000437 PARAMETER Experiment Name: At_Drought_P Parameter: Plant Line Value: WS
  misc_feature: MA Experiment 20000437 PARAMETER Experiment Name: At_Drought_P Parameter: Timepoint (hr) Value: 24
  misc_feature: MA Experiment 20000437 PARAMETER Experiment Name: At_Drought_P Parameter: Tissue Value: Whole Plant
  misc_feature: MA Experiment 20000437 PARAMETER Experiment Name: At_Drought_P Parameter: Treatment Value: Drought vs. No Drought
  misc_feature: MA Experiment ID: 20000438 Result: Down-regulated in Transcription
  misc_feature: MA Experiment 20000438 PARAMETER Experiment Name: At_Shoots__P Parameter: Age (day) Value: 14
  misc_feature: MA Experiment 20000438 PARAMETER Experiment Name: At_Shoots__P Parameter: Tissue Value: Shoots vs. Whole Plant
  misc_feature: MA Experiment ID: 20000439 Result: Down-regulated in Transcription
  misc_feature: MA Experiment 20000439 PARAMETER Experiment Name: At_Roots__P Parameter: Age (day) Value: 14 vs. 21
  misc_feature: MA Experiment 20000439 PARAMETER Experiment Name: At_Roots__P Parameter: Organism Value: A. thaliana
  misc_feature: MA Experiment 20000439 PARAMETER Experiment Name: At_Roots__P Parameter: Tissue Value: Roots vs. Whole Plant
  misc_feature: MA Experiment ID: 20000460 Result: Up-regulated in Transcription
  misc_feature: MA Experiment 20000460 PARAMETER Experiment Name: At_10percent_PEG_P Parameter: Age (day) Value: 12
  misc_feature: MA Experiment 20000460 PARAMETER Experiment Name: At_10percent_PEG_P Parameter: Organism Value: A. thaliana
  misc_feature: MA Experiment 20000460 PARAMETER Experiment Name: At_10percent_PEG_P Parameter: Plant Line Value: WS
  misc_feature: MA Experiment 20000460 PARAMETER Experiment Name: At_10percent_PEG_P Parameter: Timepoint (day) Value: 12
  misc_feature: MA Experiment 20000460 PARAMETER Experiment Name: At_10percent_PEG_P Parameter: Tissue Value: Whole Plant
  misc_feature: MA Experiment 20000460 PARAMETER Experiment Name: At_10percent_PEG_P Parameter: Treatment Value: 10percent PEG vs. No Treatment
  misc_feature: MA Experiment ID: 20000527 Result: Up-regulated in Transcription
  misc_feature: MA Experiment 20000527 PARAMETER Experiment Name: At_10percent_PEG_P Parameter: Age (day) Value: 20
  misc_feature: MA Experiment 20000527 PARAMETER Experiment Name: At_10percent_PEG_P Parameter: Organism Value: A. thaliana
  misc_feature: MA Experiment 20000527 PARAMETER Experiment Name: At_10percent_PEG_P Parameter: Plant Line Value: WS
  misc_feature: MA Experiment 20000527 PARAMETER Experiment Name: At_10percent_PEG_P Parameter: Timepoint (day) Value: 20
  misc_feature: MA Experiment 20000527 PARAMETER Experiment Name: At_10percent_PEG_P Parameter: Tissue Value: Whole Plant
  misc_feature: MA Experiment 20000527 PARAMETER Experiment Name: At_10percent_PEG_P Parameter: Treatment Value: 10percent PEG vs. No Treatment
  misc_feature: MA Experiment ID: 20000794 Result: Down-regulated in Transcription
  misc_feature: MA Experiment 20000794 PARAMETER Experiment Name: At_Petals_P Parameter: Age (day) Value: 23-25 days
  misc_feature: MA Experiment 20000794 PARAMETER Experiment Name: At_Petals_P Parameter: Plant Line Value: WS
  misc_feature: MA Experiment 20000794 PARAMETER Experiment Name: At_Petals_P Parameter: Tissue Value: Petals vs. Whole plant
  misc_feature: MA Experiment ID: 20001451 Result: Up-regulated in Transcription
  misc_feature: MA Experiment 20001451 PARAMETER Experiment Name: At_Far-red-induction_P Parameter: Age (day) Value: 7
  misc_feature: MA Experiment 20001451 PARAMETER Experiment Name: At_Far-red-induction_P Parameter: Light Value: Far-red vs. White
  misc_feature: MA Experiment 20001451 PARAMETER Experiment Name: At_Far-red-induction_P Parameter: Organism Value: A. thaliana
  misc_feature: MA Experiment 20001451 PARAMETER Experiment Name: At_Far-red-induction_P Parameter: Plant Line Value: Columbia
  misc_feature: MA Experiment 20001451 PARAMETER Experiment Name: At_Far-red-induction_P Parameter: Timepoint (hr) Value: 24
  misc_feature: MA Experiment 20001451 PARAMETER Experiment Name: At_Far-red-induction_P Parameter: Tissue Value: Whole Plant
  misc_feature: MA Experiment ID: 20001560 Result: Up-regulated in Transcription
  misc_feature: MA Experiment 20001560 PARAMETER Experiment Name: At_Drought_Soil_Dry_P Parameter: Age (day) Value: 28
  misc_feature: MA Experiment 20001560 PARAMETER Experiment Name: At_Drought_Soil_Dry_P Parameter: Organism Value: A. thaliana
  misc_feature: MA Experiment 20001560 PARAMETER Experiment Name: At_Drought_Soil_Dry_P Parameter: Plant Line Value: WS
  misc_feature: MA Experiment 20001560 PARAMETER Experiment Name: At_Drought_Soil_Dry_P Parameter: Post Timepoint (hr) Value: None
  misc_feature: MA Experiment 20001560 PARAMETER Experiment Name: At_Drought_Soil_Dry_P Parameter: Post-Treatment Value: None
  misc_feature: MA Experiment 20001560 PARAMETER Experiment Name: At_Drought_Soil_Dry_P Parameter: Timepoint (day) Value: 14
  misc_feature: MA Experiment 20001560 PARAMETER Experiment Name: At_Drought_Soil_Dry_P Parameter: Treatment Value: Drought vs. No Drought
  misc_feature: MA Experiment ID: 20001905 Result: Down-regulated in Transcription
  misc_feature: MA Experiment 20001905 PARAMETER Experiment Name: At_Drought_Reproduction_P Parameter: Age (day) Value: 40
  misc_feature: MA Experiment 20001905 PARAMETER Experiment Name: At_Drought_Reproduction_P Parameter: Organism Value: A. thaliana
  misc_feature: MA Experiment 20001905 PARAMETER Experiment Name: At_Drought_Reproduction_P Parameter: Plant Line Value: WS
  misc_feature: MA Experiment 20001905 PARAMETER Experiment Name: At_Drought_Reproduction_P Parameter: Timepoint (day) Value: 10
  misc_feature: MA Experiment 20001905 PARAMETER Experiment Name: At_Drought_Reproduction_P Parameter: Tissue Value: Rosettes
  misc_feature: MA Experiment 20001905 PARAMETER Experiment Name: At_Drought_Reproduction_P Parameter: Treatment Value: Drought vs. No Drought
ggtagtgagaagaaaaagcgtcattcttacgtttttcttttaagtttcactcagagacagaagctagaacaaagaaaagagaagccttttgaaagcaatcaactttaatctttttcaaccaacactagtactctagctgttgctctttctcttcgttttcttccttccttcttctcttagatctctttcttttaacttgagtcttatcctttggatttttattcgatttgattcctccgtttggtttggtcagttttctttagactcttagtctttcctctgatctgggttttagctgtagaaactcgtgagttagatcgattgagaacccaactataaattagtaaaaagagaaaccctttataggttttttggggtttttgtctcagtctgaccaatgggttcacaggtttcttgtctagttgcttgaggtttttggtttttggtttgaatagagttatgagaagaggtagaggaaaaggcaagaggcagaatgctactgctagagaagatcgagggagcggcgaggaagaaaagattccagcttttaggaaaagagggaggccacagaagccggtgaaagatgaagaagaagaagaagaagagctagtgaagaagacagatgaggaagaagacaaggatgatgatacaaatggttcagtaacaagtaaagaaaatgtgacagagaatgggaggaagaggaagaaaccagtggagtctaaagagagcaacataactgaagaagagaatggggtagggtcaaaatcaagcacagaagattctatgaaatcatcgtcgtctattgggtttaggcagaatgggagcagaaggaagaacaaaccaagacgagctgctgaagctgttgttgaatgtaatggggtttgaaaagaggttcttaacgcttttgaaaccgcctttttggtattttttttgttgtttttgttagatacttttgctgttataaacccgagtttgatgcgggtgcgttctggtttcattacatggaatcaaaacttcgatttttcgg

SEQ ID NO: 21123 - protein, 141 aa, Arabidopsis thaliana
  peptide (1)..(141): Ceres Seq. ID no. 13490352
  misc_feature (1)..(141): Homolog of NCBI NO: 18405905 NR Description: expressed protein [Arabidopsis thaliana]
  misc_feature (1)..(141): Homolog of NCBI NO: 21537173 NR Description: unknown [Arabidopsis thaliana]
  misc_feature (1)..(141): Homolog of NCBI NO: 15230905 NR Description: expressed protein [Arabidopsis thaliana]
  misc_feature (1)..(138): Homolog of NCBI NO: 33088054 NR Description: unknown [Setaria italica]
MRRGRGKGKRQNATAREDRGSGEEEKIPAFRKRGRPQKPVKDEEEEEEELVKKTDEEEDKDDDTNGSVTSKENVTENGRKRKKPVESKESNITEEENGVGSKSSTEDSMKSSSSIGFRQNGSRRKNKPRRAAEAVVECNGV

SEQ ID NO: 21124 - DNA, 1630 bp, Arabidopsis thaliana
  misc_feature (1)..(1630): Ceres Seq. ID no. 13495859
  misc_feature: MA Experiment ID: 108435 Result: Down-regulated in Transcription
  misc_feature: MA Experiment 108435 PARAMETER Experiment Name: At_stm_Mutants_cDNA_P Parameter: Plant Line Value: wt Landsburg vs stm
  misc_feature: MA Experiment 108435 PARAMETER Experiment Name: At_stm_Mutants_cDNA_P Parameter: Tissue Value: Shoot Apical Meristem Region
  misc_feature: MA Experiment ID: 108462 Result: Up-regulated in Transcription
  misc_feature: MA Experiment 108462 PARAMETER Experiment Name: At_Germinating_Seeds_cDNA_P Parameter: Age (day) Value: 2 vs. 0
  misc_feature: MA Experiment 108462 PARAMETER Experiment Name: At_Germinating_Seeds_cDNA_P Parameter: Tissue Value: Germinating Seeds
  misc_feature: MA Experiment ID: 108464 Result: Up-regulated in Transcription
  misc_feature: MA Experiment 108464 PARAMETER Experiment Name: At_Germinating_Seeds_cDNA_P Parameter: Age (day) Value: 4 vs. 0
  misc_feature: MA Experiment 108464 PARAMETER Experiment Name: At_Germinating_Seeds_cDNA_P Parameter: Tissue Value: Germinating Seeds
  misc_feature: MA Experiment ID: 108577 Result: Up-regulated in Transcription
  misc_feature: MA Experiment 108577 PARAMETER Experiment Name: At_42deg_Heat_cDNA_P Parameter: Temperature (deg C) Value: 42 vs. 22
  misc_feature: MA Experiment 108577 PARAMETER Experiment Name: At_42deg_Heat_cDNA_P Parameter: Timepoint (hr) Value: 6
  misc_feature: MA Experiment 108577 PARAMETER Experiment Name: At_42deg_Heat_cDNA_P Parameter: Tissue Value: Aerial
  misc_feature: MA Experiment ID: 108594 Result: Up-regulated in Transcription
  misc_feature: MA Experiment 108594 PARAMETER Experiment Name: At_Ler-rhl_Root_cDNA_P Parameter: Plant Line Value: null
  misc_feature: MA Experiment ID: 108595 Result: Down-regulated in Transcription
  misc_feature: MA Experiment 108595 PARAMETER Experiment Name: At_Ler-pi_Ovule_cDNA_P Parameter: Plant Line Value: null
  misc_feature: MA Experiment ID: 20000071 Result: Down-regulated in Transcription
  misc_feature: MA Experiment 20000071 PARAMETER Experiment Name: At_100uM_ABA_Mutants_cDNA_P Parameter: Plant Line Value: CS8104
  misc_feature: MA Experiment 20000071 PARAMETER Experiment Name: At_100uM_ABA_Mutants_cDNA_P Parameter: Timepoint (hr) Value: 6
  misc_feature: MA Experiment 20000071 PARAMETER Experiment Name: At_100uM_ABA_Mutants_cDNA_P Parameter: Tissue Value: Aerial
  misc_feature: MA Experiment 20000071 PARAMETER Experiment Name: At_100uM_ABA_Mutants_cDNA_P Parameter: Treatment Value: 100uM ABA vs. No Treatment
  misc_feature: MA Experiment ID: 20000086 Result: Down-regulated in Transcription
  misc_feature: MA Experiment 20000086 PARAMETER Experiment Name: At_100uM_ABA_Mutants_cDNA_P Parameter: Plant Line Value: CS22
  misc_feature: MA Experiment 20000086 PARAMETER Experiment Name: At_100uM_ABA_Mutants_cDNA_P Parameter: Timepoint (hr) Value: 6
  misc_feature: MA Experiment 20000086 PARAMETER Experiment Name: At_100uM_ABA_Mutants_cDNA_P Parameter: Tissue Value: Aerial
  misc_feature: MA Experiment 20000086 PARAMETER Experiment Name: At_100uM_ABA_Mutants_cDNA_P Parameter: Treatment Value: 100uM ABA vs. No Treatment
  misc_feature: MA Experiment ID: 20000089 Result: Down-regulated in Transcription
  misc_feature: MA Experiment ID: 20000090 Result: Down-regulated in Transcription
  misc_feature: MA Experiment ID: 20000113 Result: Up-regulated in Transcription
  misc_feature: MA Experiment 20000113 PARAMETER Experiment Name: At_42deg_Heat_cDNA_P Parameter: Temperature (deg C) Value: 42 vs. 22
  misc_feature: MA Experiment 20000113 PARAMETER Experiment Name: At_42deg_Heat_cDNA_P Parameter: Timepoint (hr) Value: 8
  misc_feature: MA Experiment 20000113 PARAMETER Experiment Name: At_42deg_Heat_cDNA_P Parameter: Tissue Value: Aerial
  misc_feature: MA Experiment ID: 20000117 Result: Down-regulated in Transcription
  misc_feature: MA Experiment 20000117 PARAMETER Experiment Name: At_100uM_ABA_Mutants_cDNA_P Parameter: Plant Line Value: Columbia
  misc_feature: MA Experiment 20000117 PARAMETER Experiment Name: At_100uM_ABA_Mutants_cDNA_P Parameter: Timepoint (hr) Value: 6
  misc_feature: MA Experiment 20000117 PARAMETER Experiment Name: At_100uM_ABA_Mutants_cDNA_P Parameter: Tissue Value: Aerial
  misc_feature: MA Experiment 20000117 PARAMETER Experiment Name: At_100uM_ABA_Mutants_cDNA_P Parameter: Treatment Value: 100uM ABA vs. No Treatment
  misc_feature: MA Experiment ID: 20000438 Result: Up-regulated in Transcription
  misc_feature: MA Experiment 20000438 PARAMETER Experiment Name: At_Shoots__P Parameter: Age (day) Value: 14
  misc_feature: MA Experiment 20000438 PARAMETER Experiment Name: At_Shoots__P Parameter: Tissue Value: Shoots vs. Whole Plant
  misc_feature: MA Experiment ID: 20001247 Result: Up-regulated in Transcription
  misc_feature: MA Experiment 20001247 PARAMETER Experiment Name: At_Far-red-induction_P Parameter: Age (day) Value: 7
  misc_feature: MA Experiment 20001247 PARAMETER Experiment Name: At_Far-red-induction_P Parameter: Light Value: Far-red vs. White
  misc_feature: MA Experiment 20001247 PARAMETER Experiment Name: At_Far-red-induction_P Parameter: Organism Value: A. thaliana
  misc_feature: MA Experiment 20001247 PARAMETER Experiment Name: At_Far-red-induction_P Parameter: Plant Line Value: Columbia
  misc_feature: MA Experiment 20001247 PARAMETER Experiment Name: At_Far-red-induction_P Parameter: Timepoint (hr) Value: 1
  misc_feature: MA Experiment 20001247 PARAMETER Experiment Name: At_Far-red-induction_P Parameter: Tissue Value: Whole Plant
  misc_feature: MA Experiment ID: 20001248 Result: Down-regulated in Transcription
  misc_feature: MA Experiment 20001248 PARAMETER Experiment Name: At_Far-red-induction_P Parameter: Age (day) Value: 7
  misc_feature: MA Experiment 20001248 PARAMETER Experiment Name: At_Far-red-induction_P Parameter: Light Value: Far-red vs. White
  misc_feature: MA Experiment 20001248 PARAMETER Experiment Name: At_Far-red-induction_P Parameter: Organism Value: A. thaliana
  misc_feature: MA Experiment 20001248 PARAMETER Experiment Name: At_Far-red-induction_P Parameter: Plant Line Value: Columbia
  misc_feature: MA Experiment 20001248 PARAMETER Experiment Name: At_Far-red-induction_P Parameter: Timepoint (hr) Value: 4
  misc_feature: MA Experiment 20001248 PARAMETER Experiment Name: At_Far-red-induction_P Parameter: Tissue Value: Whole Plant
  misc_feature: MA Experiment ID: 20001911 Result: Up-regulated in Transcription
  misc_feature: MA Experiment 20001911 PARAMETER Experiment Name: At_Drought_Reproduction_P Parameter: Age (day) Value: 40
  misc_feature: MA Experiment 20001911 PARAMETER Experiment Name: At_Drought_Reproduction_P Parameter: Organism Value: A. thaliana
  misc_feature: MA Experiment 20001911 PARAMETER Experiment Name: At_Drought_Reproduction_P Parameter: Plant Line Value: WS
  misc_feature: MA Experiment 20001911 PARAMETER Experiment Name: At_Drought_Reproduction_P Parameter: Timepoint (day) Value: 10
  misc_feature: MA Experiment 20001911 PARAMETER Experiment Name: At_Drought_Reproduction_P Parameter: Tissue Value: Flowers
  misc_feature: MA Experiment 20001911 PARAMETER Experiment Name: At_Drought_Reproduction_P Parameter: Treatment Value: Drought vs. No Drought
tgggaccaaaatcgtccattgaagtgaacagtcagcatcgttttgcttgcttgtgcgtttctctcgaactctctccatggctgttgcgctccaattcagccgattatgcgttcgaccggatactttcgtgcgggagaatcatctctctggatccggatctctccgccgccggaaagctttatcagtccggtgctcgtctggcgatgagaacgctccttcgccatcggtggtgatggactccgatttcgacgccaaggtgttccgtaagaacttgacgagaagcgataattacaatcgtaaagggttcggtcataaggaggagacactcaagctcatgaatcgagagtacaccagtgatatattggagacactgaaaacaaatgggtatacttattcttggggagatgttactgtgaaactcgctaaagcatatggtttttgctggggtgttgagcgtgctgttcagattgcatatgaagcacgaaagcagtttccagaggagaggctttggattactaacgaaatcattcataacccgaccgtcaataagaggttggaagatatggatgttaaaattattccggttgaggattcaaagaaacagtttgatgtagtagagaaagatgatgtggttatccttcctgcgtttggagctggtgttgacgagatgtatgttcttaatgataaaaaggtgcaaattgttgacacgacttgtccttgggtgacaaaggtctggaacacggttgagaagcacaagaagggggaatacacatcagtaatccatggtaaatataatcatgaagagacgattgcaactgcgtcttttgcaggaaagtacatcattgtaaagaacatgaaagaggcaaattacgtttgtgattacattctcggtggccaatacgatggatctagctccacaaaagaggagttcatggagaaattcaaatacgcaatttcgaagggtttcgatcccgacaatgaccttgtcaaagttggtattgcaaaccaaacaacgatgctaaagggagaaacagaggagataggaagattactcgagacaacaatgatgcgcaagtatggagtggaaaatgtaagcggacatttcatcagcttcaacacaatatgcgacgctactcaagagcgacaagacgcaatctatgagctagtggaagagaagattgacctcatgctagtggttggcggatggaattcaagtaacacctctcaccttcaggaaatctcagaggcacggggaatcccatcttactggatcgatagtgagaaacggataggacctgggaataaaatagcctataagctccactatggagaactggtcgagaaggaaaactttctcccaaagggaccaataacaatcggtgtgacatcaggtgcatcaaccccggataaggtcgtggaagatgctttggtgaaggtgttcgacattaaacgtgaagagttattgcagctggcttgattcggcattgtgatcgtattcaaatactatttgtcatgtcaagagtgtactaaaatatatgtagttgtatgatttgtctttataacttttgtaagaggttttgtaattcaaagtcaacatcctcgttatcttactccacttaatgttcttacc

SEQ ID NO: 21125 - protein, 466 aa, Arabidopsis thaliana
  peptide (1)..(466): Ceres Seq. ID no. 13495860
  misc_feature (113)..(457): Pfam Name: LytB protein Pfam Description: LytB protein
  misc_feature (113)..(457): Pfam Name: LytB protein Pfam Description: LytB protein
  misc_feature (58)..(463): Homolog of NCBI NO: 33239748 NR Description: 4-hydroxy-3-methylbut-2-enyl diphosphate
  misc_feature (86)..(466): Homolog of NCBI NO: 8928192 NR Description: IspH protein
  misc_feature (58)..(458): Homolog of NCBI NO: 23040062 NR Description: hypothetical protein [Trichodesmium erythraeum
  misc_feature (58)..(458): Homolog of NCBI NO: 23128578 NR Description: hypothetical protein [Nostoc punctiforme]
  misc_feature (58)..(466): Homolog of NCBI NO: 16331361 NR Description: hypothetical protein [Synechocystis sp. PCC 6803]
  misc_feature (58)..(463): Homolog of NCBI NO: 33239748 NR Description: 4-hydroxy-3-methylbut-2-enyl diphosphate
  misc_feature (58)..(458): Homolog of NCBI NO: 23040062 NR Description: hypothetical protein [Trichodesmium erythraeum
  misc_feature (58)..(466): Homolog of NCBI NO: 16331361 NR Description: hypothetical protein [Synechocystis sp. PCC 6803]
  misc_feature (1)..(466): Homolog of NCBI NO: 18418433 NR Description: ISPH [Arabidopsis thaliana]
  misc_feature (1)..(466): Homolog of NCBI NO: 7485313 NR Description: hypothetical protein F10M10.120 - Arabidopsis
  misc_feature (1)..(466): Homolog of NCBI NO: 10716963 NR Description: LYTB-like protein precursor [Adonis palaestina]
  misc_feature (58)..(458): Homolog of NCBI NO: 17228480 NR Description: hypothetical protein [Nostoc sp. PCC 7120]
  misc_feature (58)..(458): Homolog of NCBI NO: 22298585 NR Description: ORF_ID:tlr1041~penicillin tolerance protein LytB
  misc_feature (58)..(458): Homolog of NCBI NO: 23128578 NR Description: hypothetical protein [Nostoc punctiforme]
  misc_feature (86)..(466): Homolog of NCBI NO: 8928192 NR Description: IspH protein
  misc_feature (58)..(458): Homolog of NCBI NO: 22298585 NR Description: ORF_ID:tlr1041~penicillin tolerance protein LytB
  misc_feature (58)..(458): Homolog of NCBI NO: 17228480 NR Description: hypothetical protein [Nostoc sp. PCC 7120]
  misc_feature (1)..(466): Homolog of NCBI NO: 10716963 NR Description: LYTB-like protein precursor [Adonis palaestina]
  misc_feature (1)..(466): Homolog of NCBI NO: 7485313 NR Description: hypothetical protein F10M10.120 - Arabidopsis
  misc_feature (1)..(466): Homolog of NCBI NO: 18418433 NR Description: ISPH [Arabidopsis thaliana]
MAVALQFSRLCVRPDTFVRENHLSGSGSLRRRKALSVRCSSGDENAPSPSVVMDSDFDAKVFRKNLTRSDNYNRKGFGHKEETLKLMNREYTSDILETLKTNGYTYSWGDVTVKLAKAYGFCWGVERAVQIAYEARKQFPEERLWITNEIIHNPTVNKRLEDMDVKIIPVEDSKKQFDVVEKDDVVILPAFGAGVDEMYVLNDKKVQIVDTTCPWVTKVWNTVEKHKKGEYTSVIHGKYNHEETIATASFAGKYIIVKNMKEANYVCDYILGGQYDGSSSTKEEFMEKFKYAISKGFDPDNDLVKVGIANQTTMLKGETEEIGRLLETTMMRKYGVENVSGHFISFNTICDATQERQDAIYELVEEKIDLMLVVGGWNSSNTSHLQEISEARGIPSYWIDSEKRIGPGNKIAYKLHYGELVEKENFLPKGPITIGVTSGASTPDKVVEDALVKVFDIKREELLQLA

SEQ ID NO: 21126 - protein, 414 aa, Arabidopsis thaliana
  peptide (1)..(414): Ceres Seq. ID no. 13495861
  misc_feature (61)..(405): Pfam Name: LytB protein Pfam Description: LytB protein
  misc_feature (61)..(405): Pfam Name: LytB protein Pfam Description: LytB protein
  misc_feature (6)..(411): Homolog of NCBI NO: 33239748 NR Description: 4-hydroxy-3-methylbut-2-enyl diphosphate
  misc_feature (34)..(414): Homolog of NCBI NO: 8928192 NR Description: IspH protein
  misc_feature (6)..(406): Homolog of NCBI NO: 23040062 NR Description: hypothetical protein [Trichodesmium erythraeum
  misc_feature (6)..(406): Homolog of NCBI NO: 23128578 NR Description: hypothetical protein [Nostoc punctiforme]
  misc_feature (6)..(414): Homolog of NCBI NO: 16331361 NR Description: hypothetical protein [Synechocystis sp. PCC 6803]
  misc_feature (6)..(411): Homolog of NCBI NO: 33239748 NR Description: 4-hydroxy-3-methylbut-2-enyl diphosphate
  misc_feature (6)..(406): Homolog of NCBI NO: 23040062 NR Description: hypothetical protein [Trichodesmium erythraeum
  misc_feature (6)..(414): Homolog of NCBI NO: 16331361 NR Description: hypothetical protein [Synechocystis sp. PCC 6803]
  misc_feature (1)..(414): Homolog of NCBI NO: 18418433 NR Description: ISPH [Arabidopsis thaliana]
  misc_feature (1)..(414): Homolog of NCBI NO: 7485313 NR Description: hypothetical protein F10M10.120 - Arabidopsis
  misc_feature (1)..(414): Homolog of NCBI NO: 10716963 NR Description: LYTB-like protein precursor [Adonis palaestina]
  misc_feature (6)..(406): Homolog of NCBI NO: 17228480 NR Description: hypothetical protein [Nostoc sp. PCC 7120]
  misc_feature (6)..(406): Homolog of NCBI NO: 22298585 NR Description: ORF_ID:tlr1041~penicillin tolerance protein LytB
  misc_feature (6)..(406): Homolog of NCBI NO: 23128578 NR Description: hypothetical protein [Nostoc punctiforme]
  misc_feature (34)..(414): Homolog of NCBI NO: 8928192 NR Description: IspH protein
  misc_feature (6)..(406): Homolog of NCBI NO: 22298585 NR Description: ORF_ID:tlr1041~penicillin tolerance protein LytB
  misc_feature (6)..(406): Homolog of NCBI NO: 17228480 NR Description: hypothetical protein [Nostoc sp. PCC 7120]
  misc_feature (1)..(414): Homolog of NCBI NO: 10716963 NR Description: LYTB-like protein precursor [Adonis palaestina]
  misc_feature (1)..(414): Homolog of NCBI NO: 7485313 NR Description: hypothetical protein F10M10.120 - Arabidopsis
  misc_feature (1)..(414): Homolog of NCBI NO: 18418433 NR Description: ISPH [Arabidopsis thaliana]
MDSDFDAKVFRKNLTRSDNYNRKGFGHKEETLKLMNREYTSDILETLKTNGYTYSWGDVTVKLAKAYGFCWGVERAVQIAYEARKQFPEERLWITNEIIHNPTVNKRLEDMDVKIIPVEDSKKQFDVVEKDDVVILPAFGAGVDEMYVLNDKKVQIVDTTCPWVTKVWNTVEKHKKGEYTSVIHGKYNHEETIATASFAGKYIIVKNMKEANYVCDYILGGQYDGSSSTKEEFMEKFKYAISKGFDPDNDLVKVGIANQTTMLKGETEEIGRLLETTMMRKYGVENVSGHFISFNTICDATQERQDAIYELVEEKIDLMLVVGGWNSSNTSHLQEISEARGIPSYWIDSEKRIGPGNKIAYKLHYGELVEKENFLPKGPITIGVTSGASTPDKVVEDALVKVFDIKREELLQLA

SEQ ID NO: 21127 - protein, 380 aa, Arabidopsis thaliana
  peptide (1)..(380): Ceres Seq. ID no. 13495862
  misc_feature (27)..(371): Pfam Name: LytB protein Pfam Description: LytB protein
  misc_feature (27)..(371): Pfam Name: LytB protein Pfam Description: LytB protein
  misc_feature (1)..(377): Homolog of NCBI NO: 33239748 NR Description: 4-hydroxy-3-methylbut-2-enyl diphosphate
  misc_feature (1)..(380): Homolog of NCBI NO: 8928192 NR Description: IspH protein
  misc_feature (1)..(372): Homolog of NCBI NO: 23040062 NR Description: hypothetical protein [Trichodesmium erythraeum
  misc_feature (1)..(372): Homolog of NCBI NO: 23128578 NR Description: hypothetical protein [Nostoc punctiforme]
  misc_feature (1)..(380): Homolog of NCBI NO: 16331361 NR Description: hypothetical protein [Synechocystis sp. PCC 6803]
  misc_feature (1)..(377): Homolog of NCBI NO: 33239748 NR Description: 4-hydroxy-3-methylbut-2-enyl diphosphate
  misc_feature (1)..(372): Homolog of NCBI NO: 23040062 NR Description: hypothetical protein [Trichodesmium erythraeum
  misc_feature (1)..(380): Homolog of NCBI NO: 16331361 NR Description: hypothetical protein [Synechocystis sp. PCC 6803]
  misc_feature (1)..(380): Homolog of NCBI NO: 18418433 NR Description: ISPH [Arabidopsis thaliana]
  misc_feature (1)..(380): Homolog of NCBI NO: 7485313 NR Description: hypothetical protein F10M10.120 - Arabidopsis
  misc_feature (1)..(380): Homolog of NCBI NO: 10716963 NR Description: LYTB-like protein precursor [Adonis palaestina]
  misc_feature (1)..(372): Homolog of NCBI NO: 17228480 NR Description: hypothetical protein [Nostoc sp. PCC 7120]
  misc_feature (1)..(372): Homolog of NCBI NO: 22298585 NR Description: ORF_ID:tlr1041~penicillin tolerance protein LytB
  misc_feature (1)..(372): Homolog of NCBI NO: 23128578 NR Description: hypothetical protein [Nostoc punctiforme]
  misc_feature (1)..(380): Homolog of NCBI NO: 8928192 NR Description: IspH protein
  misc_feature (1)..(372): Homolog of NCBI NO: 22298585 NR Description: ORF_ID:tlr1041~penicillin tolerance protein LytB
  misc_feature (1)..(372): Homolog of NCBI NO: 17228480 NR Description: hypothetical protein [Nostoc sp. PCC 7120]
  misc_feature (1)..(380): Homolog of NCBI NO: 10716963 NR Description: LYTB-like protein precursor [Adonis palaestina]
  misc_feature (1)..(380): Homolog of NCBI NO: 7485313 NR Description: hypothetical protein F10M10.120 - Arabidopsis
  misc_feature (1)..(380): Homolog of NCBI NO: 18418433 NR Description: ISPH [Arabidopsis thaliana]
MNREYTSDILETLKTNGYTYSWGDVTVKLAKAYGFCWGVERAVQIAYEARKQFPEERLWITNEIIHNPTVNKRLEDMDVKIIPVEDSKKQFDVVEKDDVVILPAFGAGVDEMYVLNDKKVQIVDTTCPWVTKVWNTVEKHKKGEYTSVIHGKYNHEETIATASFAGKYIIVKNMKEANYVCDYILGGQYDGSSSTKEEFMEKFKYAISKGFDPDNDLVKVGIANQTTMLKGETEEIGRLLETTMMRKYGVENVSGHFISFNTICDATQERQDAIYELVEEKIDLMLVVGGWNSSNTSHLQEISEARGIPSYWIDSEKRIGPGNKIAYKLHYGELVEKENFLPKGPITIGVTSGASTPDKVVEDALVKVFDIKREELLQLA

SEQ ID NO: 21128 - DNA, 837 bp, Arabidopsis thaliana
  misc_feature (1)..(837): Ceres Seq. ID no. 12343564
  misc_feature: MA Experiment ID: 108434 Result: Up-regulated in Transcription
  misc_feature: MA Experiment 108434 PARAMETER Experiment Name: At_Root_Tips_cDNA_P Parameter: Tissue Value: Root Tips
  misc_feature: MA Experiment ID: 108462 Result: Down-regulated in Transcription
  misc_feature: MA Experiment 108462 PARAMETER Experiment Name: At_Germinating_Seeds_cDNA_P Parameter: Age (day) Value: 2 vs. 0
  misc_feature: MA Experiment 108462 PARAMETER Experiment Name: At_Germinating_Seeds_cDNA_P Parameter: Tissue Value: Germinating Seeds
  misc_feature: MA Experiment ID: 108463 Result: Down-regulated in Transcription
  misc_feature: MA Experiment 108463 PARAMETER Experiment Name: At_Germinating_Seeds_cDNA_P Parameter: Age (day) Value: 3 vs. 0
  misc_feature: MA Experiment 108463 PARAMETER Experiment Name: At_Germinating_Seeds_cDNA_P Parameter: Tissue Value: Germinating Seeds
  misc_feature: MA Experiment ID: 108576 Result: Up-regulated in Transcription
  misc_feature: MA Experiment 108576 PARAMETER Experiment Name: At_42deg_Heat_cDNA_P Parameter: Temperature (deg C) Value: 42 vs. 22
  misc_feature: MA Experiment 108576 PARAMETER Experiment Name: At_42deg_Heat_cDNA_P Parameter: Timepoint (hr) Value: 1
  misc_feature: MA Experiment 108576 PARAMETER Experiment Name: At_42deg_Heat_cDNA_P Parameter: Tissue Value: Aerial
  misc_feature: MA Experiment ID: 20000234 Result: Up-regulated in Transcription
  misc_feature: MA Experiment 20000234 PARAMETER Experiment Name: At_Siliques_P Parameter: Age (day) Value: 21
  misc_feature: MA Experiment 20000234 PARAMETER Experiment Name: At_Siliques_P Parameter: Organism Value: A. thaliana
  misc_feature: MA Experiment 20000234 PARAMETER Experiment Name: At_Siliques_P Parameter: Plant Line Value: WS
  misc_feature: MA Experiment 20000234 PARAMETER Experiment Name: At_Siliques_P Parameter: Tissue Value: Less Than 5mm Siliques vs. Whole Plant
  misc_feature: MA Experiment ID: 20001558 Result: Up-regulated in Transcription
  misc_feature: MA Experiment 20001558 PARAMETER Experiment Name: At_Drought_Soil_Dry_P Parameter: Age (day) Value: 27
  misc_feature: MA Experiment 20001558 PARAMETER Experiment Name: At_Drought_Soil_Dry_P Parameter: Organism Value: A. thaliana
  misc_feature: MA Experiment 20001558 PARAMETER Experiment Name: At_Drought_Soil_Dry_P Parameter: Plant Line Value: WS
  misc_feature: MA Experiment 20001558 PARAMETER Experiment Name: At_Drought_Soil_Dry_P Parameter: Post Timepoint (hr) Value: 6
  misc_feature: MA Experiment 20001558 PARAMETER Experiment Name: At_Drought_Soil_Dry_P Parameter: Post-Treatment Value: Re-Water vs. No Drought
  misc_feature: MA Experiment 20001558 PARAMETER Experiment Name: At_Drought_Soil_Dry_P Parameter: Timepoint (day) Value: 13
  misc_feature: MA Experiment 20001558 PARAMETER Experiment Name: At_Drought_Soil_Dry_P Parameter: Treatment Value: Drought vs. No Drought
  misc_feature: MA Experiment ID: 20001560 Result: Up-regulated in Transcription
  misc_feature: MA Experiment 20001560 PARAMETER Experiment Name: At_Drought_Soil_Dry_P Parameter: Age (day) Value: 28
  misc_feature: MA Experiment 20001560 PARAMETER Experiment Name: At_Drought_Soil_Dry_P Parameter: Organism Value: A. thaliana
  misc_feature: MA Experiment 20001560 PARAMETER Experiment Name: At_Drought_Soil_Dry_P Parameter: Plant Line Value: WS
  misc_feature: MA Experiment 20001560 PARAMETER Experiment Name: At_Drought_Soil_Dry_P Parameter: Post Timepoint (hr) Value: None
  misc_feature: MA Experiment 20001560 PARAMETER Experiment Name: At_Drought_Soil_Dry_P Parameter: Post-Treatment Value: None
  misc_feature: MA Experiment 20001560 PARAMETER Experiment Name: At_Drought_Soil_Dry_P Parameter: Timepoint (day) Value: 14
  misc_feature: MA Experiment 20001560 PARAMETER Experiment Name: At_Drought_Soil_Dry_P Parameter: Treatment Value: Drought vs. No Drought
  misc_feature: MA Experiment ID: 20001757 Result: Up-regulated in Transcription
  misc_feature: MA Experiment 20001757 PARAMETER Experiment Name: At_50mM_NH4NO3_L-to-H_P Parameter: Timepoint (hr) Value: 6
  misc_feature: MA Experiment 20001757 PARAMETER Experiment Name: At_50mM_NH4NO3_L-to-H_P Parameter: Tissue Value: Leaf
  misc_feature: MA Experiment 20001757 PARAMETER Experiment Name: At_50mM_NH4NO3_L-to-H_P Parameter: Treatment Value: 50mM NH4NO3 vs 100mM Mannitol
agggtttttttcagcggagattagcttcagtatccattggcggattagcctcagagtgctctgatcaaggttttggaggttgcatttgagtgaggagatgttttcggctcagcataagattcataaggagaagggtgtggaactttctgaattggatgagcaagttgctcaggctttctttgatttggagaacaccaatcaagaattgaaaagtgagctgaaggatttatacgtcaactcggctgttcaagttgatatctctggaggacgcaaggcaattgttgtcaatgttccttacagactgagaaaagcttaccggaaaatccatgttaggcttgttcgtgaacttgagaagaagttcagtggaaaggatgtgatcctcattgctacaaggaggattgtgaggccgccaaagaagggttcagcggcaaagagaccacgcaaccgtactctgacctcagtccatgaagctattcttgatgatgtggtcttacctgcagagattgttgggaagcgcacaaggtacagactcgacggtaccaaaatcatgaaggtcttcttggacccaaaggaaaggaacaacacagagtacaaggttgaggctttctctgcggtttacaagaagctcactggcaaagatgtcgtctttgagtttcccatcactgaagcctaagagatgaaatgagacgtagagaatctgttatgatctcagatattttaatcttctttttcgtctactttctttaatgtggcaagacattggttttacttctgaaaatctgtacaatggtcgagttttctcaaaagttttgagaaactttttgatgttggtgtttc

SEQ ID NO: 21129 - protein, 191 aa, Arabidopsis thaliana
  peptide (1)..(191): Ceres Seq. ID no. 12343565
  misc_feature (4)..(191): Pfam Name: Ribosomal protein S7e Pfam Description: Ribosomal protein S7e
  misc_feature (17)..(191): Homolog of NCBI NO: 32403462 NR Description: 40S RIBOSOMAL PROTEIN S7 [Neurospora crassa]
  misc_feature (1)..(190): Homolog of NCBI NO: 14787424 NR Description: Ribosomal protein S7 [Hordeum vulgare subsp.
  misc_feature (1)..(190): Homolog of NCBI NO: 4588906 NR Description: ribosomal protein S7 [Secale cereale]
  misc_feature (1)..(190): Homolog of NCBI NO: 20139964 NR Description: 40S ribosomal protein S7
  misc_feature (1)..(188): Homolog of NCBI NO: 15237278 NR Description: 40S ribosomal protein S7-like
  misc_feature (1)..(190): Homolog of NCBI NO: 22671664 NR Description: ribosomal protein S7 [Oryza sativa (japonica
  misc_feature (1)..(188): Homolog of NCBI NO: 21592413 NR Description: 40S ribosomal protein S7-like [Arabidopsis
  misc_feature (1)..(191): Homolog of NCBI NO: 15232926 NR Description: putative 40S ribosomal protein
  misc_feature (1)..(190): Homolog of NCBI NO: 20139962 NR Description: 40S ribosomal protein S7
  misc_feature (1)..(191): Homolog of NCBI NO: 15221972 NR Description: 40S ribosomal protein S7 homolog, putative
MFSAQHKIHKEKGVELSELDEQVAQAFFDLENTNQELKSELKDLYVNSAVQVDISGGRKAIVVNVPYRLRKAYRKIHVRLVRELEKKFSGKDVILIATRRIVRPPKKGSAAKRPRNRTLTSVHEAILDDVVLPAEIVGKRTRYRLDGTKIMKVFLDPKERNNTEYKVEAFSAVYKKLTGKDVVFEFPITEA

SEQ ID NO: 21130 - DNA, 2726 bp, Arabidopsis thaliana
  misc_feature (1)..(2726): Ceres Seq. ID no. 13580618
  misc_feature: MA Experiment ID: 20000184 Result: Down-regulated in Transcription
  misc_feature: MA Experiment 20000184 PARAMETER Experiment Name: At_Shoots__P Parameter: Age (day) Value: 7
  misc_feature: MA Experiment 20000184 PARAMETER Experiment Name: At_Shoots__P Parameter: Tissue Value: Shoots vs. Whole Plant
  misc_feature: MA Experiment ID: 20001757 Result: Up-regulated in Transcription
  misc_feature: MA Experiment 20001757 PARAMETER Experiment Name: At_50mM_NH4NO3_L-to-H_P Parameter: Timepoint (hr) Value: 6
  misc_feature: MA Experiment 20001757 PARAMETER Experiment Name: At_50mM_NH4NO3_L-to-H_P Parameter: Tissue Value: Leaf
  misc_feature: MA Experiment 20001757 PARAMETER Experiment Name: At_50mM_NH4NO3_L-to-H_P Parameter: Treatment Value: 50mM NH4NO3 vs 100mM Mannitol
  misc_feature: MA Experiment ID: 20001905 Result: Down-regulated in Transcription
  misc_feature: MA Experiment 20001905 PARAMETER Experiment Name: At_Drought_Reproduction_P Parameter: Age (day) Value: 40
  misc_feature: MA Experiment 20001905 PARAMETER Experiment Name: At_Drought_Reproduction_P Parameter: Organism Value: A. thaliana
  misc_feature: MA Experiment 20001905 PARAMETER Experiment Name: At_Drought_Reproduction_P Parameter: Plant Line Value: WS
  misc_feature: MA Experiment 20001905 PARAMETER Experiment Name: At_Drought_Reproduction_P Parameter: Timepoint (day) Value: 10
  misc_feature: MA Experiment 20001905 PARAMETER Experiment Name: At_Drought_Reproduction_P Parameter: Tissue Value: Rosettes
  misc_feature: MA Experiment 20001905 PARAMETER Experiment Name: At_Drought_Reproduction_P Parameter: Treatment Value: Drought vs. No Drought
aaaggattcaaaaaaccctaaacactccaatgtcttcttctactcttcaagcttctctttttcttcgtcctcctctccatacttcttcgtttaagctttacccttgtctattctcttcttcttcattgagtttttgtccacaatctctctcaagtttctaccgtctttcttcagttcttcacaactctcgatttcgtccccttccttgctcattgcgtcaagacaatgtcgcttccgattctgatttcattcccaaagactccgcttttgaggttacggattcagctgagagtaatagattggtttccgatacggaggtttcggaattagagacgaatgatagatttgtgggtggtgaggagacgaaaagtggaggagaagaagcggaggttagtaatggagtaacggaaggtaaggaggaagatcagaagaagagcaagtttaggattgtggtgttgatgatggcactatgggcggctataaagagagctatagagaaggtaatggagtgggaatggttaagctggtggcctttctctcgccaggagaagcggctcgagaaacttattgctgaggctgatgctaatccaaaggacgcagctttgcagggtgctttattggctgagctcaataagcatattcctgaggctgtagttcaacggtttgaacaaagggaacacacagtggatagtagaggagttgctgaatatattcgggctcttgtcattacaaatgctatctcggagtatcttcctgatgaacaaacggggaagccatctagtcttcccgcactgctgcaagagctgaagcatcgtgcatcaggcaatatggacgaatcatttgtgaaccctggtatatctgagaagcaaccactgcatgttaccatggttaatcctaaagtttcaaacaaatcaagatttgcgcaagagcttgtctctacgatcttgttcactgttgcggtgggattagtgtggattatgggtgcagctgctctgcaaaagtatattggaagtcttggaggaattggaacttcgggtgttggttcaagctcttcatattccccaaaagagctgaacaaagaaataacgccagaaaagaatgtcaaaacatttaaggacgtaaagggttgtgatgatgcaaaacaagagctcgaagaggtagttgaatatctcaaaaatccatcaaagtttacccgccttggaggaaagttgccaaagggaattcttctaaccggggcacctggtactggaaagacattgctggccaaagcaattgctggagaagctggagtacccttcttctatagagctggatctgaatttgaagagatgtttgttggggtaggagctcgccgtgtgagatccttgtttcaggcagccaagaagaaggcaccttgtattattttcattgacgaaattgatgctgttggatccacaagaaaacaatgggaagggcatacaaagaagacattgcatcaactacttgttgaaatggatggttttgagcagaatgagggaataatagttatggctgcaacaaacttgcctgatatacttgatccagctctgacaagaccgggtagatttgatagacatattgtcgtacccagtccggatgtccgtggacgcgaagagattttggaactctacctccaaggcaaacctatgtcagaagatgttgatgttaaagcaattgctcgtggaactcctggattcaatggtgctgatcttgcaaacctggtaaatattgctgccataaaagcagctgttgaaggtgctgagaagttatcttctgaacagttggaattcgcaaaggaccgaattgtcatgggcacagagaggaagacaatgttcgtatcagaggactcaaaaaagctcactgcataccatgagagtggtcatgctattgtcgctttaaatacgaaaggtgcgcacccgatccacaaagcgactataatgccacgtggatctgcattgggaatggttacacagttaccttcaaacgatgaaacatcagtgagcaagaggcagttattagctcgtctcgatgtatgtatgggaggaagagttgcagaggagctcatctttggcttggaccatattaccactggagcgagtagcgatctgtcacaggccactgaacttgcacaatacatggtatcgagttgtgggatgagtgaggcaataggaccagttcatataaaagaaagaccaagctctgatatgcaatcacgcattgatgccgaggttgtgaagcttcttagagaagcatatgagagagtgaaatctctcttgaaacggcatgagaagcagctacacacgttagcaaacgcacttctagagtatgaaacgctaaccgcagaggacataaagcgtattctccttccaaagcaggaaggcgagaaatttgaagagcaacaacaagaagaaggagacttggtattggcctaatcacatcattcattaccataaacacacttctttgggtgaaaaagggagattcaaagctttgtacagagtaaatctcccatagcttctacaacaacaaccaaaagaaaaacatatgaaattattgatctcatgttacaaaattattgtagtttttatttcattagctcattagttttcgcttcgaccttgaaccttttgccctttttgacattctgttcaattctatgaagaaaaatgtaaaacaacattgaaaagaaagtaataattgttgtcttt

SEQ ID NO: 21131 - protein, 815 aa, Arabidopsis thaliana
  peptide (1)..(815): Ceres Seq. ID no. 13580619
  misc_feature (595)..(792): Pfam Name: Peptidase family M41 Pfam Description: Peptidase family M41
  misc_feature (365)..(803): Homolog of NCBI NO: 7305635 NR Description: YME1-like 1; ATP-dependent metalloprotease FtsH1
  misc_feature (183)..(305): Homolog of NCBI NO: 23479426 NR Description: ATP-dependent metalloprotease FtsH, putative
  misc_feature (320)..(812): Homolog of NCBI NO: 23479426 NR Description: ATP-dependent metalloprotease FtsH, putative
  misc_feature (181)..(246): Homolog of NCBI NO: 23509838 NR Description: hypothetical protein, conserved [Plasmodium
  misc_feature (287)..(812): Homolog of NCBI NO: 23509838 NR Description: hypothetical protein, conserved [Plasmodium
  misc_feature (229)..(793): Homolog of NCBI NO: 7488430 NR Description: probable YME1 ATP-dependant proteinase
  misc_feature (207)..(807): Homolog of NCBI NO: 30526336 NR Description: putative FtsH protease [Lycopersicon esculentum]
  misc_feature (204)..(793): Homolog of NCBI NO: 18401040 NR Description: FtsH protease, putative [Arabidopsis thaliana]
  misc_feature (688)..(808): Homolog of NCBI NO: 34912722 NR Description: putative cell division protein FtsH protease-like
  misc_feature (124)..(694): Homolog of NCBI NO: 34912722 NR Description: putative cell division protein FtsH protease-like
RIQKTLNTPMSSSTLQASLFLRPPLHTSSFKLYPCLFSSSSLSFCPQSLSSFYRLSSVLHNSRFRPLPCSLRQDNVASDSDFIPKDSAFEVTDSAESNRLVSDTEVSELETNDRFVGGEETKSGGEEAEVSNGVTEGKEEDQKKSKFRIVVLMMALWAAIKRAIEKVMEWEWLSWWPFSRQEKRLEKLIAEADANPKDAALQGALLAELNKHIPEAVVQRFEQREHTVDSRGVAEYIRALVITNAISEYLPDEQTGKPSSLPALLQELKHRASGNMDESFVNPGISEKQPLHVTMVNPKVSNKSRFAQELVSTILFTVAVGLVWIMGAAALQKYIGSLGGIGTSGVGSSSSYSPKELNKEITPEKNVKTFKDVKGCDDAKQELEEVVEYLKNPSKFTRLGGKLPKGILLTGAPGTGKTLLAKAIAGEAGVPFFYRAGSEFEEMFVGVGARRVRSLFQAAKKKAPCIIFIDEIDAVGSTRKQWEGHTKKTLHQLLVEMDGFEQNEGIIVMAATNLPDILDPALTRPGRFDRHIVVPSPDVRGREEILELYLQGKPMSEDVDVKAIARGTPGFNGADLANLVNIAAIKAAVEGAEKLSSEQLEFAKDRIVMGTERKTMFVSEDSKKLTAYHESGHAIVALNTKGAHPIHKATIMPRGSALGMVTQLPSNDETSVSKRQLLARLDVCMGGRVAEELIFGLDHITTGASSDLSQATELAQYMVSSCGMSEAIGPVHIKERPSSDMQSRIDAEVVKLLREAYERVKSLLKRHEKQLHTLANALLEYETLTAEDIKRILLPKQEGEKFEEQQQEEGDLVLA

SEQ ID NO: 21132 - protein, 806 aa, Arabidopsis thaliana
  peptide (1)..(806): Ceres Seq. ID no. 13580620
  misc_feature (586)..(783): Pfam Name: Peptidase family M41 Pfam Description: Peptidase family M41
  misc_feature (356)..(794): Homolog of NCBI NO: 7305635 NR Description: YME1-like 1; ATP-dependent metalloprotease FtsH1
  misc_feature (174)..(296): Homolog of NCBI NO: 23479426 NR Description: ATP-dependent metalloprotease FtsH, putative
  misc_feature (311)..(803): Homolog of NCBI NO: 23479426 NR Description: ATP-dependent metalloprotease FtsH, putative
  misc_feature (172)..(237): Homolog of NCBI NO: 23509838 NR Description: hypothetical protein, conserved [Plasmodium
  misc_feature (278)..(803): Homolog of NCBI NO: 23509838 NR Description: hypothetical protein, conserved [Plasmodium
  misc_feature (220)..(784): Homolog of NCBI NO: 7488430 NR Description: probable YME1 ATP-dependant proteinase
  misc_feature (198)..(798): Homolog of NCBI NO: 30526336 NR Description: putative FtsH protease [Lycopersicon esculentum]
  misc_feature (195)..(784): Homolog of NCBI NO: 18401040 NR Description: FtsH protease, putative [Arabidopsis thaliana]
  misc_feature (679)..(799): Homolog of NCBI NO: 34912722 NR Description: putative cell division protein FtsH protease-like
  misc_feature (115)..(685): Homolog of NCBI NO: 34912722 NR Description: putative cell division protein FtsH protease-like
MSSSTLQASLFLRPPLHTSSFKLYPCLFSSSSLSFCPQSLSSFYRLSSVLHNSRFRPLPCSLRQDNVASDSDFIPKDSAFEVTDSAESNRLVSDTEVSELETNDRFVGGEETKSGGEEAEVSNGVTEGKEEDQKKSKFRIVVLMMALWAAIKRAIEKVMEWEWLSWWPFSRQEKRLEKLIAEADANPKDAALQGALLAELNKHIPEAVVQRFEQREHTVDSRGVAEYIRALVITNAISEYLPDEQTGKPSSLPALLQELKHRASGNMDESFVNPGISEKQPLHVTMVNPKVSNKSRFAQELVSTILFTVAVGLVWIMGAAALQKYIGSLGGIGTSGVGSSSSYSPKELNKEITPEKNVKTFKDVKGCDDAKQELEEVVEYLKNPSKFTRLGGKLPKGILLTGAPGTGKTLLAKAIAGEAGVPFFYRAGSEFEEMFVGVGARRVRSLFQAAKKKAPCIIFIDEIDAVGSTRKQWEGHTKKTLHQLLVEMDGFEQNEGIIVMAATNLPDILDPALTRPGRFDRHIVVPSPDVRGREEILELYLQGKPMSEDVDVKAIARGTPGFNGADLANLVNIAAIKAAVEGAEKLSSEQLEFAKDRIVMGTERKTMFVSEDSKKLTAYHESGHAIVALNTKGAHPIHKATIMPRGSALGMVTQLPSNDETSVSKRQLLARLDVCMGGRVAEELIFGLDHITTGASSDLSQATELAQYMVSSCGMSEAIGPVHIKERPSSDMQSRIDAEVVKLLREAYERVKSLLKRHEKQLHTLANALLEYETLTAEDIKRILLPKQEGEKFEEQQQEEGDLVLA

SEQ ID NO: 21133 - protein, 663 aa, Arabidopsis thaliana
  peptide (1)..(663): Ceres Seq. ID no. 13580621
  misc_feature (443)..(640): Pfam Name: Peptidase family M41 Pfam Description: Peptidase family M41
  misc_feature (213)..(651): Homolog of NCBI NO: 7305635 NR Description: YME1-like 1; ATP-dependent metalloprotease FtsH1
  misc_feature (31)..(153): Homolog of NCBI NO: 23479426 NR Description: ATP-dependent metalloprotease FtsH, putative
  misc_feature (168)..(660): Homolog of NCBI NO: 23479426 NR Description: ATP-dependent metalloprotease FtsH, putative
  misc_feature (29)..(94): Homolog of NCBI NO: 23509838 NR Description: hypothetical protein, conserved [Plasmodium
  misc_feature (135)..(660): Homolog of NCBI NO: 23509838 NR Description: hypothetical protein, conserved [Plasmodium
  misc_feature (77)..(641): Homolog of NCBI NO: 7488430 NR Description: probable YME1 ATP-dependant proteinase
  misc_feature (55)..(655): Homolog of NCBI NO: 30526336 NR Description: putative FtsH protease [Lycopersicon esculentum]
  misc_feature (52)..(641): Homolog of NCBI NO: 18401040 NR Description: FtsH protease, putative [Arabidopsis thaliana]
  misc_feature (536)..(656): Homolog of NCBI NO: 34912722 NR Description: putative cell division protein FtsH protease-like
  misc_feature (1)..(542): Homolog of NCBI NO: 34912722 NR Description: putative cell division protein FtsH protease-like
MMALWAAIKRAIEKVMEWEWLSWWPFSRQEKRLEKLIAEADANPKDAALQGALLAELNKHIPEAVVQRFEQREHTVDSRGVAEYIRALVITNAISEYLPDEQTGKPSSLPALLQELKHRASGNMDESFVNPGISEKQPLHVTMVNPKVSNKSRFAQELVSTILFTVAVGLVWIMGAAALQKYIGSLGGIGTSGVGSSSSYSPKELNKEITPEKNVKTFKDVKGCDDAKQELEEVVEYLKNPSKFTRLGGKLPKGILLTGAPGTGKTLLAKAIAGEAGVPFFYRAGSEFEEMFVGVGARRVRSLFQAAKKKAPCIIFIDEIDAVGSTRKQWEGHTKKTLHQLLVEMDGFEQNEGIIVMAATNLPDILDPALTRPGRFDRHIVVPSPDVRGREEILELYLQGKPMSEDVDVKAIARGTPGFNGADLANLVNIAAIKAAVEGAEKLSSEQLEFAKDRIVMGTERKTMFVSEDSKKLTAYHESGHAIVALNTKGAHPIHKATIMPRGSALGMVTQLPSNDETSVSKRQLLARLDVCMGGRVAEELIFGLDHITTGASSDLSQATELAQYMVSSCGMSEAIGPVHIKERPSSDMQSRIDAEVVKLLREAYERVKSLLKRHEKQLHTLANALLEYETLTAEDIKRILLPKQEGEKFEEQQQEEGDLVLA

SEQ ID NO: 21134 - DNA, 825 bp, Arabidopsis thaliana
  misc_feature (1)..(825): Ceres Seq. ID no. 13499457
  misc_feature: MA Experiment ID: 108435 Result: Up-regulated in Transcription
  misc_feature: MA Experiment 108435 PARAMETER Experiment Name: At_stm_Mutants_cDNA_P Parameter: Plant Line Value: wt Landsburg vs stm
  misc_feature: MA Experiment 108435 PARAMETER Experiment Name: At_stm_Mutants_cDNA_P Parameter: Tissue Value: Shoot Apical Meristem Region
  misc_feature: MA Experiment ID: 108461 Result: Down-regulated in Transcription
  misc_feature: MA Experiment 108461 PARAMETER Experiment Name: At_Germinating_Seeds_cDNA_P Parameter: Age (day) Value: 1 vs. 0
  misc_feature: MA Experiment 108461 PARAMETER Experiment Name: At_Germinating_Seeds_cDNA_P Parameter: Tissue Value: Germinating Seeds
  misc_feature: MA Experiment ID: 108569 Result: Up-regulated in Transcription
  misc_feature: MA Experiment 108569 PARAMETER Experiment Name: At_0.001%_MeJA__cDNA_P Parameter: Timepoint (hr) Value: 6
  misc_feature: MA Experiment 108569 PARAMETER Experiment Name: At_0.001%_MeJA__cDNA_P Parameter: Tissue Value: Aerial
  misc_feature: MA Experiment 108569 PARAMETER Experiment Name: At_0.001%_MeJA__cDNA_P Parameter: Treatment Value: 0.001% MeJA vs. No Treatment
  misc_feature: MA Experiment ID: 108572 Result: Down-regulated in Transcription
  misc_feature: MA Experiment 108572 PARAMETER Experiment Name: At_Drought_cDNA_P Parameter: Timepoint (hr) Value: 1
  misc_feature: MA Experiment 108572 PARAMETER Experiment Name: At_Drought_cDNA_P Parameter: Tissue Value: Aerial
  misc_feature: MA Experiment 108572 PARAMETER Experiment Name: At_Drought_cDNA_P Parameter: Treatment Value: Drought vs. No Drought
  misc_feature: MA Experiment ID: 108595 Result: Up-regulated in Transcription
  misc_feature: MA Experiment 108595 PARAMETER Experiment Name: At_Ler-pi_Ovule_cDNA_P Parameter: Plant Line Value: null
  misc_feature: MA Experiment ID: 20000069 Result: Down-regulated in Transcription
  misc_feature: MA Experiment 20000069 PARAMETER Experiment Name: At_100uM_ABA_Mutants_cDNA_P Parameter: Plant Line Value: CS23
  misc_feature: MA Experiment 20000069 PARAMETER Experiment Name: At_100uM_ABA_Mutants_cDNA_P Parameter: Timepoint (hr) Value: 6
  misc_feature: MA Experiment 20000069 PARAMETER Experiment Name: At_100uM_ABA_Mutants_cDNA_P Parameter: Tissue Value: Aerial
  misc_feature: MA Experiment 20000069 PARAMETER Experiment Name: At_100uM_ABA_Mutants_cDNA_P Parameter: Treatment Value: 100uM ABA vs. No Treatment
  misc_feature: MA Experiment ID: 20000070 Result: Down-regulated in Transcription
  misc_feature: MA Experiment 20000070 PARAMETER Experiment Name: At_100uM_ABA_Mutants_cDNA_P Parameter: Plant Line Value: CS24
  misc_feature: MA Experiment 20000070 PARAMETER Experiment Name: At_100uM_ABA_Mutants_cDNA_P Parameter: Timepoint (hr) Value: 6
  misc_feature: MA Experiment 20000070 PARAMETER Experiment Name: At_100uM_ABA_Mutants_cDNA_P Parameter: Tissue Value: Aerial
  misc_feature: MA Experiment 20000070 PARAMETER Experiment Name: At_100uM_ABA_Mutants_cDNA_P Parameter: Treatment Value: 100uM ABA vs. No Treatment
  misc_feature: MA Experiment ID: 20000071 Result: Down-regulated in Transcription
  misc_feature: MA Experiment 20000071 PARAMETER Experiment Name: At_100uM_ABA_Mutants_cDNA_P Parameter: Plant Line Value: CS8104
  misc_feature: MA Experiment 20000071 PARAMETER Experiment Name: At_100uM_ABA_Mutants_cDNA_P Parameter: Timepoint (hr) Value: 6
  misc_feature: MA Experiment 20000071 PARAMETER Experiment Name: At_100uM_ABA_Mutants_cDNA_P Parameter: Tissue Value: Aerial
  misc_feature: MA Experiment 20000071 PARAMETER Experiment Name: At_100uM_ABA_Mutants_cDNA_P Parameter: Treatment Value: 100uM ABA vs. No Treatment
  misc_feature: MA Experiment ID: 20000072 Result: Down-regulated in Transcription
  misc_feature: MA Experiment 20000072 PARAMETER Experiment Name: At_100uM_ABA_Mutants_cDNA_P Parameter: Plant Line Value: CS8105
  misc_feature: MA Experiment 20000072 PARAMETER Experiment Name: At_100uM_ABA_Mutants_cDNA_P Parameter: Timepoint (hr) Value: 6
  misc_feature: MA Experiment 20000072 PARAMETER Experiment Name: At_100uM_ABA_Mutants_cDNA_P Parameter: Tissue Value: Aerial
  misc_feature: MA Experiment 20000072 PARAMETER Experiment Name: At_100uM_ABA_Mutants_cDNA_P Parameter: Treatment Value: 100uM ABA vs. No Treatment
  misc_feature: MA Experiment ID: 20000087 Result: Down-regulated in Transcription
  misc_feature: MA Experiment 20000087 PARAMETER Experiment Name: At_100uM_ABA_Mutants_cDNA_P Parameter: Plant Line Value: WS
  misc_feature: MA Experiment 20000087 PARAMETER Experiment Name: At_100uM_ABA_Mutants_cDNA_P Parameter: Timepoint (hr) Value: 6
  misc_feature: MA Experiment 20000087 PARAMETER Experiment Name: At_100uM_ABA_Mutants_cDNA_P Parameter: Tissue Value: Aerial
  misc_feature: MA Experiment 20000087 PARAMETER Experiment Name: At_100uM_ABA_Mutants_cDNA_P Parameter: Treatment Value: 100uM ABA vs. No Treatment
  misc_feature: MA Experiment ID: 20000111 Result: Down-regulated in Transcription
  misc_feature: MA Experiment 20000111 PARAMETER Experiment Name: At_42deg_Heat_cDNA_P Parameter: Temperature (deg C) Value: 42 vs. 22
  misc_feature: MA Experiment 20000111 PARAMETER Experiment Name: At_42deg_Heat_cDNA_P Parameter: Timepoint (hr) Value: 6
  misc_feature: MA Experiment 20000111 PARAMETER Experiment Name: At_42deg_Heat_cDNA_P Parameter: Tissue Value: Aerial
  misc_feature: MA Experiment ID: 20000112 Result: Down-regulated in Transcription
  misc_feature: MA Experiment 20000112 PARAMETER Experiment Name: At_42deg_Heat_cDNA_P Parameter: Temperature (deg C) Value: 42 vs. 22
  misc_feature: MA Experiment 20000112 PARAMETER Experiment Name: At_42deg_Heat_cDNA_P Parameter: Timepoint (hr) Value: 2
  misc_feature: MA Experiment 20000112 PARAMETER Experiment Name: At_42deg_Heat_cDNA_P Parameter: Tissue Value: Aerial
  misc_feature: MA Experiment ID: 20000113 Result: Down-regulated in Transcription
  misc_feature: MA Experiment 20000113 PARAMETER Experiment Name: At_42deg_Heat_cDNA_P Parameter: Temperature (deg C) Value: 42 vs. 22
  misc_feature: MA Experiment 20000113 PARAMETER Experiment Name: At_42deg_Heat_cDNA_P Parameter: Timepoint (hr) Value: 8
  misc_feature: MA Experiment 20000113 PARAMETER Experiment Name: At_42deg_Heat_cDNA_P Parameter: Tissue Value: Aerial
  misc_feature: MA Experiment ID: 20000117 Result: Down-regulated in Transcription
  misc_feature: MA Experiment 20000117 PARAMETER Experiment Name: At_100uM_ABA_Mutants_cDNA_P Parameter: Plant Line Value: Columbia
  misc_feature: MA Experiment 20000117 PARAMETER Experiment Name: At_100uM_ABA_Mutants_cDNA_P Parameter: Timepoint (hr) Value: 6
  misc_feature: MA Experiment 20000117 PARAMETER Experiment Name: At_100uM_ABA_Mutants_cDNA_P Parameter: Tissue Value: Aerial
  misc_feature: MA Experiment 20000117 PARAMETER Experiment Name: At_100uM_ABA_Mutants_cDNA_P Parameter: Treatment Value: 100uM ABA vs. No Treatment
  misc_feature: MA Experiment ID: 20000166 Result: Down-regulated in Transcription
  misc_feature: MA Experiment 20000166 PARAMETER Experiment Name: At_100uM_ABA_P Parameter: Age (day) Value: 14
  misc_feature: MA Experiment 20000166 PARAMETER Experiment Name: At_100uM_ABA_P Parameter: Organism Value: A. thaliana
  misc_feature: MA Experiment 20000166 PARAMETER Experiment Name: At_100uM_ABA_P Parameter: Plant Line Value: WS
  misc_feature: MA Experiment 20000166 PARAMETER Experiment Name: At_100uM_ABA_P Parameter: Timepoint (hr) Value: 1
  misc_feature: MA Experiment 20000166 PARAMETER Experiment Name: At_100uM_ABA_P Parameter: Tissue Value: Aerial
  misc_feature: MA Experiment 20000166 PARAMETER Experiment Name: At_100uM_ABA_P Parameter: Treatment Value: 100uM ABA vs. No Treatment
  misc_feature: MA Experiment ID: 20000169 Result: Down-regulated in Transcription
  misc_feature: MA Experiment 20000169 PARAMETER Experiment Name: At_100uM_ABA_P Parameter: Age (day) Value: 14
  misc_feature: MA Experiment 20000169 PARAMETER Experiment Name: At_100uM_ABA_P Parameter: Organism Value: A. thaliana
  misc_feature: MA Experiment 20000169 PARAMETER Experiment Name: At_100uM_ABA_P Parameter: Plant Line Value: WS
  misc_feature: MA Experiment 20000169 PARAMETER Experiment Name: At_100uM_ABA_P Parameter: Timepoint (hr) Value: 6
  misc_feature: MA Experiment 20000169 PARAMETER Experiment Name: At_100uM_ABA_P Parameter: Tissue Value: Aerial
  misc_feature: MA Experiment 20000169 PARAMETER Experiment Name: At_100uM_ABA_P Parameter: Treatment Value: 100uM ABA vs. No Treatment
  misc_feature: MA Experiment ID: 20000171 Result: Down-regulated in Transcription
  misc_feature: MA Experiment 20000171 PARAMETER Experiment Name: At_42deg_Heat_P Parameter: Age (day) Value: 14
  misc_feature: MA Experiment 20000171 PARAMETER Experiment Name: At_42deg_Heat_P Parameter: Organism Value: A. thaliana
  misc_feature: MA Experiment 20000171 PARAMETER Experiment Name: At_42deg_Heat_P Parameter: Plant Line Value: WS
  misc_feature: MA Experiment 20000171 PARAMETER Experiment Name: At_42deg_Heat_P Parameter: Temperature (deg C) Value: 42 vs. 22
  misc_feature: MA Experiment 20000171 PARAMETER Experiment Name: At_42deg_Heat_P Parameter: Timepoint (hr) Value: 1
  misc_feature: MA Experiment 20000171 PARAMETER Experiment Name: At_42deg_Heat_P Parameter: Tissue Value: Aerial
  misc_feature: MA Experiment ID: 20000173 Result: Down-regulated in Transcription
  misc_feature: MA Experiment 20000173 PARAMETER Experiment Name: At_42deg_Heat_P Parameter: Age (day) Value: 14
  misc_feature: MA Experiment 20000173 PARAMETER Experiment Name: At_42deg_Heat_P Parameter: Organism Value: A. thaliana
  misc_feature: MA Experiment 20000173 PARAMETER Experiment Name: At_42deg_Heat_P Parameter: Plant Line Value: WS
  misc_feature: MA Experiment 20000173 PARAMETER Experiment Name: At_42deg_Heat_P Parameter: Temperature (deg C) Value: 42 vs. 22
  misc_feature: MA Experiment 20000173 PARAMETER Experiment Name: At_42deg_Heat_P Parameter: Timepoint (hr) Value: 6
  misc_feature: MA Experiment 20000173 PARAMETER Experiment Name: At_42deg_Heat_P Parameter: Tissue Value: Aerial
  misc_feature: MA Experiment ID: 20000179 Result: Down-regulated in Transcription
  misc_feature: MA Experiment 20000179 PARAMETER Experiment Name: At_Germinating_Seeds_P Parameter: Age (hr) Value: 6 vs. 0
  misc_feature: MA Experiment 20000179 PARAMETER Experiment Name: At_Germinating_Seeds_P Parameter: Tissue Value: Germinating Seeds
  misc_feature: MA Experiment ID: 20000180 Result: Down-regulated in Transcription
  misc_feature: MA Experiment 20000180 PARAMETER Experiment Name: At_Germinating_Seeds_P Parameter: Age (hr) Value: 24 vs. 0
  misc_feature: MA Experiment 20000180 PARAMETER Experiment Name: At_Germinating_Seeds_P Parameter: Tissue Value: Germinating Seeds
  misc_feature: MA Experiment ID: 20000224 Result: Down-regulated in Transcription
  misc_feature: MA Experiment ID: 20000227 Result: Down-regulated in Transcription
  misc_feature: MA Experiment 20000227 PARAMETER Experiment Name: At_Root-Tips-vs-Tops_P Parameter: Tissue Value: Root Tips vs. Root Tops
  misc_feature: MA Experiment ID: 20000234 Result: Up-regulated in Transcription
  misc_feature: MA Experiment 20000234 PARAMETER Experiment Name: At_Siliques_P Parameter: Age (day) Value: 21
  misc_feature: MA Experiment 20000234 PARAMETER Experiment Name: At_Siliques_P Parameter: Organism Value: A. thaliana
  misc_feature: MA Experiment 20000234 PARAMETER Experiment Name: At_Siliques_P Parameter: Plant Line Value: WS
  misc_feature: MA Experiment 20000234 PARAMETER Experiment Name: At_Siliques_P Parameter: Tissue Value: Less Than 5mm Siliques vs. Whole Plant
  misc_feature: MA Experiment ID: 20000265 Result: Down-regulated in Transcription
  misc_feature: MA Experiment 20000265 PARAMETER Experiment Name: At_Open_Flower_P Parameter: Age (day) Value: 21
  misc_feature: MA Experiment 20000265 PARAMETER Experiment Name: At_Open_Flower_P Parameter: Plant Line Value: WS
  misc_feature: MA Experiment 20000265 PARAMETER Experiment Name: At_Open_Flower_P Parameter: Tissue Value: Closed Flower vs. Whole Plant
  misc_feature: MA Experiment ID: 20000267 Result: Down-regulated in Transcription
  misc_feature: MA Experiment 20000267 PARAMETER Experiment Name: At_Drought_P Parameter: Age (day) Value: 7
  misc_feature: MA Experiment 20000267 PARAMETER Experiment Name: At_Drought_P Parameter: Organism Value: A. thaliana
  misc_feature: MA Experiment 20000267 PARAMETER Experiment Name: At_Drought_P Parameter: Plant Line Value: WS
  misc_feature: MA Experiment 20000267 PARAMETER Experiment Name: At_Drought_P Parameter: Timepoint (hr) Value: 6
  misc_feature: MA Experiment 20000267 PARAMETER Experiment Name: At_Drought_P Parameter: Tissue Value: Whole Plant
  misc_feature: MA Experiment 20000267 PARAMETER Experiment Name: At_Drought_P Parameter: Treatment Value: Drought vs. No Drought
  misc_feature: MA Experiment ID: 20000436 Result: Down-regulated in Transcription
  misc_feature: MA Experiment 20000436 PARAMETER Experiment Name: At_Drought_P Parameter: Age (day) Value: 7
  misc_feature: MA Experiment 20000436 PARAMETER Experiment Name: At_Drought_P Parameter: Organism Value: A. thaliana
  misc_feature: MA Experiment 20000436 PARAMETER Experiment Name: At_Drought_P Parameter: Plant Line Value: WS
  misc_feature: MA Experiment 20000436 PARAMETER Experiment Name: At_Drought_P Parameter: Timepoint (hr) Value: 12
  misc_feature: MA Experiment 20000436 PARAMETER Experiment Name: At_Drought_P Parameter: Tissue Value: Whole Plant
  misc_feature: MA Experiment 20000436 PARAMETER Experiment Name: At_Drought_P Parameter: Treatment Value: Drought vs. No Drought
  misc_feature: MA Experiment ID: 20000437 Result: Down-regulated in Transcription
  misc_feature: MA Experiment 20000437 PARAMETER Experiment Name: At_Drought_P Parameter: Age (day) Value: 8
  misc_feature: MA Experiment 20000437 PARAMETER Experiment Name: At_Drought_P Parameter: Organism Value: A. thaliana
  misc_feature: MA Experiment 20000437 PARAMETER Experiment Name: At_Drought_P Parameter: Plant Line Value: WS
  misc_feature: MA Experiment 20000437 PARAMETER Experiment Name: At_Drought_P Parameter: Timepoint (hr) Value: 24
  misc_feature: MA Experiment 20000437 PARAMETER Experiment Name: At_Drought_P Parameter: Tissue Value: Whole Plant
  misc_feature: MA Experiment 20000437 PARAMETER Experiment Name: At_Drought_P Parameter: Treatment Value: Drought vs. No Drought
  misc_feature: MA Experiment ID: 20000453 Result: Down-regulated in Transcription
  misc_feature: MA Experiment 20000453 PARAMETER Experiment Name: At_100uM_ABA_P Parameter: Age (day) Value: 15
  misc_feature: MA Experiment 20000453 PARAMETER Experiment Name: At_100uM_ABA_P Parameter: Organism Value: A. thaliana
  misc_feature: MA Experiment 20000453 PARAMETER Experiment Name: At_100uM_ABA_P Parameter: Plant Line Value: WS
  misc_feature: MA Experiment 20000453 PARAMETER Experiment Name: At_100uM_ABA_P Parameter: Timepoint (hr) Value: 24
  misc_feature: MA Experiment 20000453 PARAMETER Experiment Name: At_100uM_ABA_P Parameter: Tissue Value: Aerial
  misc_feature: MA Experiment 20000453 PARAMETER Experiment Name: At_100uM_ABA_P Parameter: Treatment Value: 100uM ABA vs. No Treatment
  misc_feature: MA Experiment ID: 20000455 Result: Down-regulated in Transcription
  misc_feature: MA Experiment 20000455 PARAMETER Experiment Name: At_100uM_ABA_P Parameter: Age (day) Value: 16
  misc_feature: MA Experiment 20000455 PARAMETER Experiment Name: At_100uM_ABA_P Parameter: Organism Value: A. thaliana
  misc_feature: MA Experiment 20000455 PARAMETER Experiment Name: At_100uM_ABA_P Parameter: Plant Line Value: WS
  misc_feature: MA Experiment 20000455 PARAMETER Experiment Name: At_100uM_ABA_P Parameter: Timepoint (hr) Value: 48
  misc_feature: MA Experiment 20000455 PARAMETER Experiment Name: At_100uM_ABA_P Parameter: Tissue Value: Aerial
  misc_feature: MA Experiment 20000455 PARAMETER Experiment Name: At_100uM_ABA_P Parameter: Treatment Value: 100uM ABA vs. No Treatment
  misc_feature: MA Experiment ID: 20000527 Result: Down-regulated in Transcription
  misc_feature: MA Experiment 20000527 PARAMETER Experiment Name: At_10percent_PEG_P Parameter: Age (day) Value: 20
  misc_feature: MA Experiment 20000527 PARAMETER Experiment Name: At_10percent_PEG_P Parameter: Organism Value: A. thaliana
  misc_feature: MA Experiment 20000527 PARAMETER Experiment Name: At_10percent_PEG_P Parameter: Plant Line Value: WS
  misc_feature: MA Experiment 20000527 PARAMETER Experiment Name: At_10percent_PEG_P Parameter: Timepoint (day) Value: 20
  misc_feature: MA Experiment 20000527 PARAMETER Experiment Name: At_10percent_PEG_P Parameter: Tissue Value: Whole Plant
  misc_feature: MA Experiment 20000527 PARAMETER Experiment Name: At_10percent_PEG_P Parameter: Treatment Value: 10percent PEG vs. No Treatment
  misc_feature: MA Experiment ID: 20000573 Result: Up-regulated in Transcription
  misc_feature: MA Experiment 20000573 PARAMETER Experiment Name: At_100uM_ABA_Mutants__P Parameter: Organism Value: A. thaliana
  misc_feature: MA Experiment 20000573 PARAMETER Experiment Name: At_100uM_ABA_Mutants__P Parameter: Plant Line Value: CS22 vs. Ler wt
  misc_feature: MA Experiment 20000573 PARAMETER Experiment Name: At_100uM_ABA_Mutants__P Parameter: Timepoint (hr) Value: N/A
  misc_feature: MA Experiment 20000573 PARAMETER Experiment Name: At_100uM_ABA_Mutants__P Parameter: Tissue Value: Whole Plant
  misc_feature: MA Experiment 20000573 PARAMETER Experiment Name: At_100uM_ABA_Mutants__P Parameter: Treatment Value: None
  misc_feature: MA Experiment ID: 20000794 Result: Down-regulated in Transcription
  misc_feature: MA Experiment 20000794 PARAMETER Experiment Name: At_Petals_P Parameter: Age (day) Value: 23-25 days
  misc_feature: MA Experiment 20000794 PARAMETER Experiment Name: At_Petals_P Parameter: Plant Line Value: WS
  misc_feature: MA Experiment 20000794 PARAMETER Experiment Name: At_Petals_P Parameter: Tissue Value: Petals vs. Whole plant
  misc_feature: MA Experiment ID: 20001248 Result: Up-regulated in Transcription
  misc_feature: MA Experiment 20001248 PARAMETER Experiment Name: At_Far-red-induction_P Parameter: Age (day) Value: 7
  misc_feature: MA Experiment 20001248 PARAMETER Experiment Name: At_Far-red-induction_P Parameter: Light Value: Far-red vs. White
  misc_feature: MA Experiment 20001248 PARAMETER Experiment Name: At_Far-red-induction_P Parameter: Organism Value: A. thaliana
  misc_feature: MA Experiment 20001248 PARAMETER Experiment Name: At_Far-red-induction_P Parameter: Plant Line Value: Columbia
  misc_feature: MA Experiment 20001248 PARAMETER Experiment Name: At_Far-red-induction_P Parameter: Timepoint (hr) Value: 4
  misc_feature: MA Experiment 20001248 PARAMETER Experiment Name: At_Far-red-induction_P Parameter: Tissue Value: Whole Plant
  misc_feature: MA Experiment ID: 20001555 Result: Down-regulated in Transcription
  misc_feature: MA Experiment 20001555 PARAMETER Experiment Name: At_Drought_Soil_Dry_P Parameter: Age (day) Value: 24
  misc_feature: MA Experiment 20001555 PARAMETER Experiment Name: At_Drought_Soil_Dry_P Parameter: Organism Value: A. thaliana
  misc_feature: MA Experiment 20001555 PARAMETER Experiment Name: At_Drought_Soil_Dry_P Parameter: Plant Line Value: WS
  misc_feature: MA Experiment 20001555 PARAMETER Experiment Name: At_Drought_Soil_Dry_P Parameter: Post Timepoint (hr) Value: None
  misc_feature: MA Experiment 20001555 PARAMETER Experiment Name: At_Drought_Soil_Dry_P Parameter: Post-Treatment Value: None
  misc_feature: MA Experiment 20001555 PARAMETER Experiment Name: At_Drought_Soil_Dry_P Parameter: Timepoint (day) Value: 10
  misc_feature: MA Experiment 20001555 PARAMETER Experiment Name: At_Drought_Soil_Dry_P Parameter: Treatment Value: Drought vs. No Drought
  misc_feature: MA Experiment ID: 20001556 Result: Down-regulated in Transcription
  misc_feature: MA Experiment 20001556 PARAMETER Experiment Name: At_Drought_Soil_Dry_P Parameter: Age (day) Value: 26
  misc_feature: MA Experiment 20001556 PARAMETER Experiment Name: At_Drought_Soil_Dry_P Parameter: Organism Value: A. thaliana
  misc_feature: MA Experiment 20001556 PARAMETER Experiment Name: At_Drought_Soil_Dry_P Parameter: Plant Line Value: WS
  misc_feature: MA Experiment 20001556 PARAMETER Experiment Name: At_Drought_Soil_Dry_P Parameter: Post Timepoint (hr) Value: None
  misc_feature: MA Experiment 20001556 PARAMETER Experiment Name: At_Drought_Soil_Dry_P Parameter: Post-Treatment Value: None
  misc_feature: MA Experiment 20001556 PARAMETER Experiment Name: At_Drought_Soil_Dry_P Parameter: Timepoint (day) Value: 12
  misc_feature: MA Experiment 20001556 PARAMETER Experiment Name: At_Drought_Soil_Dry_P Parameter: Treatment Value: Drought vs. No Drought
  misc_feature: MA Experiment ID: 20001559 Result: Down-regulated in Transcription
  misc_feature: MA Experiment 20001559 PARAMETER Experiment Name: At_Drought_Soil_Dry_P Parameter: Age (day) Value: 28
  misc_feature: MA Experiment 20001559 PARAMETER Experiment Name: At_Drought_Soil_Dry_P Parameter: Organism Value: A. thaliana
  misc_feature: MA Experiment 20001559 PARAMETER Experiment Name: At_Drought_Soil_Dry_P Parameter: Plant Line Value: WS
  misc_feature: MA Experiment 20001559 PARAMETER Experiment Name: At_Drought_Soil_Dry_P Parameter: Post Timepoint (hr) Value: 29
  misc_feature: MA Experiment 20001559 PARAMETER Experiment Name: At_Drought_Soil_Dry_P Parameter: Post-Treatment Value: Re-Water vs. No Drought
  misc_feature: MA Experiment 20001559 PARAMETER Experiment Name: At_Drought_Soil_Dry_P Parameter: Timepoint (day) Value: 14
  misc_feature: MA Experiment 20001559 PARAMETER Experiment Name: At_Drought_Soil_Dry_P Parameter: Treatment Value: Drought vs. No Drought
  misc_feature: MA Experiment ID: 20001772 Result: Up-regulated in Transcription
  misc_feature: MA Experiment 20001772 PARAMETER Experiment Name: At_Far-red-enriched-adult_P Parameter: Age (day) Value: 29
  misc_feature: MA Experiment 20001772 PARAMETER Experiment Name: At_Far-red-enriched-adult_P Parameter: Light Value: Far-red enriched vs. White
  misc_feature: MA Experiment 20001772 PARAMETER Experiment Name: At_Far-red-enriched-adult_P Parameter: Organism Value: A. thaliana
  misc_feature: MA Experiment 20001772 PARAMETER Experiment Name: At_Far-red-enriched-adult_P Parameter: Plant Line Value: Columbia
  misc_feature: MA Experiment 20001772 PARAMETER Experiment Name: At_Far-red-enriched-adult_P Parameter: Timepoint (hr) Value: 24
  misc_feature: MA Experiment 20001772 PARAMETER Experiment Name: At_Far-red-enriched-adult_P Parameter: Tissue Value: Aerial
  misc_feature: MA Experiment ID: 20001904 Result: Down-regulated in Transcription
  misc_feature: MA Experiment 20001904 PARAMETER Experiment Name: At_Drought_Reproduction_P Parameter: Age (day) Value: 37
  misc_feature: MA Experiment 20001904 PARAMETER Experiment Name: At_Drought_Reproduction_P Parameter: Organism Value: A. thaliana
  misc_feature: MA Experiment 20001904 PARAMETER Experiment Name: At_Drought_Reproduction_P Parameter: Plant Line Value: WS
  misc_feature: MA Experiment 20001904 PARAMETER Experiment Name: At_Drought_Reproduction_P Parameter: Timepoint (day) Value: 7
  misc_feature: MA Experiment 20001904 PARAMETER Experiment Name: At_Drought_Reproduction_P Parameter: Tissue Value: Rosettes
  misc_feature: MA Experiment 20001904 PARAMETER Experiment Name: At_Drought_Reproduction_P Parameter: Treatment Value: Drought vs. No Drought
aactactaaacactaaattatcaatccgctctcttctcaaaaaaaaaaaatcgactctaaaatcaaactctctcaaagctccccaaaaaaaccctagttctgaatggaatcggcggattccggacgatccgatccggtaaaaggagacgacccgggtccatctttcgtctcttcaccaccagctacacctagcaggtatgagtcacagaagcgacgcgactggaacacgttcttgcagtacctcaagaaccacaagccgcctctcgcgttgtcacggtgtagcggagcgcatgtgatcgagtttctcaagtacctcgaccagttcggtaagaccaaagtccacgtggcggcttgtccttacttcggccatcagcaacctccgtctccttgctcatgccctctcaagcaagcttggggatctctcgatgctttgatcggacggttgagagctgcctacgaggagaacggtggacggccggattctaacccgttcgccgcacgtgcggttcggatttacttgagggaagtcagagagagtcaggcaaaggctcgtgggattccttacgagaaaaagaaacggaaacggccgccaactgtcaccaccgttagagttgacgtcgcttcttcgagacaaagtgacggagacccttgtaacgtcggtgctccatctgttgccgaggccgtaccgccttagatcgaattatatataatattatagttttcttgattaatgatatatatatacttatctctatgtatgtatggaactcacttcatcttttgttccttagtacctaattattaaattttgttccttttgagtcg

SEQ ID NO: 21135 - protein, 196 aa, Arabidopsis thaliana
  peptide (1)..(196): Ceres Seq. ID no. 13499458
  misc_feature (13)..(145): Pfam Name: Protein of unknown function (DUF640) Pfam Description: Protein of unknown function (DUF640)
  misc_feature (23)..(178): Homolog of NCBI NO: 18406012 NR Description: expressed protein [Arabidopsis thaliana]
  misc_feature (14)..(177): Homolog of NCBI NO: 18402578 NR Description: expressed protein [Arabidopsis thaliana]
  misc_feature (12)..(181): Homolog of NCBI NO: 15237680 NR Description: hypothetical protein [Arabidopsis thaliana]
  misc_feature (19)..(162): Homolog of NCBI NO: 38344650 NR Description: OSJNBb0072M01.12 [Oryza sativa (japonica
  misc_feature (19)..(160): Homolog of NCBI NO: 15229310 NR Description: hypothetical protein [Arabidopsis thaliana]
  misc_feature (16)..(180): Homolog of NCBI NO: 15241821 NR Description: expressed protein [Arabidopsis thaliana]
  misc_feature (7)..(161): Homolog of NCBI NO: 21592379 NR Description: unknown [Arabidopsis thaliana]
  misc_feature (5)..(163): Homolog of NCBI NO: 37535384 NR Description: hypothetical protein [Oryza sativa (japonica
  misc_feature (1)..(175): Homolog of NCBI NO: 34907938 NR Description: B1088C09.17 [Oryza sativa (japonica
  misc_feature (1)..(196): Homolog of NCBI NO: 18390725 NR Description: expressed protein [Arabidopsis thaliana]
MESADSGRSDPVKGDDPGPSFVSSPPATPSRYESQKRRDWNTFLQYLKNHKPPLALSRCSGAHVIEFLKYLDQFGKTKVHVAACPYFGHQQPPSPCSCPLKQAWGSLDALIGRLRAAYEENGGRPDSNPFAARAVRIYLREVRESQAKARGIPYEKKKRKRPPTVTTVRVDVASSRQSDGDPCNVGAPSVAEAVPP

SEQ ID NO: 21136 - DNA, 1821 bp, Arabidopsis thaliana
  misc_feature (1)..(1821): Ceres Seq. ID no. 13488703
  misc_feature: MA Experiment ID: 108434 Result: Up-regulated in Transcription
  misc_feature: MA Experiment 108434 PARAMETER Experiment Name: At_Root_Tips_cDNA_P Parameter: Tissue Value: Root Tips
  misc_feature: MA Experiment ID: 108461 Result: Up-regulated in Transcription
  misc_feature: MA Experiment 108461 PARAMETER Experiment Name: At_Germinating_Seeds_cDNA_P Parameter: Age (day) Value: 1 vs. 0
  misc_feature: MA Experiment 108461 PARAMETER Experiment Name: At_Germinating_Seeds_cDNA_P Parameter: Tissue Value: Germinating Seeds
  misc_feature: MA Experiment ID: 108569 Result: Up-regulated in Transcription
  misc_feature: MA Experiment 108569 PARAMETER Experiment Name: At_0.001%_MeJA__cDNA_P Parameter: Timepoint (hr) Value: 6
  misc_feature: MA Experiment 108569 PARAMETER Experiment Name: At_0.001%_MeJA__cDNA_P Parameter: Tissue Value: Aerial
  misc_feature: MA Experiment 108569 PARAMETER Experiment Name: At_0.001%_MeJA__cDNA_P Parameter: Treatment Value: 0.001% MeJA vs. No Treatment
  misc_feature: MA Experiment ID: 108595 Result: Down-regulated in Transcription
  misc_feature: MA Experiment 108595 PARAMETER Experiment Name: At_Ler-pi_Ovule_cDNA_P Parameter: Plant Line Value: null
  misc_feature: MA Experiment ID: 20000171 Result: Down-regulated in Transcription
  misc_feature: MA Experiment 20000171 PARAMETER Experiment Name: At_42deg_Heat_P Parameter: Age (day) Value: 14
  misc_feature: MA Experiment 20000171 PARAMETER Experiment Name: At_42deg_Heat_P Parameter: Organism Value: A. thaliana
  misc_feature: MA Experiment 20000171 PARAMETER Experiment Name: At_42deg_Heat_P Parameter: Plant Line Value: WS
  misc_feature: MA Experiment 20000171 PARAMETER Experiment Name: At_42deg_Heat_P Parameter: Temperature (deg C) Value: 42 vs. 22
  misc_feature: MA Experiment 20000171 PARAMETER Experiment Name: At_42deg_Heat_P Parameter: Timepoint (hr) Value: 1
  misc_feature: MA Experiment 20000171 PARAMETER Experiment Name: At_42deg_Heat_P Parameter: Tissue Value: Aerial
  misc_feature: MA Experiment ID: 20000179 Result: Up-regulated in Transcription
  misc_feature: MA Experiment 20000179 PARAMETER Experiment Name: At_Germinating_Seeds_P Parameter: Age (hr) Value: 6 vs. 0
  misc_feature: MA Experiment 20000179 PARAMETER Experiment Name: At_Germinating_Seeds_P Parameter: Tissue Value: Germinating Seeds
  misc_feature: MA Experiment ID: 20000224 Result: Down-regulated in Transcription
  misc_feature: MA Experiment ID: 20000794 Result: Down-regulated in Transcription
  misc_feature: MA Experiment 20000794 PARAMETER Experiment Name: At_Petals_P Parameter: Age (day) Value: 23-25 days
  misc_feature: MA Experiment 20000794 PARAMETER Experiment Name: At_Petals_P Parameter: Plant Line Value: WS
  misc_feature: MA Experiment 20000794 PARAMETER Experiment Name: At_Petals_P Parameter: Tissue Value: Petals vs. Whole plant
gtttcttctcggtttctccgtaagcattcagagttctgcaagtaagagaagaaggaagctatggatgtagagcaaaagaaaccgttaatcgaatcatcagatcgtaatctacctgatttcaaaaaatcagtgaagcttaaatatgtgaagcttggttaccattaccttatcactcatggaatgtaccttttcctctccccattagtacttgtaatcgctgcacagatttcaactttctctgtcaccgatcttcgtagcctctgggagcatcttcagtacaatcttatctcagtggttgtttgttctatgctgcttgttttcttaatgactatttacttcatgactcgaccacgtcctgtctacttggtgaacttctcgtgctttaaacccgatgagtcacgaaaatgcactaaaaagatctttatggatcgttctaaactcactggctctttcacagaggagaatcttgagttccagcgtaagattctacaacgttcggggctcggggaatcgacttacttacccgaggctgtacttaatgttccgcctaacccgtgtatgaaagaagctcgaaaagaggccgagactgttatgtttggagctattgatgagcttcttgcgaagacgaatgtgaacccgaaggatattgggatcttgattgttaactgtagtttgtttaacccgacaccttcgttatctgctatggttgttaatcactataagctccgcgggaatatacttagttacaacttgggaggaatgggttgcagtgctggtttgatttctattgatcttgctaaacatcttcttcactctattcccaacacttatgcaatggtgattagtatggagaacattacgttgaactggtatttcgggaatgaccggtcgaagcttgtttctaattgtctgtttagaatgggaggtgcagcgattcttctttcgaacaaaagatgggacagaagaagatcgaaatatgagcttgttgatacggttaggactcacaagggagctgatgataagtgttttggttgcataactcaagaagaggattccgcaagtaagattggtgttaccttgtcgaaagaacttatggctgttgcgggtgatgctctaaagacaaatattacgacgttaggaccactggttttaccgacatctgaacagcttctgttctttgcaacgttagtgggaagaaaactcttcaagatgaagatcaagccttacatcccagacttcaaactagcgtttgagcatttctgcatccacgcaggagggagagctgttcttgatgaattggagaagaacttgaaactcacagagtggcatatggagccctcgaggatgacactctaccgttttggtaacacgtccagttcttctttgtggtatgaattagcatatagtgaggccaaaggaaggatcaagaaaggtgatagaatttggcagatagcttttggttcggggttcaagtgcaacagctcggtttggagagcggtaaggtcggtaaaccctaagaaagagaagaacccatggatggatgaaattcatgagttcccagttgaagtccccaaggtctccacaatctagaaaccacttagtggcaaattttcagaagaggtttttgagttttcagcttttgatattttgtgtcttcccagtgaatttacctttttcttgatttgataatcagatacaccaaactggttaacaatatttttcttcttttttgcggaaaaacttgttgtagtcagtagcagaccgtcaatggtcggtccagcttgtgtttttggttgttgtgtctgcatatatatttccttt

SEQ ID NO: 21137 - protein, 509 aa, Arabidopsis thaliana
  peptide (1)..(509): Ceres Seq. ID no. 13488704
  misc_feature (338)..(481): Pfam Name: Chalcone and stilbene synthases, C-terminal domain Pfam Description: Chalcone and stilbene synthases, C-terminal
  misc_feature (15)..(505): Homolog of NCBI NO: 32172500 NR Description: FAE3 [Marchantia polymorpha]
  misc_feature (10)..(509): Homolog of NCBI NO: 18377979 NR Description: putative beta-ketoacyl-CoA synthase [Arabidopsis
  misc_feature (16)..(509): Homolog of NCBI NO: 15239981 NR Description: beta-ketoacyl-CoA synthase, putative [Arabidopsis
  misc_feature (10)..(509): Homolog of NCBI NO: 15219676 NR Description: beta-ketoacyl-CoA synthase, putative [Arabidopsis
  misc_feature (17)..(504): Homolog of NCBI NO: 19908404 NR Description: putative fatty acid elongase [Tropaeolum majus]
  misc_feature (16)..(509): Homolog of NCBI NO: 14334714 NR Description: putative beta-ketoacyl-CoA synthase [Arabidopsis
  misc_feature (1)..(509): Homolog of NCBI NO: 29417540 NR Description: beta-ketoacyl-CoA-synthase [Marchantia polymorpha]
  misc_feature (2)..(503): Homolog of NCBI NO: 11066477 NR Description: fatty acid elongase 1-like protein [Limnanthes
  misc_feature (19)..(509): Homolog of NCBI NO: 9714501 NR Description: putative fatty acid elongase [Zea mays]
  misc_feature (1)..(509): Homolog of NCBI NO: 15225767 NR Description: beta-ketoacyl-CoA synthase, putative [Arabidopsis
MDVEQKKPLIESSDRNLPDFKKSVKLKYVKLGYHYLITHGMYLFLSPLVLVIAAQISTFSVTDLRSLWEHLQYNLISVVVCSMLLVFLMTIYFMTRPRPVYLVNFSCFKPDESRKCTKKIFMDRSKLTGSFTEENLEFQRKILQRSGLGESTYLPEAVLNVPPNPCMKEARKEAETVMFGAIDELLAKTNVNPKDIGILIVNCSLFNPTPSLSAMVVNHYKLRGNILSYNLGGMGCSAGLISIDLAKHLLHSIPNTYAMVISMENITLNWYFGNDRSKLVSNCLFRMGGAAILLSNKRWDRRRSKYELVDTVRTHKGADDKCFGCITQEEDSASKIGVTLSKELMAVAGDALKTNITTLGPLVLPTSEQLLFFATLVGRKLFKMKIKPYIPDFKLAFEHFCIHAGGRAVLDELEKNLKLTEWHMEPSRMTLYRFGNTSSSSLWYELAYSEAKGRIKKGDRIWQIAFGSGFKCNSSVWRAVRSVNPKKEKNPWMDEIHEFPVEVPKVSTI

SEQ ID NO: 21138 - protein, 469 aa, Arabidopsis thaliana
  peptide (1)..(469): Ceres Seq. ID no. 13488705
  misc_feature (298)..(441): Pfam Name: Chalcone and stilbene synthases, C-terminal domain Pfam Description: Chalcone and stilbene synthases, C-terminal
  misc_feature (1)..(465): Homolog of NCBI NO: 32172500 NR Description: FAE3 [Marchantia polymorpha]
  misc_feature (1)..(469): Homolog of NCBI NO: 18377979 NR Description: putative beta-ketoacyl-CoA synthase [Arabidopsis
  misc_feature (1)..(469): Homolog of NCBI NO: 15239981 NR Description: beta-ketoacyl-CoA synthase, putative [Arabidopsis
  misc_feature (1)..(469): Homolog of NCBI NO: 15219676 NR Description: beta-ketoacyl-CoA synthase, putative [Arabidopsis
  misc_feature (1)..(464): Homolog of NCBI NO: 19908404 NR Description: putative fatty acid elongase [Tropaeolum majus]
  misc_feature (1)..(469): Homolog of NCBI NO: 14334714 NR Description: putative beta-ketoacyl-CoA synthase [Arabidopsis
  misc_feature (1)..(469): Homolog of NCBI NO: 29417540 NR Description: beta-ketoacyl-CoA-synthase [Marchantia polymorpha]
  misc_feature (1)..(463): Homolog of NCBI NO: 11066477 NR Description: fatty acid elongase 1-like protein [Limnanthes
  misc_feature (1)..(469): Homolog of NCBI NO: 9714501 NR Description: putative fatty acid elongase [Zea mays]
  misc_feature (1)..(469): Homolog of NCBI NO: 15225767 NR Description: beta-ketoacyl-CoA synthase, putative [Arabidopsis
MYLFLSPLVLVIAAQISTFSVTDLRSLWEHLQYNLISVVVCSMLLVFLMTIYFMTRPRPVYLVNFSCFKPDESRKCTKKIFMDRSKLTGSFTEENLEFQRKILQRSGLGESTYLPEAVLNVPPNPCMKEARKEAETVMFGAIDELLAKTNVNPKDIGILIVNCSLFNPTPSLSAMVVNHYKLRGNILSYNLGGMGCSAGLISIDLAKHLLHSIPNTYAMVISMENITLNWYFGNDRSKLVSNCLFRMGGAAILLSNKRWDRRRSKYELVDTVRTHKGADDKCFGCITQEEDSASKIGVTLSKELMAVAGDALKTNITTLGPLVLPTSEQLLFFATLVGRKLFKMKIKPYIPDFKLAFEHFCIHAGGRAVLDELEKNLKLTEWHMEPSRMTLYRFGNTSSSSLWYELAYSEAKGRIKKGDRIWQIAFGSGFKCNSSVWRAVRSVNPKKEKNPWMDEIHEFPVEVPKVSTI

SEQ ID NO: 21139 - protein, 427 aa, Arabidopsis thaliana
  peptide (1)..(427): Ceres Seq. ID no. 13488706
  misc_feature (256)..(399): Pfam Name: Chalcone and stilbene synthases, C-terminal domain Pfam Description: Chalcone and stilbene synthases, C-terminal
  misc_feature (1)..(423): Homolog of NCBI NO: 32172500 NR Description: FAE3 [Marchantia polymorpha]
  misc_feature (1)..(427): Homolog of NCBI NO: 18377979 NR Description: putative beta-ketoacyl-CoA synthase [Arabidopsis
  misc_feature (1)..(427): Homolog of NCBI NO: 15239981 NR Description: beta-ketoacyl-CoA synthase, putative [Arabidopsis
  misc_feature (1)..(427): Homolog of NCBI NO: 15219676 NR Description: beta-ketoacyl-CoA synthase, putative [Arabidopsis
  misc_feature (1)..(422): Homolog of NCBI NO: 19908404 NR Description: putative fatty acid elongase [Tropaeolum majus]
  misc_feature (1)..(427): Homolog of NCBI NO: 14334714 NR Description: putative beta-ketoacyl-CoA synthase [Arabidopsis
  misc_feature (1)..(427): Homolog of NCBI NO: 29417540 NR Description: beta-ketoacyl-CoA-synthase [Marchantia polymorpha]
  misc_feature (1)..(421): Homolog of NCBI NO: 11066477 NR Description: fatty acid elongase 1-like protein [Limnanthes
  misc_feature (1)..(427): Homolog of NCBI NO: 9714501 NR Description: putative fatty acid elongase [Zea mays]
  misc_feature (1)..(427): Homolog of NCBI NO: 15225767 NR Description: beta-ketoacyl-CoA synthase, putative [Arabidopsis
MLLVFLMTIYFMTRPRPVYLVNFSCFKPDESRKCTKKIFMDRSKLTGSFTEENLEFQRKILQRSGLGESTYLPEAVLNVPPNPCMKEARKEAETVMFGAIDELLAKTNVNPKDIGILIVNCSLFNPTPSLSAMVVNHYKLRGNILSYNLGGMGCSAGLISIDLAKHLLHSIPNTYAMVISMENITLNWYFGNDRSKLVSNCLFRMGGAAILLSNKRWDRRRSKYELVDTVRTHKGADDKCFGCITQEEDSASKIGVTLSKELMAVAGDALKTNITTLGPLVLPTSEQLLFFATLVGRKLFKMKIKPYIPDFKLAFEHFCIHAGGRAVLDELEKNLKLTEWHMEPSRMTLYRFGNTSSSSLWYELAYSEAKGRIKKGDRIWQIAFGSGFKCNSSVWRAVRSVNPKKEKNPWMDEIHEFPVEVPKVSTI

SEQ ID NO: 21140 - DNA, 1920 bp, Arabidopsis thaliana
  misc_feature (1)..(1920): Ceres Seq. ID no. 12649907
  misc_feature: MA Experiment ID: 20000496 Result: Up-regulated in Transcription
  misc_feature: MA Experiment 20000496 PARAMETER Experiment Name: At_Guard_Cells_P Parameter: Harvest Date Value: 7/19/2002
  misc_feature: MA Experiment 20000496 PARAMETER Experiment Name: At_Guard_Cells_P Parameter: Organism Value: Canola
  misc_feature: MA Experiment 20000496 PARAMETER Experiment Name: At_Guard_Cells_P Parameter: Tissue Value: Guard Cells vs. Leaves
  misc_feature: MA Experiment ID: 20001757 Result: Up-regulated in Transcription
  misc_feature: MA Experiment 20001757 PARAMETER Experiment Name: At_50mM_NH4NO3_L-to-H_P Parameter: Timepoint (hr) Value: 6
  misc_feature: MA Experiment 20001757 PARAMETER Experiment Name: At_50mM_NH4NO3_L-to-H_P Parameter: Tissue Value: Leaf
  misc_feature: MA Experiment 20001757 PARAMETER Experiment Name: At_50mM_NH4NO3_L-to-H_P Parameter: Treatment Value: 50mM NH4NO3 vs 100mM Mannitol
atcatcactgactgtgattgaatttttttttttttttacaatctgagatctgaaagatatttctaaattctcattaaattcccccataaattttcaatctttgctgattttcccccaaatttctggagatagataaccttcgtttttcaggagtttctttctatatttcttcatcgatttcgttcagtctttgagagaggttcgtcgacgtattatcgtcggaaaaaagctatgagaatctatttctcatagctccagtaatgtgaaatcgagacaacgctttatcttcagaatctgctaatccatgggagattcaatcacattccggtagatttttttccagtttctggggaagtcaaaaatttctagggtttccgatttttgttttccttttccaaatgttctcgaatcagtttgttctcttcttctctcttctcctatgtctcccatttgttttcttctttgtagcgccacatgtgtttccttctcctcctggtgaatctttaatcccaatctccgatgagattgatgaccggagtttattcatcgccgctgctggatcaacctctctttctcatctctcatctggaaaccctaaccctaagctcaagattgcttttctattcctcaccaactccgatctccatttcgcgccaatctgggatcgattcttctctggtcattcgaaatctctctacaacgtctatgtccacgcagatccttttgtcaatgtcacaagacctgggaatggctctgtgtttgagaatgccttcattgcaaacgcgaaacgcaccgcaagagcttctccgactcttatctccgccacgcggcgcctcctcgctaccgctttccttgatgaccctgcgaacacttacttcgctgtgctctctcagtattgtattcctctccactcgttcaactatgtttatagctctctctttgaatcttcaatttttgataaatctgatccggatccgaatccgaatccgagaggtattagaatcttgtatcggagttttatggaactgatatctgatgagcctaggctttggaaacggtacactgctagaggaaggtatgctatgatgcctgaggttccgtttgagaaattcagagttggttcgcagttctttgttatgactagaagacatgctttgttaacaatcaaagatcggatcttgtggcgtaaattcaagctcccgtgttatcgttctgatgagtgttacccggaggagcattatttcccgacgctgttgaacatgaaggatccggatggttgcactgggtatacgttgacgcgagttaactggactgggactgtgaaaggacatccttatacttacaaaccaaaggaagttgtgccagagttgatccagagactccggcgatcgaatcactctagctcctactttttcgcccgcaaatttactccggattgcttgaagccgcttttggccattgcagattctgtgattttcagagattaagttatgcagggtgagaaaacaaaagttttggtgaccggagaggttttatgtatgggttgaagaacaaatgccactttcagaattaagaagaggcaaagcgaaacgatgttaggaggctttgaggcttgaaataaataaaccagctttagtggtactcggagctcaggcttgttagctgttgtgacatatatatcacacgacacgagaacacagatcaagagacagagaaaccgaacttgtaatttttttttttgtttttctttttgttcttctttttgttctttggagctggtgctgttacatagcagagctctttttacctcaaaggcttggggtctgtagcattataattgtgtcaaggaaatctatgaagagaatatgttatctcttgtggtgaacaccacattgaatatataaaagatcaaagtttact

SEQ ID NO: 21141 - protein, 362 aa, Arabidopsis thaliana
  peptide (1)..(362): Ceres Seq. ID no. 12649908
  misc_feature (109)..(245): Pfam Name: Arabidopsis protein of unknown function, DUF266 Pfam Description: Arabidopsis protein of unknown function, DUF266
  misc_feature (225)..(329): Homolog of NCBI NO: 26452247 NR Description: unknown protein [Arabidopsis thaliana]
  misc_feature (63)..(199): Homolog of NCBI NO: 26452247 NR Description: unknown protein [Arabidopsis thaliana]
  misc_feature (205)..(362): Homolog of NCBI NO: 15239393 NR Description: putative protein; protein id: At5g25330.1
  misc_feature (337)..(362): Homolog of NCBI NO: 15236739 NR Description: putative protein; protein id: At4g32290.1
  misc_feature (205)..(331): Homolog of NCBI NO: 15236739 NR Description: putative protein; protein id: At4g32290.1
  misc_feature (58)..(183): Homolog of NCBI NO: 15236739 NR Description: putative protein; protein id: At4g32290.1
  misc_feature (29)..(362): Homolog of NCBI NO: 34394888 NR Description: unknown protein [Oryza sativa (japonica
  misc_feature (205)..(362): Homolog of NCBI NO: 15231121 NR Description: putative protein
  misc_feature (1)..(181): Homolog of NCBI NO: 15231121 NR Description: putative protein
  misc_feature (1)..(362): Homolog of NCBI NO: 30688302 NR Description: expressed protein [Arabidopsis thaliana]
MFSNQFVLFFSLLLCLPFVFFFVAPHVFPSPPGESLIPISDEIDDRSLFIAAAGSTSLSHLSSGNPNPKLKIAFLFLTNSDLHFAPIWDRFFSGHSKSLYNVYVHADPFVNVTRPGNGSVFENAFIANAKRTARASPTLISATRRLLATAFLDDPANTYFAVLSQYCIPLHSFNYVYSSLFESSIFDKSDPDPNPNPRGIRILYRSFMELISDEPRLWKRYTARGRYAMMPEVPFEKFRVGSQFFVMTRRHALLTIKDRILWRKFKLPCYRSDECYPEEHYFPTLLNMKDPDGCTGYTLTRVNWTGTVKGHPYTYKPKEVVPELIQRLRRSNHSSSYFFARKFTPDCLKPLLAIADSVIFRD

SEQ ID NO: 21142 - DNA, 714 bp, Arabidopsis thaliana
  misc_feature (1)..(714): Ceres Seq. ID no. 12421052
  misc_feature: MA Experiment ID: 108434 Result: Up-regulated in Transcription
  misc_feature: MA Experiment 108434 PARAMETER Experiment Name: At_Root_Tips_cDNA_P Parameter: Tissue Value: Root Tips
  misc_feature: MA Experiment ID: 108462 Result: Down-regulated in Transcription
  misc_feature: MA Experiment 108462 PARAMETER Experiment Name: At_Germinating_Seeds_cDNA_P Parameter: Age (day) Value: 2 vs. 0
  misc_feature: MA Experiment 108462 PARAMETER Experiment Name: At_Germinating_Seeds_cDNA_P Parameter: Tissue Value: Germinating Seeds
  misc_feature: MA Experiment ID: 108463 Result: Down-regulated in Transcription
  misc_feature: MA Experiment 108463 PARAMETER Experiment Name: At_Germinating_Seeds_cDNA_P Parameter: Age (day) Value: 3 vs. 0
  misc_feature: MA Experiment 108463 PARAMETER Experiment Name: At_Germinating_Seeds_cDNA_P Parameter: Tissue Value: Germinating Seeds
  misc_feature: MA Experiment ID: 108464 Result: Down-regulated in Transcription
  misc_feature: MA Experiment 108464 PARAMETER Experiment Name: At_Germinating_Seeds_cDNA_P Parameter: Age (day) Value: 4 vs. 0
  misc_feature: MA Experiment 108464 PARAMETER Experiment Name: At_Germinating_Seeds_cDNA_P Parameter: Tissue Value: Germinating Seeds
aaccttttgaagaaagagtttgagcgcatcgcaaactcgaaggcgcgactgtgagagagaagaatggcgtcgtcatcatcgagaggagagatggagaagatgggaatcgatcagctaaaagctttgaaggagcaagcagatctggaagtgaatcttcttcaagatagtctcaacaacatccgtacagctaccgttcgtctcgatgccgccgccgcagctctcaacgatctctctcttcgacctcaaggtaagaagatgcttgtaccactgactgcttctctatacgtgcctgggacacttgatgaagctgataaggttttagttgatattggcactggttacttcattgagaaaacaatggatgatggaaaagattattgtcagaggaagatcaacttgctcaaatccaactttgatcaactttttgaggtcgcagcgaaaaagaaaagcgtggcagatgaagctggaatggtcttgcaggccaaagttaaacagttaacagctgcaaccacgtcgtgaaaattattccttctctagtgctttttgctattgagactattttgagattgcaaatgattttgtctgatcagttatgttttgactcttttgatctcaatcggcttgtgtttagtgtgctagaagaatttgtgctgtaattttaagtaatcagtagtgactatgagaaagaaaagacgtgttaactagttatttctc

SEQ ID NO: 21143 - protein, 151 aa, Arabidopsis thaliana
  peptide (1)..(151): Ceres Seq. ID no. 12421053
  misc_feature (25)..(144): Pfam Name: Prefoldin subunit Pfam Description: Prefoldin subunit
  misc_feature (12)..(146): Homolog of NCBI NO: 27807413 NR Description: prefoldin 5 [Bos taurus]
  misc_feature (12)..(147): Homolog of NCBI NO: 27665420 NR Description: similar to Prefoldin subunit 5 (C-myc binding
  misc_feature (12)..(147): Homolog of NCBI NO: 30585355 NR Description: Homo sapiens prefoldin 5 [synthetic construct]
  misc_feature (12)..(147): Homolog of NCBI NO: 26348121 NR Description: unnamed protein product [Mus musculus]
  misc_feature (12)..(147): Homolog of NCBI NO: 22202633 NR Description: prefoldin 5 isoform alpha
  misc_feature (12)..(147): Homolog of NCBI NO: 12643929 NR Description: Prefoldin subunit 5 (C-myc binding protein Mm-1)
  misc_feature (12)..(147): Homolog of NCBI NO: 9910216 NR Description: prefoldin 5
  misc_feature (12)..(147): Homolog of NCBI NO: 1731809 NR Description: c-myc binding protein [Homo sapiens]
  misc_feature (3)..(151): Homolog of NCBI NO: 37535560 NR Description: putative c-myc binding protein
  misc_feature (1)..(151): Homolog of NCBI NO: 15237277 NR Description: c-myc binding protein MM-1-like protein
MASSSSRGEMEKMGIDQLKALKEQADLEVNLLQDSLNNIRTATVRLDAAAAALNDLSLRPQGKKMLVPLTASLYVPGTLDEADKVLVDIGTGYFIEKTMDDGKDYCQRKINLLKSNFDQLFEVAAKKKSVADEAGMVLQAKVKQLTAATTS

SEQ ID NO: 21144 - protein, 142 aa, Arabidopsis thaliana
  peptide (1)..(142): Ceres Seq. ID no. 12421054
  misc_feature (16)..(135): Pfam Name: Prefoldin subunit Pfam Description: Prefoldin subunit
  misc_feature (3)..(137): Homolog of NCBI NO: 27807413 NR Description: prefoldin 5 [Bos taurus]
  misc_feature (3)..(138): Homolog of NCBI NO: 27665420 NR Description: similar to Prefoldin subunit 5 (C-myc binding
  misc_feature (3)..(138): Homolog of NCBI NO: 30585355 NR Description: Homo sapiens prefoldin 5 [synthetic construct]
  misc_feature (3)..(138): Homolog of NCBI NO: 12643929 NR Description: Prefoldin subunit 5 (C-myc binding protein Mm-1)
  misc_feature (3)..(138): Homolog of NCBI NO: 26348121 NR Description: unnamed protein product [Mus musculus]
  misc_feature (3)..(138): Homolog of NCBI NO: 22202633 NR Description: prefoldin 5 isoform alpha
  misc_feature (3)..(138): Homolog of NCBI NO: 9910216 NR Description: prefoldin 5
  misc_feature (3)..(138): Homolog of NCBI NO: 1731809 NR Description: c-myc binding protein [Homo sapiens]
  misc_feature (1)..(142): Homolog of NCBI NO: 37535560 NR Description: putative c-myc binding protein
  misc_feature (1)..(142): Homolog of NCBI NO: 15237277 NR Description: c-myc binding protein MM-1-like protein
MEKMGIDQLKALKEQADLEVNLLQDSLNNIRTATVRLDAAAAALNDLSLRPQGKKMLVPLTASLYVPGTLDEADKVLVDIGTGYFIEKTMDDGKDYCQRKINLLKSNFDQLFEVAAKKKSVADEAGMVLQAKVKQLTAATTS

SEQ ID NO: 21145 - protein, 139 aa, Arabidopsis thaliana
  peptide (1)..(139): Ceres Seq. ID no. 12421055
  misc_feature (13)..(132): Pfam Name: Prefoldin subunit Pfam Description: Prefoldin subunit
  misc_feature (1)..(134): Homolog of NCBI NO: 27807413 NR Description: prefoldin 5 [Bos taurus]
  misc_feature (1)..(135): Homolog of NCBI NO: 27665420 NR Description: similar to Prefoldin subunit 5 (C-myc binding
  misc_feature (1)..(135): Homolog of NCBI NO: 30585355 NR Description: Homo sapiens prefoldin 5 [synthetic construct]
  misc_feature (1)..(135): Homolog of NCBI NO: 12643929 NR Description: Prefoldin subunit 5 (C-myc binding protein Mm-1)
  misc_feature (1)..(135): Homolog of NCBI NO: 9910216 NR Description: prefoldin 5
  misc_feature (1)..(135): Homolog of NCBI NO: 22202633 NR Description: prefoldin 5 isoform alpha
  misc_feature (1)..(135): Homolog of NCBI NO: 26348121 NR Description: unnamed protein product [Mus musculus]
  misc_feature (1)..(135): Homolog of NCBI NO: 1731809 NR Description: c-myc binding protein [Homo sapiens]
  misc_feature (1)..(139): Homolog of NCBI NO: 37535560 NR Description: putative c-myc binding protein
  misc_feature (1)..(139): Homolog of NCBI NO: 15237277 NR Description: c-myc binding protein MM-1-like protein
MGIDQLKALKEQADLEVNLLQDSLNNIRTATVRLDAAAAALNDLSLRPQGKKMLVPLTASLYVPGTLDEADKVLVDIGTGYFIEKTMDDGKDYCQRKINLLKSNFDQLFEVAAKKKSVADEAGMVLQAKVKQLTAATTS

SEQ ID NO: 21146 - DNA, 642 bp, Arabidopsis thaliana
  misc_feature (1)..(642): Ceres Seq. ID no. 12393423
  misc_feature: MA Experiment ID: 108462 Result: Down-regulated in Transcription
  misc_feature: MA Experiment 108462 PARAMETER Experiment Name: At_Germinating_Seeds_cDNA_P Parameter: Age (day) Value: 2 vs. 0
  misc_feature: MA Experiment 108462 PARAMETER Experiment Name: At_Germinating_Seeds_cDNA_P Parameter: Tissue Value: Germinating Seeds
  misc_feature: MA Experiment ID: 108463 Result: Down-regulated in Transcription
  misc_feature: MA Experiment 108463 PARAMETER Experiment Name: At_Germinating_Seeds_cDNA_P Parameter: Age (day) Value: 3 vs. 0
  misc_feature: MA Experiment 108463 PARAMETER Experiment Name: At_Germinating_Seeds_cDNA_P Parameter: Tissue Value: Germinating Seeds
  misc_feature: MA Experiment ID: 20000111 Result: Up-regulated in Transcription
  misc_feature: MA Experiment 20000111 PARAMETER Experiment Name: At_42deg_Heat_cDNA_P Parameter: Temperature (deg C) Value: 42 vs. 22
  misc_feature: MA Experiment 20000111 PARAMETER Experiment Name: At_42deg_Heat_cDNA_P Parameter: Timepoint (hr) Value: 6
  misc_feature: MA Experiment 20000111 PARAMETER Experiment Name: At_42deg_Heat_cDNA_P Parameter: Tissue Value: Aerial
  misc_feature: MA Experiment ID: 20000113 Result: Up-regulated in Transcription
  misc_feature: MA Experiment 20000113 PARAMETER Experiment Name: At_42deg_Heat_cDNA_P Parameter: Temperature (deg C) Value: 42 vs. 22
  misc_feature: MA Experiment 20000113 PARAMETER Experiment Name: At_42deg_Heat_cDNA_P Parameter: Timepoint (hr) Value: 8
  misc_feature: MA Experiment 20000113 PARAMETER Experiment Name: At_42deg_Heat_cDNA_P Parameter: Tissue Value: Aerial
  misc_feature: MA Experiment ID: 20000173 Result: Up-regulated in Transcription
  misc_feature: MA Experiment 20000173 PARAMETER Experiment Name: At_42deg_Heat_P Parameter: Age (day) Value: 14
  misc_feature: MA Experiment 20000173 PARAMETER Experiment Name: At_42deg_Heat_P Parameter: Organism Value: A. thaliana
  misc_feature: MA Experiment 20000173 PARAMETER Experiment Name: At_42deg_Heat_P Parameter: Plant Line Value: WS
  misc_feature: MA Experiment 20000173 PARAMETER Experiment Name: At_42deg_Heat_P Parameter: Temperature (deg C) Value: 42 vs. 22
  misc_feature: MA Experiment 20000173 PARAMETER Experiment Name: At_42deg_Heat_P Parameter: Timepoint (hr) Value: 6
  misc_feature: MA Experiment 20000173 PARAMETER Experiment Name: At_42deg_Heat_P Parameter: Tissue Value: Aerial
  misc_feature: MA Experiment ID: 20000794 Result: Up-regulated in Transcription
  misc_feature: MA Experiment 20000794 PARAMETER Experiment Name: At_Petals_P Parameter: Age (day) Value: 23-25 days
  misc_feature: MA Experiment 20000794 PARAMETER Experiment Name: At_Petals_P Parameter: Plant Line Value: WS
  misc_feature: MA Experiment 20000794 PARAMETER Experiment Name: At_Petals_P Parameter: Tissue Value: Petals vs. Whole plant
atcgaaaagtctacgaatttagggtttaatttgtgttaatgagccaccgtgtttcgattctatcatctcatttctcacctgcctccgccgtcatggcttccgagaaagaagctgctctcgccgccactccttccgattctcccaccatatttgacaagatcatcagcaaagagattccatccaccgtggtttttgaggatgacaaggtcttagcttttagggacataacgccccagggtcctgttcacatcctccttattccaaaagtgagggatggcctaactggcctctctaaggctgaggaaaggcacatcgacatcttgggccgccttctctacactgccaagcttgtagcaaaacaagaaggcctagcagagggtttcagaattgttatcaatgatggtcctcaaggctgtcaatcggtgtatcacattcatgttcatctcattggaggacgccaaatgaactggcctcctggttaaagatcatcttgaagtggattgttgtcctgatgataagagggacgcttagagtttgctctcgtctactaatgtctctataaataaaaaaacgtgggacatgacttttatgattgttatgcaaaaccttattttatgttatgaaaaggatatttcactgttt

SEQ ID NO: 21147 - protein, 147 aa, Arabidopsis thaliana
  peptide (1)..(147): Ceres Seq. ID no. 12393424
  misc_feature (40)..(147): Homolog of NCBI NO: 23480654 NR Description: putative protein kinase C interacting protein 1
  misc_feature (19)..(147): Homolog of NCBI NO: 23612841 NR Description: protein kinase c inhibitor-like protein, putative
  misc_feature (127)..(147): Homolog of NCBI NO: 25518144 NR Description: F28K20.9 protein - Arabidopsis thaliana
  misc_feature (24)..(136): Homolog of NCBI NO: 25518144 NR Description: F28K20.9 protein - Arabidopsis thaliana
  misc_feature (24)..(147): Homolog of NCBI NO: 15221629 NR Description: putative protein kinase C inhibitor (Zinc-binding
  misc_feature (19)..(147): Homolog of NCBI NO: 1177047 NR Description: 14 KD ZINC-BINDING PROTEIN (PROTEIN KINASE C
  misc_feature (36)..(147): Homolog of NCBI NO: 1177046 NR Description: 14 KD ZINC-BINDING PROTEIN (PROTEIN KINASE C
  misc_feature (19)..(147): Homolog of NCBI NO: 629858 NR Description: protein kinase C inhibitor - maize
  misc_feature (19)..(147): Homolog of NCBI NO: 11260559 NR Description: protein kinase C inhibitor-like protein -
  misc_feature (1)..(147): Homolog of NCBI NO: 18410510 NR Description: protein kinase C inhibitor-like protein
MSHRVSILSSHFSPASAVMASEKEAALAATPSDSPTIFDKIISKEIPSTVVFEDDKVLAFRDITPQGPVHILLIPKVRDGLTGLSKAEERHIDILGRLLYTAKLVAKQEGLAEGFRIVINDGPQGCQSVYHIHVHLIGGRQMNWPPG

SEQ ID NO: 21148 - protein, 129 aa, Arabidopsis thaliana
  peptide (1)..(129): Ceres Seq. ID no. 12393425
  misc_feature (22)..(129): Homolog of NCBI NO: 23480654 NR Description: putative protein kinase C interacting protein 1
  misc_feature (1)..(129): Homolog of NCBI NO: 23612841 NR Description: protein kinase c inhibitor-like protein, putative
  misc_feature (109)..(129): Homolog of NCBI NO: 25518144 NR Description: F28K20.9 protein - Arabidopsis thaliana
  misc_feature (6)..(118): Homolog of NCBI NO: 25518144 NR Description: F28K20.9 protein - Arabidopsis thaliana
  misc_feature (6)..(129): Homolog of NCBI NO: 15221629 NR Description: putative protein kinase C inhibitor (Zinc-binding
  misc_feature (1)..(129): Homolog of NCBI NO: 1177047 NR Description: 14 KD ZINC-BINDING PROTEIN (PROTEIN KINASE C
  misc_feature (18)..(129): Homolog of NCBI NO: 1177046 NR Description: 14 KD ZINC-BINDING PROTEIN (PROTEIN KINASE C
  misc_feature (1)..(129): Homolog of NCBI NO: 629858 NR Description: protein kinase C inhibitor - maize
  misc_feature (1)..(129): Homolog of NCBI NO: 11260559 NR Description: protein kinase C inhibitor-like protein -
  misc_feature (1)..(129): Homolog of NCBI NO: 18410510 NR Description: protein kinase C inhibitor-like protein
MASEKEAALAATPSDSPTIFDKIISKEIPSTVVFEDDKVLAFRDITPQGPVHILLIPKVRDGLTGLSKAEERHIDILGRLLYTAKLVAKQEGLAEGFRIVINDGPQGCQSVYHIHVHLIGGRQMNWPPG

SEQ ID NO: 21149 - DNA, 818 bp, Arabidopsis thaliana
  misc_feature (1)..(818): Ceres Seq. ID no. 13496769
  misc_feature: MA Experiment ID: 108595 Result: Down-regulated in Transcription
  misc_feature: MA Experiment 108595 PARAMETER Experiment Name: At_Ler-pi_Ovule_cDNA_P Parameter: Plant Line Value: null
  misc_feature: MA Experiment ID: 20000090 Result: Down-regulated in Transcription
  misc_feature: MA Experiment ID: 20000111 Result: Up-regulated in Transcription
  misc_feature: MA Experiment 20000111 PARAMETER Experiment Name: At_42deg_Heat_cDNA_P Parameter: Temperature (deg C) Value: 42 vs. 22
  misc_feature: MA Experiment 20000111 PARAMETER Experiment Name: At_42deg_Heat_cDNA_P Parameter: Timepoint (hr) Value: 6
  misc_feature: MA Experiment 20000111 PARAMETER Experiment Name: At_42deg_Heat_cDNA_P Parameter: Tissue Value: Aerial
  misc_feature: MA Experiment ID: 20000173 Result: Down-regulated in Transcription
  misc_feature: MA Experiment 20000173 PARAMETER Experiment Name: At_42deg_Heat_P Parameter: Age (day) Value: 14
  misc_feature: MA Experiment 20000173 PARAMETER Experiment Name: At_42deg_Heat_P Parameter: Organism Value: A. thaliana
  misc_feature: MA Experiment 20000173 PARAMETER Experiment Name: At_42deg_Heat_P Parameter: Plant Line Value: WS
  misc_feature: MA Experiment 20000173 PARAMETER Experiment Name: At_42deg_Heat_P Parameter: Temperature (deg C) Value: 42 vs. 22
  misc_feature: MA Experiment 20000173 PARAMETER Experiment Name: At_42deg_Heat_P Parameter: Timepoint (hr) Value: 6
  misc_feature: MA Experiment 20000173 PARAMETER Experiment Name: At_42deg_Heat_P Parameter: Tissue Value: Aerial
  misc_feature: MA Experiment ID: 20000182 Result: Down-regulated in Transcription
  misc_feature: MA Experiment 20000182 PARAMETER Experiment Name: At_2mM_SA_P Parameter: Age (day) Value: 14
  misc_feature: MA Experiment 20000182 PARAMETER Experiment Name: At_2mM_SA_P Parameter: Organism Value: A. thaliana
  misc_feature: MA Experiment 20000182 PARAMETER Experiment Name: At_2mM_SA_P Parameter: Plant Line Value: WS
  misc_feature: MA Experiment 20000182 PARAMETER Experiment Name: At_2mM_SA_P Parameter: Timepoint (hr) Value: 6
  misc_feature: MA Experiment 20000182 PARAMETER Experiment Name: At_2mM_SA_P Parameter: Tissue Value: Aerial
  misc_feature: MA Experiment 20000182 PARAMETER Experiment Name: At_2mM_SA_P Parameter: Treatment Value: 2mM SA vs. No Treatment
  misc_feature: MA Experiment ID: 20000184 Result: Up-regulated in Transcription
  misc_feature: MA Experiment 20000184 PARAMETER Experiment Name: At_Shoots__P Parameter: Age (day) Value: 7
  misc_feature: MA Experiment 20000184 PARAMETER Experiment Name: At_Shoots__P Parameter: Tissue Value: Shoots vs. Whole Plant
  misc_feature: MA Experiment ID: 20000185 Result: Down-regulated in Transcription
  misc_feature: MA Experiment 20000185 PARAMETER Experiment Name: At_Roots__P Parameter: Age (day) Value: 7 vs. 21
  misc_feature: MA Experiment 20000185 PARAMETER Experiment Name: At_Roots__P Parameter: Organism Value: A. thaliana
  misc_feature: MA Experiment 20000185 PARAMETER Experiment Name: At_Roots__P Parameter: Tissue Value: Roots vs. Whole Plant
  misc_feature: MA Experiment ID: 20000234 Result: Up-regulated in Transcription
  misc_feature: MA Experiment 20000234 PARAMETER Experiment Name: At_Siliques_P Parameter: Age (day) Value: 21
  misc_feature: MA Experiment 20000234 PARAMETER Experiment Name: At_Siliques_P Parameter: Organism Value: A. thaliana
  misc_feature: MA Experiment 20000234 PARAMETER Experiment Name: At_Siliques_P Parameter: Plant Line Value: WS
  misc_feature: MA Experiment 20000234 PARAMETER Experiment Name: At_Siliques_P Parameter: Tissue Value: Less Than 5mm Siliques vs. Whole Plant
  misc_feature: MA Experiment ID: 20000268 Result: Down-regulated in Transcription
  misc_feature: MA Experiment 20000268 PARAMETER Experiment Name: At_100mM_NaCl__P Parameter: Age (day) Value: 14
  misc_feature: MA Experiment 20000268 PARAMETER Experiment Name: At_100mM_NaCl__P Parameter: Organism Value: A. thaliana
  misc_feature: MA Experiment 20000268 PARAMETER Experiment Name: At_100mM_NaCl__P Parameter: Plant Line Value: WS
  misc_feature: MA Experiment 20000268 PARAMETER Experiment Name: At_100mM_NaCl__P Parameter: Timepoint (hr) Value: 6
  misc_feature: MA Experiment 20000268 PARAMETER Experiment Name: At_100mM_NaCl__P Parameter: Tissue Value: Whole Plant
  misc_feature: MA Experiment 20000268 PARAMETER Experiment Name: At_100mM_NaCl__P Parameter: Treatment Value: 100mM NaCl vs. No Treatment
  misc_feature: MA Experiment ID: 20000437 Result: Down-regulated in Transcription
  misc_feature: MA Experiment 20000437 PARAMETER Experiment Name: At_Drought_P Parameter: Age (day) Value: 8
  misc_feature: MA Experiment 20000437 PARAMETER Experiment Name: At_Drought_P Parameter: Organism Value: A. thaliana
  misc_feature: MA Experiment 20000437 PARAMETER Experiment Name: At_Drought_P Parameter: Plant Line Value: WS
  misc_feature: MA Experiment 20000437 PARAMETER Experiment Name: At_Drought_P Parameter: Timepoint (hr) Value: 24
  misc_feature: MA Experiment 20000437 PARAMETER Experiment Name: At_Drought_P Parameter: Tissue Value: Whole Plant
  misc_feature: MA Experiment 20000437 PARAMETER Experiment Name: At_Drought_P Parameter: Treatment Value: Drought vs. No Drought
  misc_feature: MA Experiment ID: 20000438 Result: Up-regulated in Transcription
  misc_feature: MA Experiment 20000438 PARAMETER Experiment Name: At_Shoots__P Parameter: Age (day) Value: 14
  misc_feature: MA Experiment 20000438 PARAMETER Experiment Name: At_Shoots__P Parameter: Tissue Value: Shoots vs. Whole Plant
  misc_feature: MA Experiment ID: 20000439 Result: Down-regulated in Transcription
  misc_feature: MA Experiment 20000439 PARAMETER Experiment Name: At_Roots__P Parameter: Age (day) Value: 14 vs. 21
  misc_feature: MA Experiment 20000439 PARAMETER Experiment Name: At_Roots__P Parameter: Organism Value: A. thaliana
  misc_feature: MA Experiment 20000439 PARAMETER Experiment Name: At_Roots__P Parameter: Tissue Value: Roots vs. Whole Plant
  misc_feature: MA Experiment ID: 20000453 Result: Up-regulated in Transcription
  misc_feature: MA Experiment 20000453 PARAMETER Experiment Name: At_100uM_ABA_P Parameter: Age (day) Value: 15
  misc_feature: MA Experiment 20000453 PARAMETER Experiment Name: At_100uM_ABA_P Parameter: Organism Value: A. thaliana
  misc_feature: MA Experiment 20000453 PARAMETER Experiment Name: At_100uM_ABA_P Parameter: Plant Line Value: WS
  misc_feature: MA Experiment 20000453 PARAMETER Experiment Name: At_100uM_ABA_P Parameter: Timepoint (hr) Value: 24
  misc_feature: MA Experiment 20000453 PARAMETER Experiment Name: At_100uM_ABA_P Parameter: Tissue Value: Aerial
  misc_feature: MA Experiment 20000453 PARAMETER Experiment Name: At_100uM_ABA_P Parameter: Treatment Value: 100uM ABA vs. No Treatment
  misc_feature: MA Experiment ID: 20000709 Result: Up-regulated in Transcription
  misc_feature: MA Experiment 20000709 PARAMETER Experiment Name: At_15mM_NH4NO3_L-to-H_P Parameter: Age (hr) Value: 14
  misc_feature: MA Experiment 20000709 PARAMETER Experiment Name: At_15mM_NH4NO3_L-to-H_P Parameter: Organism Value: A. thaliana
  misc_feature: MA Experiment 20000709 PARAMETER Experiment Name: At_15mM_NH4NO3_L-to-H_P Parameter: Plant Line Value: WS
  misc_feature: MA Experiment 20000709 PARAMETER Experiment Name: At_15mM_NH4NO3_L-to-H_P Parameter: Timepoint (hr) Value: 4
  misc_feature: MA Experiment 20000709 PARAMETER Experiment Name: At_15mM_NH4NO3_L-to-H_P Parameter: Tissue Value: Aerial
  misc_feature: MA Experiment 20000709 PARAMETER Experiment Name: At_15mM_NH4NO3_L-to-H_P Parameter: Treatment Value: 15mM NH4NO3 vs. 30mM Mannitol
  misc_feature: MA Experiment ID: 20000794 Result: Down-regulated in Transcription
  misc_feature: MA Experiment 20000794 PARAMETER Experiment Name: At_Petals_P Parameter: Age (day) Value: 23-25 days
  misc_feature: MA Experiment 20000794 PARAMETER Experiment Name: At_Petals_P Parameter: Plant Line Value: WS
  misc_feature: MA Experiment 20000794 PARAMETER Experiment Name: At_Petals_P Parameter: Tissue Value: Petals vs. Whole plant
  misc_feature: MA Experiment ID: 20001247 Result: Up-regulated in Transcription
  misc_feature: MA Experiment 20001247 PARAMETER Experiment Name: At_Far-red-induction_P Parameter: Age (day) Value: 7
  misc_feature: MA Experiment 20001247 PARAMETER Experiment Name: At_Far-red-induction_P Parameter: Light Value: Far-red vs. White
  misc_feature: MA Experiment 20001247 PARAMETER Experiment Name: At_Far-red-induction_P Parameter: Organism Value: A. thaliana
  misc_feature: MA Experiment 20001247 PARAMETER Experiment Name: At_Far-red-induction_P Parameter: Plant Line Value: Columbia
  misc_feature: MA Experiment 20001247 PARAMETER Experiment Name: At_Far-red-induction_P Parameter: Timepoint (hr) Value: 1
  misc_feature: MA Experiment 20001247 PARAMETER Experiment Name: At_Far-red-induction_P Parameter: Tissue Value: Whole Plant
  misc_feature: MA Experiment ID: 20001248 Result: Down-regulated in Transcription
  misc_feature: MA Experiment 20001248 PARAMETER Experiment Name: At_Far-red-induction_P Parameter: Age (day) Value: 7
  misc_feature: MA Experiment 20001248 PARAMETER Experiment Name: At_Far-red-induction_P Parameter: Light Value: Far-red vs. White
  misc_feature: MA Experiment 20001248 PARAMETER Experiment Name: At_Far-red-induction_P Parameter: Organism Value: A. thaliana
  misc_feature: MA Experiment 20001248 PARAMETER Experiment Name: At_Far-red-induction_P Parameter: Plant Line Value: Columbia
  misc_feature: MA Experiment 20001248 PARAMETER Experiment Name: At_Far-red-induction_P Parameter: Timepoint (hr) Value: 4
  misc_feature: MA Experiment 20001248 PARAMETER Experiment Name: At_Far-red-induction_P Parameter: Tissue Value: Whole Plant
  misc_feature: MA Experiment ID: 20001451 Result: Up-regulated in Transcription
  misc_feature: MA Experiment 20001451 PARAMETER Experiment Name: At_Far-red-induction_P Parameter: Age (day) Value: 7
  misc_feature: MA Experiment 20001451 PARAMETER Experiment Name: At_Far-red-induction_P Parameter: Light Value: Far-red vs. White
  misc_feature: MA Experiment 20001451 PARAMETER Experiment Name: At_Far-red-induction_P Parameter: Organism Value: A. thaliana
  misc_feature: MA Experiment 20001451 PARAMETER Experiment Name: At_Far-red-induction_P Parameter: Plant Line Value: Columbia
  misc_feature: MA Experiment 20001451 PARAMETER Experiment Name: At_Far-red-induction_P Parameter: Timepoint (hr) Value: 24
  misc_feature: MA Experiment 20001451 PARAMETER Experiment Name: At_Far-red-induction_P Parameter: Tissue Value: Whole Plant
  misc_feature: MA Experiment ID: 20001554 Result: Down-regulated in Transcription
  misc_feature: MA Experiment 20001554 PARAMETER Experiment Name: At_Drought_Soil_Dry_P Parameter: Age (day) Value: 21
  misc_feature: MA Experiment 20001554 PARAMETER Experiment Name: At_Drought_Soil_Dry_P Parameter: Organism Value: A. thaliana
  misc_feature: MA Experiment 20001554 PARAMETER Experiment Name: At_Drought_Soil_Dry_P Parameter: Plant Line Value: WS
  misc_feature: MA Experiment 20001554 PARAMETER Experiment Name: At_Drought_Soil_Dry_P Parameter: Post Timepoint (hr) Value: None
  misc_feature: MA Experiment 20001554 PARAMETER Experiment Name: At_Drought_Soil_Dry_P Parameter: Post-Treatment Value: None
  misc_feature: MA Experiment 20001554 PARAMETER Experiment Name: At_Drought_Soil_Dry_P Parameter: Timepoint (day) Value: 7
  misc_feature: MA Experiment 20001554 PARAMETER Experiment Name: At_Drought_Soil_Dry_P Parameter: Treatment Value: Drought vs. No Drought
  misc_feature: MA Experiment ID: 20001555 Result: Down-regulated in Transcription
  misc_feature: MA Experiment 20001555 PARAMETER Experiment Name: At_Drought_Soil_Dry_P Parameter: Age (day) Value: 24
  misc_feature: MA Experiment 20001555 PARAMETER Experiment Name: At_Drought_Soil_Dry_P Parameter: Organism Value: A. thaliana
  misc_feature: MA Experiment 20001555 PARAMETER Experiment Name: At_Drought_Soil_Dry_P Parameter: Plant Line Value: WS
  misc_feature: MA Experiment 20001555 PARAMETER Experiment Name: At_Drought_Soil_Dry_P Parameter: Post Timepoint (hr) Value: None
  misc_feature: MA Experiment 20001555 PARAMETER Experiment Name: At_Drought_Soil_Dry_P Parameter: Post-Treatment Value: None
  misc_feature: MA Experiment 20001555 PARAMETER Experiment Name: At_Drought_Soil_Dry_P Parameter: Timepoint (day) Value: 10
  misc_feature: MA Experiment 20001555 PARAMETER Experiment Name: At_Drought_Soil_Dry_P Parameter: Treatment Value: Drought vs. No Drought
  misc_feature: MA Experiment ID: 20001556 Result: Down-regulated in Transcription
  misc_feature: MA Experiment 20001556 PARAMETER Experiment Name: At_Drought_Soil_Dry_P Parameter: Age (day) Value: 26
  misc_feature: MA Experiment 20001556 PARAMETER Experiment Name: At_Drought_Soil_Dry_P Parameter: Organism Value: A. thaliana
  misc_feature: MA Experiment 20001556 PARAMETER Experiment Name: At_Drought_Soil_Dry_P Parameter: Plant Line Value: WS
  misc_feature: MA Experiment 20001556 PARAMETER Experiment Name: At_Drought_Soil_Dry_P Parameter: Post Timepoint (hr) Value: None
  misc_feature: MA Experiment 20001556 PARAMETER Experiment Name: At_Drought_Soil_Dry_P Parameter: Post-Treatment Value: None
  misc_feature: MA Experiment 20001556 PARAMETER Experiment Name: At_Drought_Soil_Dry_P Parameter: Timepoint (day) Value: 12
  misc_feature: MA Experiment 20001556 PARAMETER Experiment Name: At_Drought_Soil_Dry_P Parameter: Treatment Value: Drought vs. No Drought
  misc_feature: MA Experiment ID: 20001560 Result: Up-regulated in Transcription
  misc_feature: MA Experiment 20001560 PARAMETER Experiment Name: At_Drought_Soil_Dry_P Parameter: Age (day) Value: 28
  misc_feature: MA Experiment 20001560 PARAMETER Experiment Name: At_Drought_Soil_Dry_P Parameter: Organism Value: A. thaliana
  misc_feature: MA Experiment 20001560 PARAMETER Experiment Name: At_Drought_Soil_Dry_P Parameter: Plant Line Value: WS
  misc_feature: MA Experiment 20001560 PARAMETER Experiment Name: At_Drought_Soil_Dry_P Parameter: Post Timepoint (hr) Value: None
  misc_feature: MA Experiment 20001560 PARAMETER Experiment Name: At_Drought_Soil_Dry_P Parameter: Post-Treatment Value: None
  misc_feature: MA Experiment 20001560 PARAMETER Experiment Name: At_Drought_Soil_Dry_P Parameter: Timepoint (day) Value: 14
  misc_feature: MA Experiment 20001560 PARAMETER Experiment Name: At_Drought_Soil_Dry_P Parameter: Treatment Value: Drought vs. No Drought
  misc_feature: MA Experiment ID: 20001904 Result: Down-regulated in Transcription
  misc_feature: MA Experiment 20001904 PARAMETER Experiment Name: At_Drought_Reproduction_P Parameter: Age (day) Value: 37
  misc_feature: MA Experiment 20001904 PARAMETER Experiment Name: At_Drought_Reproduction_P Parameter: Organism Value: A. thaliana
  misc_feature: MA Experiment 20001904 PARAMETER Experiment Name: At_Drought_Reproduction_P Parameter: Plant Line Value: WS
  misc_feature: MA Experiment 20001904 PARAMETER Experiment Name: At_Drought_Reproduction_P Parameter: Timepoint (day) Value: 7
  misc_feature: MA Experiment 20001904 PARAMETER Experiment Name: At_Drought_Reproduction_P Parameter: Tissue Value: Rosettes
  misc_feature: MA Experiment 20001904 PARAMETER Experiment Name: At_Drought_Reproduction_P Parameter: Treatment Value: Drought vs. No Drought
  misc_feature: MA Experiment ID: 20001906 Result: Down-regulated in Transcription
  misc_feature: MA Experiment 20001906 PARAMETER Experiment Name: At_Drought_Reproduction_P Parameter: Age (day) Value: 35
  misc_feature: MA Experiment 20001906 PARAMETER Experiment Name: At_Drought_Reproduction_P Parameter: Organism Value: A. thaliana
  misc_feature: MA Experiment 20001906 PARAMETER Experiment Name: At_Drought_Reproduction_P Parameter: Plant Line Value: WS
  misc_feature: MA Experiment 20001906 PARAMETER Experiment Name: At_Drought_Reproduction_P Parameter: Timepoint (day) Value: 5
  misc_feature: MA Experiment 20001906 PARAMETER Experiment Name: At_Drought_Reproduction_P Parameter: Tissue Value: Siliques
  misc_feature: MA Experiment 20001906 PARAMETER Experiment Name: At_Drought_Reproduction_P Parameter: Treatment Value: Drought vs. No Drought
attcttcactcaacactcactttttctctaattccttaattctctcaactaattacaaattatgactcgcaatattctcttgacggttacattgatctgcattgttttcatcaccgtcggtggccaatctccggccaccgcaccgatccattctccttctacatctcctcataagcctaaacccacatctcccgccatttctccagctgctccaacgccggaatccacggaggctccggcgaagactccggtagaagcacctgtagaggctcctccttctcctacacctgcttctacacctcagatctctccgcccgctccttcaccggaggctgatactccttcagctccggagattgcaccttcagctgatgttccggctccagctctgacaaaacataagaagaagacaaagaagcataagaccgctccggctcctggaccagcttcggagcttttaagcccgcctgctccgcccggagaagctcctggtcctggaccaagcgatgctttctctcctgccgctgacgatcagagcggagcacaaagaataagtgttgtgatacaaatggtgggagctgcggcaatcgcatggtctctacttgttctagccttctaataaatttttgttcttcttttttttttttttttttttcaattcttaattttatttattttatatcttttttgatcctctcccatttgtctcatgtattacagctcacattttgtattcagcattttgatatattatttgtcttttatgtatacaaataataattttaatacatgctattttctgcaaaattactgttcgc

SEQ ID NO: 21150 - protein, 185 aa, Arabidopsis thaliana
  peptide (1)..(185): Ceres Seq. ID no. 13496770
  misc_feature (22)..(152): Pfam Name: Extensin-like region Pfam Description: Extensin-like region
  misc_feature (1)..(156): Homolog of NCBI NO: 18420042 NR Description: arabinogalactan-protein (AGP18) [Arabidopsis
  misc_feature (24)..(184): Homolog of NCBI NO: 8515090 NR Description: putative arabinogalactan protein [Pinus taeda]
  misc_feature (1)..(156): Homolog of NCBI NO: 7486500 NR Description: hypothetical protein F6G17.100 - Arabidopsis
  misc_feature (24)..(184): Homolog of NCBI NO: 5139695 NR Description: expressed in cucumber hypocotyls [Cucumis
  misc_feature (23)..(180): Homolog of NCBI NO: 1362097 NR Description: probable arabinogalactan protein precursor -
  misc_feature (23)..(180): Homolog of NCBI NO: 10945615 NR Description: arabinogalactan protein [Nicotiana alata]
  misc_feature (78)..(185): Homolog of NCBI NO: 15724156 NR Description: AT4g37450/F6G17_100 [Arabidopsis thaliana]
  misc_feature (23)..(158): Homolog of NCBI NO: 7486500 NR Description: hypothetical protein F6G17.100 - Arabidopsis
  misc_feature (23)..(185): Homolog of NCBI NO: 18420042 NR Description: arabinogalactan-protein (AGP18) [Arabidopsis
  misc_feature (1)..(185): Homolog of NCBI NO: 15227783 NR Description: arabinogalactan-protein (AGP17) [Arabidopsis
MTRNILLTVTLICIVFITVGGQSPATAPIHSPSTSPHKPKPTSPAISPAAPTPESTEAPAKTPVEAPVEAPPSPTPASTPQISPPAPSPEADTPSAPEIAPSADVPAPALTKHKKKTKKHKTAPAPGPASELLSPPAPPGEAPGPGPSDAFSPAADDQSGAQRISVVIQMVGAAAIAWSLLVLAF

SEQ ID NO: 21151 - DNA, 1107 bp, Arabidopsis thaliana
  misc_feature (1)..(1107): Ceres Seq. ID no. 12393358
  misc_feature: MA Experiment ID: 108595 Result: Up-regulated in Transcription
  misc_feature: MA Experiment 108595 PARAMETER Experiment Name: At_Ler-pi_Ovule_cDNA_P Parameter: Plant Line Value: null
  misc_feature: MA Experiment ID: 20000182 Result: Up-regulated in Transcription
  misc_feature: MA Experiment 20000182 PARAMETER Experiment Name: At_2mM_SA_P Parameter: Age (day) Value: 14
  misc_feature: MA Experiment 20000182 PARAMETER Experiment Name: At_2mM_SA_P Parameter: Organism Value: A. thaliana
  misc_feature: MA Experiment 20000182 PARAMETER Experiment Name: At_2mM_SA_P Parameter: Plant Line Value: WS
  misc_feature: MA Experiment 20000182 PARAMETER Experiment Name: At_2mM_SA_P Parameter: Timepoint (hr) Value: 6
  misc_feature: MA Experiment 20000182 PARAMETER Experiment Name: At_2mM_SA_P Parameter: Tissue Value: Aerial
  misc_feature: MA Experiment 20000182 PARAMETER Experiment Name: At_2mM_SA_P Parameter: Treatment Value: 2mM SA vs. No Treatment
  misc_feature: MA Experiment ID: 20000265 Result: Down-regulated in Transcription
  misc_feature: MA Experiment 20000265 PARAMETER Experiment Name: At_Open_Flower_P Parameter: Age (day) Value: 21
  misc_feature: MA Experiment 20000265 PARAMETER Experiment Name: At_Open_Flower_P Parameter: Plant Line Value: WS
  misc_feature: MA Experiment 20000265 PARAMETER Experiment Name: At_Open_Flower_P Parameter: Tissue Value: Closed Flower vs. Whole Plant
  misc_feature: MA Experiment ID: 20001450 Result: Up-regulated in Transcription
  misc_feature: MA Experiment 20001450 PARAMETER Experiment Name: At_Far-red-induction_P Parameter: Age (day) Value: 7
  misc_feature: MA Experiment 20001450 PARAMETER Experiment Name: At_Far-red-induction_P Parameter: Light Value: Far-red vs. White
  misc_feature: MA Experiment 20001450 PARAMETER Experiment Name: At_Far-red-induction_P Parameter: Organism Value: A. thaliana
  misc_feature: MA Experiment 20001450 PARAMETER Experiment Name: At_Far-red-induction_P Parameter: Plant Line Value: Columbia
  misc_feature: MA Experiment 20001450 PARAMETER Experiment Name: At_Far-red-induction_P Parameter: Timepoint (hr) Value: 8
  misc_feature: MA Experiment 20001450 PARAMETER Experiment Name: At_Far-red-induction_P Parameter: Tissue Value: Whole Plant
  misc_feature: MA Experiment ID: 20001451 Result: Up-regulated in Transcription
  misc_feature: MA Experiment 20001451 PARAMETER Experiment Name: At_Far-red-induction_P Parameter: Age (day) Value: 7
  misc_feature: MA Experiment 20001451 PARAMETER Experiment Name: At_Far-red-induction_P Parameter: Light Value: Far-red vs. White
  misc_feature: MA Experiment 20001451 PARAMETER Experiment Name: At_Far-red-induction_P Parameter: Organism Value: A. thaliana
  misc_feature: MA Experiment 20001451 PARAMETER Experiment Name: At_Far-red-induction_P Parameter: Plant Line Value: Columbia
  misc_feature: MA Experiment 20001451 PARAMETER Experiment Name: At_Far-red-induction_P Parameter: Timepoint (hr) Value: 24
  misc_feature: MA Experiment 20001451 PARAMETER Experiment Name: At_Far-red-induction_P Parameter: Tissue Value: Whole Plant
  misc_feature: MA Experiment ID: 20001557 Result: Up-regulated in Transcription
  misc_feature: MA Experiment 20001557 PARAMETER Experiment Name: At_Drought_Soil_Dry_P Parameter: Age (day) Value: 27
  misc_feature: MA Experiment 20001557 PARAMETER Experiment Name: At_Drought_Soil_Dry_P Parameter: Organism Value: A. thaliana
  misc_feature: MA Experiment 20001557 PARAMETER Experiment Name: At_Drought_Soil_Dry_P Parameter: Plant Line Value: WS
  misc_feature: MA Experiment 20001557 PARAMETER Experiment Name: At_Drought_Soil_Dry_P Parameter: Post Timepoint (hr) Value: 3
  misc_feature: MA Experiment 20001557 PARAMETER Experiment Name: At_Drought_Soil_Dry_P Parameter: Post-Treatment Value: Re-Water vs. No Drought
  misc_feature: MA Experiment 20001557 PARAMETER Experiment Name: At_Drought_Soil_Dry_P Parameter: Timepoint (day) Value: 13
  misc_feature: MA Experiment 20001557 PARAMETER Experiment Name: At_Drought_Soil_Dry_P Parameter: Treatment Value: Drought vs. No Drought
  misc_feature: MA Experiment ID: 20001560 Result: Up-regulated in Transcription
  misc_feature: MA Experiment 20001560 PARAMETER Experiment Name: At_Drought_Soil_Dry_P Parameter: Age (day) Value: 28
  misc_feature: MA Experiment 20001560 PARAMETER Experiment Name: At_Drought_Soil_Dry_P Parameter: Organism Value: A. thaliana
  misc_feature: MA Experiment 20001560 PARAMETER Experiment Name: At_Drought_Soil_Dry_P Parameter: Plant Line Value: WS
  misc_feature: MA Experiment 20001560 PARAMETER Experiment Name: At_Drought_Soil_Dry_P Parameter: Post Timepoint (hr) Value: None
  misc_feature: MA Experiment 20001560 PARAMETER Experiment Name: At_Drought_Soil_Dry_P Parameter: Post-Treatment Value: None
  misc_feature: MA Experiment 20001560 PARAMETER Experiment Name: At_Drought_Soil_Dry_P Parameter: Timepoint (day) Value: 14
  misc_feature: MA Experiment 20001560 PARAMETER Experiment Name: At_Drought_Soil_Dry_P Parameter: Treatment Value: Drought vs. No Drought
  misc_feature: MA Experiment ID: 20001904 Result: Up-regulated in Transcription
  misc_feature: MA Experiment 20001904 PARAMETER Experiment Name: At_Drought_Reproduction_P Parameter: Age (day) Value: 37
  misc_feature: MA Experiment 20001904 PARAMETER Experiment Name: At_Drought_Reproduction_P Parameter: Organism Value: A. thaliana
  misc_feature: MA Experiment 20001904 PARAMETER Experiment Name: At_Drought_Reproduction_P Parameter: Plant Line Value: WS
  misc_feature: MA Experiment 20001904 PARAMETER Experiment Name: At_Drought_Reproduction_P Parameter: Timepoint (day) Value: 7
  misc_feature: MA Experiment 20001904 PARAMETER Experiment Name: At_Drought_Reproduction_P Parameter: Tissue Value: Rosettes
  misc_feature: MA Experiment 20001904 PARAMETER Experiment Name: At_Drought_Reproduction_P Parameter: Treatment Value: Drought vs. No Drought
aacaacacgatttctcacacatttcaagttttcattatcatccagaaatcttcttcttcctccgatcaccaccatgtgtacgttagagaaacgcggcgatctcttcctcctaaccctaaccggagacggcgaacacagattccaccccgacacaattgccaccattctctcccttctcgaacaagccaaatctcaatccacccgtggatccatcctcatcaccaccgccaacggcaaattcttctccaacggattcgatcttgcatgggctcaaaccgccggatccaaaaccggagccgcaaaccggcttcaccaaatggttgaatcattcaaaccggtggtagcagcgcttctcgatctccctatgccgacgatcgccgccttgaacggccacgccgccgccgcgggattgattttggctttgagccatgattacgtgttcatgaggaaagatcgtggggttctgtatatgagtgaagttgacatcgggctttcgatgccggattatttctcggcgttggttagggctaagatcgggacgagtgcggcgaggagagagctgttgttgagtgggaagaagattagaggagaagaagcggtgggtttggggattgttgactcggccgcgtatgatagtgaggaaggtgttgttgtggctagtgtgcgccttggtgagaaattggcggcgaagaaatggagcggtgaggtttatgcgtcgataaggaagagtttgtatccggagctttgtgggattcttggtttagagactagagtgtttgcaacacctaagctctaagaaagcgtctttcagagagtgaatctttggtttatttgaaaaacacatgttttgggagaaagagacaatgttaaactctagaactgtgatcacagaaataataaacatgttcaatgttggcttgttcagtgttgttgttgggcttgttcttaggcttggttgtttaaaatatggaaccggtttaatcggttttagagctaattagatgaactagagataaccgggttgtagtagttatcggagaaggagaaacggtgttgtgaatttgtgattgctgaaattacgccatgttaaaccggtattaaaacacg

SEQ ID NO: 21152 - protein, 264 aa, Arabidopsis thaliana
  peptide (1)..(264): Ceres Seq. ID no. 12393359
  misc_feature (35)..(210): Pfam Name: Enoyl-CoA hydratase/isomerase family Pfam Description: Enoyl-CoA hydratase/isomerase family
  misc_feature (51)..(214): Homolog of NCBI NO: 24214965 NR Description: enoyl-CoA hydratase
  misc_feature (19)..(247): Homolog of NCBI NO: 40739395 NR Description: hypothetical protein AN6767.2 [Aspergillus
  misc_feature (34)..(247): Homolog of NCBI NO: 32404374 NR Description: hypothetical protein ( hypothetical protein
  misc_feature (41)..(230): Homolog of NCBI NO: 15828352 NR Description: possible enoyl-CoA hydratase [Mycobacterium
  misc_feature (25)..(258): Homolog of NCBI NO: 23017142 NR Description: hypothetical protein [Thermobifida fusca]
  misc_feature (24)..(248): Homolog of NCBI NO: 34903766 NR Description: unnamed protein product [Oryza sativa (japonica
  misc_feature (25)..(248): Homolog of NCBI NO: 15218713 NR Description: hypothetical protein; protein id: At1g65520.1
  misc_feature (25)..(264): Homolog of NCBI NO: 15236499 NR Description: carnitine racemase like protein
  misc_feature (25)..(264): Homolog of NCBI NO: 21555734 NR Description: carnitine racemase like protein [Arabidopsis
  misc_feature (25)..(264): Homolog of NCBI NO: 15236498 NR Description: carnitine racemase like protein
TTRFLTHFKFSLSSRNLLLPPITTMCTLEKRGDLFLLTLTGDGEHRFHPDTIATILSLLEQAKSQSTRGSILITTANGKFFSNGFDLAWAQTAGSKTGAANRLHQMVESFKPVVAALLDLPMPTIAALNGHAAAAGLILALSHDYVFMRKDRGVLYMSEVDIGLSMPDYFSALVRAKIGTSAARRELLLSGKKIRGEEAVGLGIVDSAAYDSEEGVVVASVRLGEKLAAKKWSGEVYASIRKSLYPELCGILGLETRVFATPKL

SEQ ID NO: 21153 - protein, 240 aa, Arabidopsis thaliana
  peptide (1)..(240): Ceres Seq. ID no. 12393360
  misc_feature (11)..(186): Pfam Name: Enoyl-CoA hydratase/isomerase family Pfam Description: Enoyl-CoA hydratase/isomerase family
  misc_feature (27)..(190): Homolog of NCBI NO: 24214965 NR Description: enoyl-CoA hydratase
  misc_feature (1)..(223): Homolog of NCBI NO: 40739395 NR Description: hypothetical protein AN6767.2 [Aspergillus
  misc_feature (10)..(223): Homolog of NCBI NO: 32404374 NR Description: hypothetical protein ( hypothetical protein
  misc_feature (17)..(206): Homolog of NCBI NO: 15828352 NR Description: possible enoyl-CoA hydratase [Mycobacterium
  misc_feature (1)..(234): Homolog of NCBI NO: 23017142 NR Description: hypothetical protein [Thermobifida fusca]
  misc_feature (1)..(224): Homolog of NCBI NO: 34903766 NR Description: unnamed protein product [Oryza sativa (japonica
  misc_feature (1)..(224): Homolog of NCBI NO: 15218713 NR Description: hypothetical protein; protein id: At1g65520.1
  misc_feature (1)..(240): Homolog of NCBI NO: 15236499 NR Description: carnitine racemase like protein
  misc_feature (1)..(240): Homolog of NCBI NO: 21555734 NR Description: carnitine racemase like protein [Arabidopsis
  misc_feature (1)..(240): Homolog of NCBI NO: 15236498 NR Description: carnitine racemase like protein
MCTLEKRGDLFLLTLTGDGEHRFHPDTIATILSLLEQAKSQSTRGSILITTANGKFFSNGFDLAWAQTAGSKTGAANRLHQMVESFKPVVAALLDLPMPTIAALNGHAAAAGLILALSHDYVFMRKDRGVLYMSEVDIGLSMPDYFSALVRAKIGTSAARRELLLSGKKIRGEEAVGLGIVDSAAYDSEEGVVVASVRLGEKLAAKKWSGEVYASIRKSLYPELCGILGLETRVFATPKL

SEQ ID NO: 21154 - protein, 159 aa, Arabidopsis thaliana
  peptide (1)..(159): Ceres Seq. ID no. 12393361
  misc_feature (1)..(105): Pfam Name: Enoyl-CoA hydratase/isomerase family Pfam Description: Enoyl-CoA hydratase/isomerase family
  misc_feature (1)..(109): Homolog of NCBI NO: 24214965 NR Description: enoyl-CoA hydratase
  misc_feature (1)..(142): Homolog of NCBI NO: 40739395 NR Description: hypothetical protein AN6767.2 [Aspergillus
  misc_feature (1)..(142): Homolog of NCBI NO: 32404374 NR Description: hypothetical protein ( hypothetical protein
  misc_feature (1)..(125): Homolog of NCBI NO: 15828352 NR Description: possible enoyl-CoA hydratase [Mycobacterium
  misc_feature (1)..(153): Homolog of NCBI NO: 23017142 NR Description: hypothetical protein [Thermobifida fusca]
  misc_feature (1)..(143): Homolog of NCBI NO: 34903766 NR Description: unnamed protein product [Oryza sativa (japonica
  misc_feature (1)..(143): Homolog of NCBI NO: 15218713 NR Description: hypothetical protein; protein id: At1g65520.1
  misc_feature (1)..(159): Homolog of NCBI NO: 15236499 NR Description: carnitine racemase like protein
  misc_feature (1)..(159): Homolog of NCBI NO: 21555734 NR Description: carnitine racemase like protein [Arabidopsis
  misc_feature (1)..(159): Homolog of NCBI NO: 15236498 NR Description: carnitine racemase like protein
MVESFKPVVAALLDLPMPTIAALNGHAAAAGLILALSHDYVFMRKDRGVLYMSEVDIGLSMPDYFSALVRAKIGTSAARRELLLSGKKIRGEEAVGLGIVDSAAYDSEEGVVVASVRLGEKLAAKKWSGEVYASIRKSLYPELCGILGLETRVFATPKL

SEQ ID NO: 21155 - DNA, 822 bp, Arabidopsis thaliana
  misc_feature (1)..(822): Ceres Seq. ID no. 13497029
  misc_feature: MA Experiment ID: 108434 Result: Up-regulated in Transcription
  misc_feature: MA Experiment 108434 PARAMETER Experiment Name: At_Root_Tips_cDNA_P Parameter: Tissue Value: Root Tips
  misc_feature: MA Experiment ID: 108595 Result: Down-regulated in Transcription
  misc_feature: MA Experiment 108595 PARAMETER Experiment Name: At_Ler-pi_Ovule_cDNA_P Parameter: Plant Line Value: null
  misc_feature: MA Experiment ID: 20000113 Result: Up-regulated in Transcription
  misc_feature: MA Experiment 20000113 PARAMETER Experiment Name: At_42deg_Heat_cDNA_P Parameter: Temperature (deg C) Value: 42 vs. 22
  misc_feature: MA Experiment 20000113 PARAMETER Experiment Name: At_42deg_Heat_cDNA_P Parameter: Timepoint (hr) Value: 8
  misc_feature: MA Experiment 20000113 PARAMETER Experiment Name: At_42deg_Heat_cDNA_P Parameter: Tissue Value: Aerial
  misc_feature: MA Experiment ID: 20000224 Result: Down-regulated in Transcription
aaaacatatttcattgagctcctccactgaatcgctctcatccttcgcttcttcgaattccaaaggtagaacagtagaagaaatcatggatccagctgaaatgagatatttggaagaagaggatggtccgttgatgaagacaatcaaaggtagtatcactggttttggtgctgggactatttacggaaccattttagccacatggaaagatgttccaagagtggagagaaatgtggctcttccaggacttattagaacactgaagatgatgggaacccatgggctgacttttgctgctataggaggtgtttacatcggtgttgaacagctggttcagaattttagatccaagagagatttttacaatggtgctattggtggttttgtcgctggagcttctgtgcttggctatagagcaaggagcatcccgacagcgatagctgcaggtgcaacactagctgttacctctgctttgattgattctggaggtcagaccacaagagtagacaatggcagagaatactatccttacaccgtcgagaaaagagctgaagctgattcctgatttctcttttggtcactgagattaataagatgtgcattcgctgatccggggatcttgagataatctcttttgtttattttatctggatatgtgatatcatgatactctttgctcttgtttcttcttgttttcttgagagcgactttctcacatcttttgtctgaatgtttcctgcaataaaaattcaactttgtctgcagatgtaaacaaatgttttagctttcagtaatcattttaatcagacatttgcttgcttc

SEQ ID NO: 21156 - protein, 187 aa, Arabidopsis thaliana
  peptide (1)..(187): Ceres Seq. ID no. 13497030
  misc_feature (29)..(187): Homolog of NCBI NO: 18405910 NR Description: expressed protein [Arabidopsis thaliana]
KHISLSSSTESLSSFASSNSKGRTVEEIMDPAEMRYLEEEDGPLMKTIKGSITGFGAGTIYGTILATWKDVPRVERNVALPGLIRTLKMMGTHGLTFAAIGGVYIGVEQLVQNFRSKRDFYNGAIGGFVAGASVLGYRARSIPTAIAAGATLAVTSALIDSGGQTTRVDNGREYYPYTVEKRAEADS

SEQ ID NO: 21157 - protein, 159 aa, Arabidopsis thaliana
  peptide (1)..(159): Ceres Seq. ID no. 13497031
  misc_feature (1)..(159): Homolog of NCBI NO: 18405910 NR Description: expressed protein [Arabidopsis thaliana]
MDPAEMRYLEEEDGPLMKTIKGSITGFGAGTIYGTILATWKDVPRVERNVALPGLIRTLKMMGTHGLTFAAIGGVYIGVEQLVQNFRSKRDFYNGAIGGFVAGASVLGYRARSIPTAIAAGATLAVTSALIDSGGQTTRVDNGREYYPYTVEKRAEADS

SEQ ID NO: 21158 - protein, 154 aa, Arabidopsis thaliana
  peptide (1)..(154): Ceres Seq. ID no. 13497032
  misc_feature (1)..(154): Homolog of NCBI NO: 18405910 NR Description: expressed protein [Arabidopsis thaliana]
MRYLEEEDGPLMKTIKGSITGFGAGTIYGTILATWKDVPRVERNVALPGLIRTLKMMGTHGLTFAAIGGVYIGVEQLVQNFRSKRDFYNGAIGGFVAGASVLGYRARSIPTAIAAGATLAVTSALIDSGGQTTRVDNGREYYPYTVEKRAEADS

SEQ ID NO: 21159 - DNA, 1726 bp, Arabidopsis thaliana
  misc_feature (1)..(1726): Ceres Seq. ID no. 13490107
  misc_feature: MA Experiment ID: 108433 Result: Up-regulated in Transcription
  misc_feature: MA Experiment 108433 PARAMETER Experiment Name: At_rhl_Mutant2_cDNA_P Parameter: Age (day) Value: 7
  misc_feature: MA Experiment 108433 PARAMETER Experiment Name: At_rhl_Mutant2_cDNA_P Parameter: Organism Value: A. thaliana
  misc_feature: MA Experiment 108433 PARAMETER Experiment Name: At_rhl_Mutant2_cDNA_P Parameter: Plant Line Value: rhl Mutant vs. wt landsburg
  misc_feature: MA Experiment 108433 PARAMETER Experiment Name: At_rhl_Mutant2_cDNA_P Parameter: Tissue Value: Roots
  misc_feature: MA Experiment ID: 108573 Result: Up-regulated in Transcription
  misc_feature: MA Experiment 108573 PARAMETER Experiment Name: At_Drought_cDNA_P Parameter: Timepoint (hr) Value: 6
  misc_feature: MA Experiment 108573 PARAMETER Experiment Name: At_Drought_cDNA_P Parameter: Tissue Value: Aerial
  misc_feature: MA Experiment 108573 PARAMETER Experiment Name: At_Drought_cDNA_P Parameter: Treatment Value: Drought vs. No Drought
  misc_feature: MA Experiment ID: 108668 Result: Up-regulated in Transcription
  misc_feature: MA Experiment 108668 PARAMETER Experiment Name: At_2mM_SA_cDNA_P Parameter: Plant Line Value: WS
  misc_feature: MA Experiment 108668 PARAMETER Experiment Name: At_2mM_SA_cDNA_P Parameter: Timepoint (hr) Value: 6
  misc_feature: MA Experiment 108668 PARAMETER Experiment Name: At_2mM_SA_cDNA_P Parameter: Treatment Value: 2mM SA vs. No Treatment
  misc_feature: MA Experiment ID: 20000089 Result: Up-regulated in Transcription
  misc_feature: MA Experiment ID: 20000111 Result: Up-regulated in Transcription
  misc_feature: MA Experiment 20000111 PARAMETER Experiment Name: At_42deg_Heat_cDNA_P Parameter: Temperature (deg C) Value: 42 vs. 22
  misc_feature: MA Experiment 20000111 PARAMETER Experiment Name: At_42deg_Heat_cDNA_P Parameter: Timepoint (hr) Value: 6
  misc_feature: MA Experiment 20000111 PARAMETER Experiment Name: At_42deg_Heat_cDNA_P Parameter: Tissue Value: Aerial
  misc_feature: MA Experiment ID: 20000112 Result: Up-regulated in Transcription
  misc_feature: MA Experiment 20000112 PARAMETER Experiment Name: At_42deg_Heat_cDNA_P Parameter: Temperature (deg C) Value: 42 vs. 22
  misc_feature: MA Experiment 20000112 PARAMETER Experiment Name: At_42deg_Heat_cDNA_P Parameter: Timepoint (hr) Value: 2
  misc_feature: MA Experiment 20000112 PARAMETER Experiment Name: At_42deg_Heat_cDNA_P Parameter: Tissue Value: Aerial
  misc_feature: MA Experiment ID: 20000113 Result: Up-regulated in Transcription
  misc_feature: MA Experiment 20000113 PARAMETER Experiment Name: At_42deg_Heat_cDNA_P Parameter: Temperature (deg C) Value: 42 vs. 22
  misc_feature: MA Experiment 20000113 PARAMETER Experiment Name: At_42deg_Heat_cDNA_P Parameter: Timepoint (hr) Value: 8
  misc_feature: MA Experiment 20000113 PARAMETER Experiment Name: At_42deg_Heat_cDNA_P Parameter: Tissue Value: Aerial
  misc_feature: MA Experiment ID: 20000173 Result: Up-regulated in Transcription
  misc_feature: MA Experiment 20000173 PARAMETER Experiment Name: At_42deg_Heat_P Parameter: Age (day) Value: 14
  misc_feature: MA Experiment 20000173 PARAMETER Experiment Name: At_42deg_Heat_P Parameter: Organism Value: A. thaliana
  misc_feature: MA Experiment 20000173 PARAMETER Experiment Name: At_42deg_Heat_P Parameter: Plant Line Value: WS
  misc_feature: MA Experiment 20000173 PARAMETER Experiment Name: At_42deg_Heat_P Parameter: Temperature (deg C) Value: 42 vs. 22
  misc_feature: MA Experiment 20000173 PARAMETER Experiment Name: At_42deg_Heat_P Parameter: Timepoint (hr) Value: 6
  misc_feature: MA Experiment 20000173 PARAMETER Experiment Name: At_42deg_Heat_P Parameter: Tissue Value: Aerial
  misc_feature: MA Experiment ID: 20000182 Result: Up-regulated in Transcription
  misc_feature: MA Experiment 20000182 PARAMETER Experiment Name: At_2mM_SA_P Parameter: Age (day) Value: 14
  misc_feature: MA Experiment 20000182 PARAMETER Experiment Name: At_2mM_SA_P Parameter: Organism Value: A. thaliana
  misc_feature: MA Experiment 20000182 PARAMETER Experiment Name: At_2mM_SA_P Parameter: Plant Line Value: WS
  misc_feature: MA Experiment 20000182 PARAMETER Experiment Name: At_2mM_SA_P Parameter: Timepoint (hr) Value: 6
  misc_feature: MA Experiment 20000182 PARAMETER Experiment Name: At_2mM_SA_P Parameter: Tissue Value: Aerial
  misc_feature: MA Experiment 20000182 PARAMETER Experiment Name: At_2mM_SA_P Parameter: Treatment Value: 2mM SA vs. No Treatment
  misc_feature: MA Experiment ID: 20000286 Result: Up-regulated in Transcription
  misc_feature: MA Experiment 20000286 PARAMETER Experiment Name: At_Open_Flower_P Parameter: Age (day) Value: 21
  misc_feature: MA Experiment 20000286 PARAMETER Experiment Name: At_Open_Flower_P Parameter: Plant Line Value: WS
  misc_feature: MA Experiment 20000286 PARAMETER Experiment Name: At_Open_Flower_P Parameter: Tissue Value: Half Open vs. Whole Plant
  misc_feature: MA Experiment ID: 20000436 Result: Up-regulated in Transcription
  misc_feature: MA Experiment 20000436 PARAMETER Experiment Name: At_Drought_P Parameter: Age (day) Value: 7
  misc_feature: MA Experiment 20000436 PARAMETER Experiment Name: At_Drought_P Parameter: Organism Value: A. thaliana
  misc_feature: MA Experiment 20000436 PARAMETER Experiment Name: At_Drought_P Parameter: Plant Line Value: WS
  misc_feature: MA Experiment 20000436 PARAMETER Experiment Name: At_Drought_P Parameter: Timepoint (hr) Value: 12
  misc_feature: MA Experiment 20000436 PARAMETER Experiment Name: At_Drought_P Parameter: Tissue Value: Whole Plant
  misc_feature: MA Experiment 20000436 PARAMETER Experiment Name: At_Drought_P Parameter: Treatment Value: Drought vs. No Drought
  misc_feature: MA Experiment ID: 20000437 Result: Up-regulated in Transcription
  misc_feature: MA Experiment 20000437 PARAMETER Experiment Name: At_Drought_P Parameter: Age (day) Value: 8
  misc_feature: MA Experiment 20000437 PARAMETER Experiment Name: At_Drought_P Parameter: Organism Value: A. thaliana
  misc_feature: MA Experiment 20000437 PARAMETER Experiment Name: At_Drought_P Parameter: Plant Line Value: WS
  misc_feature: MA Experiment 20000437 PARAMETER Experiment Name: At_Drought_P Parameter: Timepoint (hr) Value: 24
  misc_feature: MA Experiment 20000437 PARAMETER Experiment Name: At_Drought_P Parameter: Tissue Value: Whole Plant
  misc_feature: MA Experiment 20000437 PARAMETER Experiment Name: At_Drought_P Parameter: Treatment Value: Drought vs. No Drought
  misc_feature: MA Experiment ID: 20000439 Result: Up-regulated in Transcription
  misc_feature: MA Experiment 20000439 PARAMETER Experiment Name: At_Roots__P Parameter: Age (day) Value: 14 vs. 21
  misc_feature: MA Experiment 20000439 PARAMETER Experiment Name: At_Roots__P Parameter: Organism Value: A. thaliana
  misc_feature: MA Experiment 20000439 PARAMETER Experiment Name: At_Roots__P Parameter: Tissue Value: Roots vs. Whole Plant
  misc_feature: MA Experiment ID: 20000495 Result: Up-regulated in Transcription
  misc_feature: MA Experiment 20000495 PARAMETER Experiment Name: At_Guard_Cells_P Parameter: Harvest Date Value: 8/2/2002
  misc_feature: MA Experiment 20000495 PARAMETER Experiment Name: At_Guard_Cells_P Parameter: Organism Value: A. thaliana
  misc_feature: MA Experiment 20000495 PARAMETER Experiment Name: At_Guard_Cells_P Parameter: Tissue Value: Guard Cells vs. Leaves
  misc_feature: MA Experiment ID: 20001451 Result: Down-regulated in Transcription
  misc_feature: MA Experiment 20001451 PARAMETER Experiment Name: At_Far-red-induction_P Parameter: Age (day) Value: 7
  misc_feature: MA Experiment 20001451 PARAMETER Experiment Name: At_Far-red-induction_P Parameter: Light Value: Far-red vs. White
  misc_feature: MA Experiment 20001451 PARAMETER Experiment Name: At_Far-red-induction_P Parameter: Organism Value: A. thaliana
  misc_feature: MA Experiment 20001451 PARAMETER Experiment Name: At_Far-red-induction_P Parameter: Plant Line Value: Columbia
  misc_feature: MA Experiment 20001451 PARAMETER Experiment Name: At_Far-red-induction_P Parameter: Timepoint (hr) Value: 24
  misc_feature: MA Experiment 20001451 PARAMETER Experiment Name: At_Far-red-induction_P Parameter: Tissue Value: Whole Plant
  misc_feature: MA Experiment ID: 20001911 Result: Up-regulated in Transcription
  misc_feature: MA Experiment 20001911 PARAMETER Experiment Name: At_Drought_Reproduction_P Parameter: Age (day) Value: 40
  misc_feature: MA Experiment 20001911 PARAMETER Experiment Name: At_Drought_Reproduction_P Parameter: Organism Value: A. thaliana
  misc_feature: MA Experiment 20001911 PARAMETER Experiment Name: At_Drought_Reproduction_P Parameter: Plant Line Value: WS
  misc_feature: MA Experiment 20001911 PARAMETER Experiment Name: At_Drought_Reproduction_P Parameter: Timepoint (day) Value: 10
  misc_feature: MA Experiment 20001911 PARAMETER Experiment Name: At_Drought_Reproduction_P Parameter: Tissue Value: Flowers
  misc_feature: MA Experiment 20001911 PARAMETER Experiment Name: At_Drought_Reproduction_P Parameter: Treatment Value: Drought vs. No Drought
aaaaatggcactcaaagcgattctctttttgggtttatttctcgtcgtgatagtttctccgatcaccgtctacggtggagctgtgtgtccggcgagttccacgtttggtcgtggaagctttcctgatggtttcttgttcggtgctacaacttctgctttccagcatgaaggtgcagcagaagaaggaggccgaggttccagcatttgggactcattcactcttaaacaacattcagaaagcaacaacaatcttgacggcaggctcggagttgatttctatcatcattacaaggaagatgttcaactattgaaaaaactgaatatggatgcctttaggttctctatatcttggtcaagaatatttccccatgggaaaaaagacaagggagtgagtgaaacaggagttaaattctacaatgatcttatcaacgagctcattgcaaatggtgtaacgcctcttgtcacattgtttcaatgggatgtacctcaggctcttgaagatgaatacggcggtttcttgagtgaccgtattttggaggatttccgtgattttgcacagtttgctttcaataaatatggtgatagagtgaagcattgggttactataaacgaaccttatgaatttagtcgtggtggatacgagactggagagaaagcaccaggaagatgttctaaatatgtcaatgagaaatgtgttgcaggcaagagtggccatgaagtttacactgttagtcacaatctgctgttggctcatgccgaagctgtggaagaattcaggaaatgtggaaagtgcacaggtggaaagatcggaattgttcaaagtccaatgtggtttgagccttatgataagaaatccacctcgagtccttcagaggagatagtgaagagagctatggatttcactctaggctggcatatggagccaataacacatggagattaccctcaggccatgaaagatgttgttggtagtcgattaccatcttttacgcccgagcagaaggagaaactgaagggttcttatgattttgtcggtatcaattacttcacttctacatttgttgctcatacggacaatgttaatccagagaaaccgagttgggaagctgattctcgcttgcagttacattcgaataacgttgatgggttcaagattggttctcagcctgctactgcgaagtatcctgtttgcgctgacgggttaagaaaagttttgaaatacatcaaagagaactacaatgacccagaaatcatagtcactggaaacgggtacaaggagacacttgaagagaaagatgtacttccagatgccctcagcgatagtaacaggaagtattatcatatgagacatctcatggcattacatggagcagtctgcgaggacaaggttaatgttaaaggttactttgtgtcgtcgcttatggatggactagagtgggaagatggatacaagacgaggtctggactgtactatgtagactatggacacaatatgggacggcatgagaaacaatctgccaagtggctctccaagctccttgagaaagtcccggacacgattcagtcgaaggtagattcggattcaaggaaagagttataaatgatcagagatccttttcgcaactctgtttaatcgatcatatgatgttatgtgtgtttttatcttaaaagagtgtaatccacgatctatgtagtttatataataaataaagaagtaacttatatc

SEQ ID NO: 21160 - protein, 532 aa, Arabidopsis thaliana
  peptide (1)..(532): Ceres Seq. ID no. 13490108
  misc_feature (5)..(514): Homolog of NCBI NO: 12043529 NR Description: beta-glucosidase 1 [Arabidopsis thaliana]
  misc_feature (35)..(513): Homolog of NCBI NO: 18377977 NR Description: putative beta-glucosidase [Arabidopsis thaliana]
  misc_feature (7)..(513): Homolog of NCBI NO: 25404995 NR Description: protein T4O12.15 [imported] - Arabidopsis
  misc_feature (7)..(513): Homolog of NCBI NO: 15222905 NR Description: glycosyl hydrolase family 1,
  misc_feature (7)..(513): Homolog of NCBI NO: 25289457 NR Description: probable beta-glucosidase (EC 3.2.1.21) ATA27
  misc_feature (2)..(515): Homolog of NCBI NO: 1363489 NR Description: thioglucosidase (EC 3.2.1.147) 3D precursor -
  misc_feature (2)..(515): Homolog of NCBI NO: 15232626 NR Description: glycosyl hydrolase family 1 [Arabidopsis
  misc_feature (7)..(532): Homolog of NCBI NO: 16604493 NR Description: AT3g21370/MHC9_5 [Arabidopsis thaliana]
  misc_feature (7)..(532): Homolog of NCBI NO: 22331243 NR Description: glycosyl hydrolase family 1 [Arabidopsis
  misc_feature (2)..(532): Homolog of NCBI NO: 15228597 NR Description: glycosyl hydrolase family 1 [Arabidopsis
KMALKAILFLGLFLVVIVSPITVYGGAVCPASSTFGRGSFPDGFLFGATTSAFQHEGAAEEGGRGSSIWDSFTLKQHSESNNNLDGRLGVDFYHHYKEDVQLLKKLNMDAFRFSISWSRIFPHGKKDKGVSETGVKFYNDLINELIANGVTPLVTLFQWDVPQALEDEYGGFLSDRILEDFRDFAQFAFNKYGDRVKHWVTINEPYEFSRGGYETGEKAPGRCSKYVNEKCVAGKSGHEVYTVSHNLLLAHAEAVEEFRKCGKCTGGKIGIVQSPMWFEPYDKKSTSSPSEEIVKRAMDFTLGWHMEPITHGDYPQAMKDVVGSRLPSFTPEQKEKLKGSYDFVGINYFTSTFVAHTDNVNPEKPSWEADSRLQLHSNNVDGFKIGSQPATAKYPVCADGLRKVLKYIKENYNDPEIIVTGNGYKETLEEKDVLPDALSDSNRKYYHMRHLMALHGAVCEDKVNVKGYFVSSLMDGLEWEDGYKTRSGLYYVDYGHNMGRHEKQSAKWLSKLLEKVPDTIQSKVDSDSRKEL

SEQ ID NO: 21161 - protein, 531 aa, Arabidopsis thaliana
  peptide (1)..(531): Ceres Seq. ID no. 13490109
  misc_feature (34)..(512): Homolog of NCBI NO: 18377977 NR Description: putative beta-glucosidase [Arabidopsis thaliana]
  misc_feature (6)..(512): Homolog of NCBI NO: 25404995 NR Description: protein T4O12.15 [imported] - Arabidopsis
  misc_feature (6)..(512): Homolog of NCBI NO: 15222905 NR Description: glycosyl hydrolase family 1,
  misc_feature (6)..(512): Homolog of NCBI NO: 25289457 NR Description: probable beta-glucosidase (EC 3.2.1.21) ATA27
  misc_feature (1)..(514): Homolog of NCBI NO: 1363489 NR Description: thioglucosidase (EC 3.2.1.147) 3D precursor -
  misc_feature (1)..(514): Homolog of NCBI NO: 15232626 NR Description: glycosyl hydrolase family 1 [Arabidopsis
  misc_feature (6)..(531): Homolog of NCBI NO: 16604493 NR Description: AT3g21370/MHC9_5 [Arabidopsis thaliana]
  misc_feature (6)..(531): Homolog of NCBI NO: 22331243 NR Description: glycosyl hydrolase family 1 [Arabidopsis
  misc_feature (1)..(531): Homolog of NCBI NO: 15228597 NR Description: glycosyl hydrolase family 1 [Arabidopsis
  misc_feature (4)..(513): Homolog of NCBI NO: 12043529 NR Description: beta-glucosidase 1 [Arabidopsis thaliana]
MALKAILFLGLFLVVIVSPITVYGGAVCPASSTFGRGSFPDGFLFGATTSAFQHEGAAEEGGRGSSIWDSFTLKQHSESNNNLDGRLGVDFYHHYKEDVQLLKKLNMDAFRFSISWSRIFPHGKKDKGVSETGVKFYNDLINELIANGVTPLVTLFQWDVPQALEDEYGGFLSDRILEDFRDFAQFAFNKYGDRVKHWVTINEPYEFSRGGYETGEKAPGRCSKYVNEKCVAGKSGHEVYTVSHNLLLAHAEAVEEFRKCGKCTGGKIGIVQSPMWFEPYDKKSTSSPSEEIVKRAMDFTLGWHMEPITHGDYPQAMKDVVGSRLPSFTPEQKEKLKGSYDFVGINYFTSTFVAHTDNVNPEKPSWEADSRLQLHSNNVDGFKIGSQPATAKYPVCADGLRKVLKYIKENYNDPEIIVTGNGYKETLEEKDVLPDALSDSNRKYYHMRHLMALHGAVCEDKVNVKGYFVSSLMDGLEWEDGYKTRSGLYYVDYGHNMGRHEKQSAKWLSKLLEKVPDTIQSKVDSDSRKEL

SEQ ID NO: 21162 - protein, 425 aa, Arabidopsis thaliana
  peptide (1)..(425): Ceres Seq. ID no. 13490110
  misc_feature (1)..(407): Homolog of NCBI NO: 12043529 NR Description: beta-glucosidase 1 [Arabidopsis thaliana]
  misc_feature (1)..(406): Homolog of NCBI NO: 18377977 NR Description: putative beta-glucosidase [Arabidopsis thaliana]
  misc_feature (1)..(406): Homolog of NCBI NO: 25404995 NR Description: protein T4O12.15 [imported] - Arabidopsis
  misc_feature (1)..(406): Homolog of NCBI NO: 15222905 NR Description: glycosyl hydrolase family 1,
  misc_feature (1)..(406): Homolog of NCBI NO: 25289457 NR Description: probable beta-glucosidase (EC 3.2.1.21) ATA27
  misc_feature (1)..(408): Homolog of NCBI NO: 1363489 NR Description: thioglucosidase (EC 3.2.1.147) 3D precursor -
  misc_feature (1)..(408): Homolog of NCBI NO: 15232626 NR Description: glycosyl hydrolase family 1 [Arabidopsis
  misc_feature (1)..(425): Homolog of NCBI NO: 16604493 NR Description: AT3g21370/MHC9_5 [Arabidopsis thaliana]
  misc_feature (1)..(425): Homolog of NCBI NO: 22331243 NR Description: glycosyl hydrolase family 1 [Arabidopsis
  misc_feature (1)..(425): Homolog of NCBI NO: 15228597 NR Description: glycosyl hydrolase family 1 [Arabidopsis
MDAFRFSISWSRIFPHGKKDKGVSETGVKFYNDLINELIANGVTPLVTLFQWDVPQALEDEYGGFLSDRILEDFRDFAQFAFNKYGDRVKHWVTINEPYEFSRGGYETGEKAPGRCSKYVNEKCVAGKSGHEVYTVSHNLLLAHAEAVEEFRKCGKCTGGKIGIVQSPMWFEPYDKKSTSSPSEEIVKRAMDFTLGWHMEPITHGDYPQAMKDVVGSRLPSFTPEQKEKLKGSYDFVGINYFTSTFVAHTDNVNPEKPSWEADSRLQLHSNNVDGFKIGSQPATAKYPVCADGLRKVLKYIKENYNDPEIIVTGNGYKETLEEKDVLPDALSDSNRKYYHMRHLMALHGAVCEDKVNVKGYFVSSLMDGLEWEDGYKTRSGLYYVDYGHNMGRHEKQSAKWLSKLLEKVPDTIQSKVDSDSRKEL

SEQ ID NO: 21163 - DNA, 521 bp, Arabidopsis thaliana
  misc_feature (1)..(521): Ceres Seq. ID no. 12393362
  misc_feature: MA Experiment ID: 108573 Result: Down-regulated in Transcription
  misc_feature: MA Experiment 108573 PARAMETER Experiment Name: At_Drought_cDNA_P Parameter: Timepoint (hr) Value: 6
  misc_feature: MA Experiment 108573 PARAMETER Experiment Name: At_Drought_cDNA_P Parameter: Tissue Value: Aerial
  misc_feature: MA Experiment 108573 PARAMETER Experiment Name: At_Drought_cDNA_P Parameter: Treatment Value: Drought vs. No Drought
  misc_feature: MA Experiment ID: 20000068 Result: Up-regulated in Transcription
  misc_feature: MA Experiment ID: 20000180 Result: Down-regulated in Transcription
  misc_feature: MA Experiment 20000180 PARAMETER Experiment Name: At_Germinating_Seeds_P Parameter: Age (hr) Value: 24 vs. 0
  misc_feature: MA Experiment 20000180 PARAMETER Experiment Name: At_Germinating_Seeds_P Parameter: Tissue Value: Germinating Seeds
  misc_feature: MA Experiment ID: 20000184 Result: Down-regulated in Transcription
  misc_feature: MA Experiment 20000184 PARAMETER Experiment Name: At_Shoots__P Parameter: Age (day) Value: 7
  misc_feature: MA Experiment 20000184 PARAMETER Experiment Name: At_Shoots__P Parameter: Tissue Value: Shoots vs. Whole Plant
  misc_feature: Phenotype: WHOLE PLANT Size-Small
  misc_feature: Phenotype: WHOLE PLANT Size-Small
  misc_feature: Phenotype: WHOLE PLANT Size-Small
  misc_feature: Phenotype: WHOLE PLANT Size-Small
acttaaaccgaacagatttgtcacgaagaagaaatcagtgtagcaaacaccatccatccctgagcaaagatagaagaaaagctatgactgatttgcaaatggaggtagaggtagataccaattcttctttgcaggagtctctcccgaagccgcaagtcatgtacagatgtaagaaatgtagaaggatagttgctattgaggaaaacatagtcccgcatgaaccaggaaagggtgaagaatgctttgcttggaaaaagagaagtggaaactctgaacaagtgcaatgctcttccatctttgtcgagcctatgaaatggatgcagacaatacatgatggagtggtggaagagaagcttctatgttttggatgtaacgggagattaggttatttcaactgggctgggatgcaatgtagctgtggtgcatgggttaatccggcttttcagcttaataaaagccgaatagacgagtgtaaatccgagccaaacccgaacctgaatatggaaacttgatgaaaaagg

SEQ ID NO: 21164 - protein, 169 aa, Arabidopsis thaliana
  peptide (1)..(169): Ceres Seq. ID no. 12393363
  misc_feature (51)..(155): Homolog of NCBI NO: 19112380 NR Description: protein tyrosine phosphatase
  misc_feature (55)..(163): Homolog of NCBI NO: 32416772 NR Description: hypothetical protein [Neurospora crassa]
  misc_feature (55)..(169): Homolog of NCBI NO: 6322217 NR Description: nitrogen starvation-induced protein phosphatase;
  misc_feature (30)..(161): Homolog of NCBI NO: 30580455 NR Description: Dual specificity protein phosphatase 12 (Dual
  misc_feature (30)..(161): Homolog of NCBI NO: 12963553 NR Description: dual specificity phosphatase 12; EST AA027408
  misc_feature (28)..(161): Homolog of NCBI NO: 11560052 NR Description: glucokinase-associated dual specificity
  misc_feature (28)..(161): Homolog of NCBI NO: 6005956 NR Description: dual specificity phosphatase 12
  misc_feature (20)..(143): Homolog of NCBI NO: 7486300 NR Description: hypothetical protein F28J12.250 - Arabidopsis
  misc_feature (28)..(169): Homolog of NCBI NO: 18415129 NR Description: Expressed protein
  misc_feature (28)..(169): Homolog of NCBI NO: 21555746 NR Description: unknown [Arabidopsis thaliana]
LNRTDLSRRRNQCSKHHPSLSKDRRKAMTDLQMEVEVDTNSSLQESLPKPQVMYRCKKCRRIVAIEENIVPHEPGKGEECFAWKKRSGNSEQVQCSSIFVEPMKWMQTIHDGVVEEKLLCFGCNGRLGYFNWAGMQCSCGAWVNPAFQLNKSRIDECKSEPNPNLNMET

SEQ ID NO: 21165 - protein, 142 aa, Arabidopsis thaliana
  peptide (1)..(142): Ceres Seq. ID no. 12393364
  misc_feature (24)..(128): Homolog of NCBI NO: 19112380 NR Description: protein tyrosine phosphatase
  misc_feature (28)..(136): Homolog of NCBI NO: 32416772 NR Description: hypothetical protein [Neurospora crassa]
  misc_feature (28)..(142): Homolog of NCBI NO: 6322217 NR Description: nitrogen starvation-induced protein phosphatase;
  misc_feature (3)..(134): Homolog of NCBI NO: 30580455 NR Description: Dual specificity protein phosphatase 12 (Dual
  misc_feature (3)..(134): Homolog of NCBI NO: 12963553 NR Description: dual specificity phosphatase 12; EST AA027408
  misc_feature (1)..(134): Homolog of NCBI NO: 11560052 NR Description: glucokinase-associated dual specificity
  misc_feature (1)..(134): Homolog of NCBI NO: 6005956 NR Description: dual specificity phosphatase 12
  misc_feature (1)..(116): Homolog of NCBI NO: 7486300 NR Description: hypothetical protein F28J12.250 - Arabidopsis
  misc_feature (1)..(142): Homolog of NCBI NO: 18415129 NR Description: Expressed protein
  misc_feature (1)..(142): Homolog of NCBI NO: 21555746 NR Description: unknown [Arabidopsis thaliana]
MTDLQMEVEVDTNSSLQESLPKPQVMYRCKKCRRIVAIEENIVPHEPGKGEECFAWKKRSGNSEQVQCSSIFVEPMKWMQTIHDGVVEEKLLCFGCNGRLGYFNWAGMQCSCGAWVNPAFQLNKSRIDECKSEPNPNLNMET

SEQ ID NO: 21166 - protein, 137 aa, Arabidopsis thaliana
  peptide (1)..(137): Ceres Seq. ID no. 12393365
  misc_feature (19)..(123): Homolog of NCBI NO: 19112380 NR Description: protein tyrosine phosphatase
  misc_feature (23)..(131): Homolog of NCBI NO: 32416772 NR Description: hypothetical protein [Neurospora crassa]
  misc_feature (23)..(137): Homolog of NCBI NO: 6322217 NR Description: nitrogen starvation-induced protein phosphatase;
  misc_feature (1)..(129): Homolog of NCBI NO: 30580455 NR Description: Dual specificity protein phosphatase 12 (Dual
  misc_feature (1)..(129): Homolog of NCBI NO: 12963553 NR Description: dual specificity phosphatase 12; EST AA027408
  misc_feature (1)..(129): Homolog of NCBI NO: 11560052 NR Description: glucokinase-associated dual specificity
  misc_feature (1)..(129): Homolog of NCBI NO: 6005956 NR Description: dual specificity phosphatase 12
  misc_feature (1)..(111): Homolog of NCBI NO: 7486300 NR Description: hypothetical protein F28J12.250 - Arabidopsis
  misc_feature (1)..(137): Homolog of NCBI NO: 18415129 NR Description: Expressed protein
  misc_feature (1)..(137): Homolog of NCBI NO: 21555746 NR Description: unknown [Arabidopsis thaliana]
MEVEVDTNSSLQESLPKPQVMYRCKKCRRIVAIEENIVPHEPGKGEECFAWKKRSGNSEQVQCSSIFVEPMKWMQTIHDGVVEEKLLCFGCNGRLGYFNWAGMQCSCGAWVNPAFQLNKSRIDECKSEPNPNLNMET

SEQ ID NO: 21167 - DNA, 1708 bp, Arabidopsis thaliana
  misc_feature (1)..(1708): Ceres Seq. ID no. 13486985
  misc_feature: MA Experiment ID: 108434 Result: Down-regulated in Transcription
  misc_feature: MA Experiment 108434 PARAMETER Experiment Name: At_Root_Tips_cDNA_P Parameter: Tissue Value: Root Tips
  misc_feature: MA Experiment ID: 20000185 Result: Down-regulated in Transcription
  misc_feature: MA Experiment 20000185 PARAMETER Experiment Name: At_Roots__P Parameter: Age (day) Value: 7 vs. 21
  misc_feature: MA Experiment 20000185 PARAMETER Experiment Name: At_Roots__P Parameter: Organism Value: A. thaliana
  misc_feature: MA Experiment 20000185 PARAMETER Experiment Name: At_Roots__P Parameter: Tissue Value: Roots vs. Whole Plant
  misc_feature: MA Experiment ID: 20000234 Result: Down-regulated in Transcription
  misc_feature: MA Experiment 20000234 PARAMETER Experiment Name: At_Siliques_P Parameter: Age (day) Value: 21
  misc_feature: MA Experiment 20000234 PARAMETER Experiment Name: At_Siliques_P Parameter: Organism Value: A. thaliana
  misc_feature: MA Experiment 20000234 PARAMETER Experiment Name: At_Siliques_P Parameter: Plant Line Value: WS
  misc_feature: MA Experiment 20000234 PARAMETER Experiment Name: At_Siliques_P Parameter: Tissue Value: Less Than 5mm Siliques vs. Whole Plant
  misc_feature: MA Experiment ID: 20000235 Result: Down-regulated in Transcription
  misc_feature: MA Experiment 20000235 PARAMETER Experiment Name: At_Siliques_P Parameter: Age (day) Value: 21
  misc_feature: MA Experiment 20000235 PARAMETER Experiment Name: At_Siliques_P Parameter: Organism Value: A. thaliana
  misc_feature: MA Experiment 20000235 PARAMETER Experiment Name: At_Siliques_P Parameter: Plant Line Value: WS
  misc_feature: MA Experiment 20000235 PARAMETER Experiment Name: At_Siliques_P Parameter: Tissue Value: 5-10mm Siliques vs. Whole Plant
  misc_feature: MA Experiment ID: 20000264 Result: Down-regulated in Transcription
  misc_feature: MA Experiment 20000264 PARAMETER Experiment Name: At_Open_Flower_P Parameter: Age (day) Value: 21
  misc_feature: MA Experiment 20000264 PARAMETER Experiment Name: At_Open_Flower_P Parameter: Plant Line Value: WS
  misc_feature: MA Experiment 20000264 PARAMETER Experiment Name: At_Open_Flower_P Parameter: Tissue Value: Open Flower vs. Whole Plant
  misc_feature: MA Experiment ID: 20000265 Result: Down-regulated in Transcription
  misc_feature: MA Experiment 20000265 PARAMETER Experiment Name: At_Open_Flower_P Parameter: Age (day) Value: 21
  misc_feature: MA Experiment 20000265 PARAMETER Experiment Name: At_Open_Flower_P Parameter: Plant Line Value: WS
  misc_feature: MA Experiment 20000265 PARAMETER Experiment Name: At_Open_Flower_P Parameter: Tissue Value: Closed Flower vs. Whole Plant
  misc_feature: MA Experiment ID: 20000286 Result: Down-regulated in Transcription
  misc_feature: MA Experiment 20000286 PARAMETER Experiment Name: At_Open_Flower_P Parameter: Age (day) Value: 21
  misc_feature: MA Experiment 20000286 PARAMETER Experiment Name: At_Open_Flower_P Parameter: Plant Line Value: WS
  misc_feature: MA Experiment 20000286 PARAMETER Experiment Name: At_Open_Flower_P Parameter: Tissue Value: Half Open vs. Whole Plant
  misc_feature: MA Experiment ID: 20000438 Result: Down-regulated in Transcription
  misc_feature: MA Experiment 20000438 PARAMETER Experiment Name: At_Shoots__P Parameter: Age (day) Value: 14
  misc_feature: MA Experiment 20000438 PARAMETER Experiment Name: At_Shoots__P Parameter: Tissue Value: Shoots vs. Whole Plant
  misc_feature: MA Experiment ID: 20000439 Result: Down-regulated in Transcription
  misc_feature: MA Experiment 20000439 PARAMETER Experiment Name: At_Roots__P Parameter: Age (day) Value: 14 vs. 21
  misc_feature: MA Experiment 20000439 PARAMETER Experiment Name: At_Roots__P Parameter: Organism Value: A. thaliana
  misc_feature: MA Experiment 20000439 PARAMETER Experiment Name: At_Roots__P Parameter: Tissue Value: Roots vs. Whole Plant
  misc_feature: MA Experiment ID: 20000451 Result: Up-regulated in Transcription
  misc_feature: MA Experiment 20000451 PARAMETER Experiment Name: At_CS6879_Shoots-Roots_P Parameter: Age (day) Value: 14
  misc_feature: MA Experiment 20000451 PARAMETER Experiment Name: At_CS6879_Shoots-Roots_P Parameter: Organism Value: A. thaliana
  misc_feature: MA Experiment 20000451 PARAMETER Experiment Name: At_CS6879_Shoots-Roots_P Parameter: Plant Line Value: CS6879 vs. WS
  misc_feature: MA Experiment 20000451 PARAMETER Experiment Name: At_CS6879_Shoots-Roots_P Parameter: Tissue Value: Roots
  misc_feature: MA Experiment ID: 20000573 Result: Up-regulated in Transcription
  misc_feature: MA Experiment 20000573 PARAMETER Experiment Name: At_100uM_ABA_Mutants__P Parameter: Organism Value: A. thaliana
  misc_feature: MA Experiment 20000573 PARAMETER Experiment Name: At_100uM_ABA_Mutants__P Parameter: Plant Line Value: CS22 vs. Ler wt
  misc_feature: MA Experiment 20000573 PARAMETER Experiment Name: At_100uM_ABA_Mutants__P Parameter: Timepoint (hr) Value: N/A
  misc_feature: MA Experiment 20000573 PARAMETER Experiment Name: At_100uM_ABA_Mutants__P Parameter: Tissue Value: Whole Plant
  misc_feature: MA Experiment 20000573 PARAMETER Experiment Name: At_100uM_ABA_Mutants__P Parameter: Treatment Value: None
  misc_feature: MA Experiment ID: 20000574 Result: Up-regulated in Transcription
  misc_feature: MA Experiment 20000574 PARAMETER Experiment Name: At_100uM_ABA_Mutants__P Parameter: Organism Value: A. thaliana
  misc_feature: MA Experiment 20000574 PARAMETER Experiment Name: At_100uM_ABA_Mutants__P Parameter: Plant Line Value: CS23 vs. Ler wt
  misc_feature: MA Experiment 20000574 PARAMETER Experiment Name: At_100uM_ABA_Mutants__P Parameter: Timepoint (hr) Value: N/A
  misc_feature: MA Experiment 20000574 PARAMETER Experiment Name: At_100uM_ABA_Mutants__P Parameter: Tissue Value: Whole Plant
  misc_feature: MA Experiment 20000574 PARAMETER Experiment Name: At_100uM_ABA_Mutants__P Parameter: Treatment Value: None
  misc_feature: MA Experiment ID: 20001554 Result: Down-regulated in Transcription
  misc_feature: MA Experiment 20001554 PARAMETER Experiment Name: At_Drought_Soil_Dry_P Parameter: Age (day) Value: 21
  misc_feature: MA Experiment 20001554 PARAMETER Experiment Name: At_Drought_Soil_Dry_P Parameter: Organism Value: A. thaliana
  misc_feature: MA Experiment 20001554 PARAMETER Experiment Name: At_Drought_Soil_Dry_P Parameter: Plant Line Value: WS
  misc_feature: MA Experiment 20001554 PARAMETER Experiment Name: At_Drought_Soil_Dry_P Parameter: Post Timepoint (hr) Value: None
  misc_feature: MA Experiment 20001554 PARAMETER Experiment Name: At_Drought_Soil_Dry_P Parameter: Post-Treatment Value: None
  misc_feature: MA Experiment 20001554 PARAMETER Experiment Name: At_Drought_Soil_Dry_P Parameter: Timepoint (day) Value: 7
  misc_feature: MA Experiment 20001554 PARAMETER Experiment Name: At_Drought_Soil_Dry_P Parameter: Treatment Value: Drought vs. No Drought
  misc_feature: MA Experiment ID: 20001556 Result: Down-regulated in Transcription
  misc_feature: MA Experiment 20001556 PARAMETER Experiment Name: At_Drought_Soil_Dry_P Parameter: Age (day) Value: 26
  misc_feature: MA Experiment 20001556 PARAMETER Experiment Name: At_Drought_Soil_Dry_P Parameter: Organism Value: A. thaliana
  misc_feature: MA Experiment 20001556 PARAMETER Experiment Name: At_Drought_Soil_Dry_P Parameter: Plant Line Value: WS
  misc_feature: MA Experiment 20001556 PARAMETER Experiment Name: At_Drought_Soil_Dry_P Parameter: Post Timepoint (hr) Value: None
  misc_feature: MA Experiment 20001556 PARAMETER Experiment Name: At_Drought_Soil_Dry_P Parameter: Post-Treatment Value: None
  misc_feature: MA Experiment 20001556 PARAMETER Experiment Name: At_Drought_Soil_Dry_P Parameter: Timepoint (day) Value: 12
  misc_feature: MA Experiment 20001556 PARAMETER Experiment Name: At_Drought_Soil_Dry_P Parameter: Treatment Value: Drought vs. No Drought
  misc_feature: MA Experiment ID: 20001558 Result: Down-regulated in Transcription
  misc_feature: MA Experiment 20001558 PARAMETER Experiment Name: At_Drought_Soil_Dry_P Parameter: Age (day) Value: 27
  misc_feature: MA Experiment 20001558 PARAMETER Experiment Name: At_Drought_Soil_Dry_P Parameter: Organism Value: A. thaliana
  misc_feature: MA Experiment 20001558 PARAMETER Experiment Name: At_Drought_Soil_Dry_P Parameter: Plant Line Value: WS
  misc_feature: MA Experiment 20001558 PARAMETER Experiment Name: At_Drought_Soil_Dry_P Parameter: Post Timepoint (hr) Value: 6
  misc_feature: MA Experiment 20001558 PARAMETER Experiment Name: At_Drought_Soil_Dry_P Parameter: Post-Treatment Value: Re-Water vs. No Drought
  misc_feature: MA Experiment 20001558 PARAMETER Experiment Name: At_Drought_Soil_Dry_P Parameter: Timepoint (day) Value: 13
  misc_feature: MA Experiment 20001558 PARAMETER Experiment Name: At_Drought_Soil_Dry_P Parameter: Treatment Value: Drought vs. No Drought
  misc_feature: MA Experiment ID: 20001757 Result: Down-regulated in Transcription
  misc_feature: MA Experiment 20001757 PARAMETER Experiment Name: At_50mM_NH4NO3_L-to-H_P Parameter: Timepoint (hr) Value: 6
  misc_feature: MA Experiment 20001757 PARAMETER Experiment Name: At_50mM_NH4NO3_L-to-H_P Parameter: Tissue Value: Leaf
  misc_feature: MA Experiment 20001757 PARAMETER Experiment Name: At_50mM_NH4NO3_L-to-H_P Parameter: Treatment Value: 50mM NH4NO3 vs 100mM Mannitol
  misc_feature: MA Experiment ID: 20001904 Result: Down-regulated in Transcription
  misc_feature: MA Experiment 20001904 PARAMETER Experiment Name: At_Drought_Reproduction_P Parameter: Age (day) Value: 37
  misc_feature: MA Experiment 20001904 PARAMETER Experiment Name: At_Drought_Reproduction_P Parameter: Organism Value: A. thaliana
  misc_feature: MA Experiment 20001904 PARAMETER Experiment Name: At_Drought_Reproduction_P Parameter: Plant Line Value: WS
  misc_feature: MA Experiment 20001904 PARAMETER Experiment Name: At_Drought_Reproduction_P Parameter: Timepoint (day) Value: 7
  misc_feature: MA Experiment 20001904 PARAMETER Experiment Name: At_Drought_Reproduction_P Parameter: Tissue Value: Rosettes
  misc_feature: MA Experiment 20001904 PARAMETER Experiment Name: At_Drought_Reproduction_P Parameter: Treatment Value: Drought vs. No Drought
atcttcttcccccataacactcttcttctctcatcaaaatctctaactcaaaccttcctttgatcccaagaaatctcttccaaagccctaagccaaaagcttcaagagaaaaaatggcgatgatgggtcagttatggactaacacaggctctgctcttgcaacactaatgtttgtatacacaatcttcaaacaattcttccctctcttcggaccccagttggaaccattcctttatagactcttcggtcgcttctacccttacatccaaataacattccatgaatacagcggagagcatttcaagagaagcgaagcctacttggggatccagagctatctaagcaaagactcttctgctagagcaaagaaactcaaagccaacacaactaaaggaagcaaatctattgttcttagcatggatgataaggaagagatcactgacgattttgagggcattagggtttggtggcagtcgaagaaagagggagctactaggcaatctttctcgttttaccctgaagctaatgagaagagatattacatgttaaggttccacagacgtgaccgagaagtaatcatagagaggtatcttgagcatgttatgagagaagggaagacgatagagcaaaagaacagagagaggaagctttattcgaatactccgggtcagagccatggaaacaacagtaagtggagtcatgtaacctttgagcatccagctacgtttgatactctagctatggaagagaataagaaggaagagatcaagagtgatctgatcaagtttagtaagagtaaagattattacaagaagatcggaaaagcgtggaagagagggtatcttttgtttggaccacccgggactgggaagtctacaatgatcgcagcgatggctaatttcttggagtatgatgtttatgatcttgagttgacaacggttaaggataatacacatctgagaaggttattgattgagacttcagcgaaatcgattattgtgattgaagatatcgattgttcgcttaatctaacggggcagagaaagaagaaggaggaggaagaggaagatggagacgataagaacacgattgagaagaagatgatgatgaagaatgaaggtgagaataaagagagtaaagttactttatcagggctactaaatttcattgatggtttatggtcagcttgtggtggtgagaggatcattgtattcactacaaactttgtggacaagttagatccggctttgattaggaaaggaagaatggataagcatatagagatgtcgtattgttgtttcgaagcgtttaaggtattggctaagaactatttggatgtggaagagagtgagatgtttgaggagataaagaggttgcttgaggttgaagaaatcaagatgacaccggcggatgttggggagaatctgttaccgaagtcagaaaaggaaggaggtgagacttgtttgaagagattgatcgaagcgttgaaggaagagaaggaggaagcgaagaagaaggtcgaggaagaggaggaagagaagcagaggaaaaaggaaaaggtgaaagaaatagaggcagagaaagagaagaagaaaaagattgaagaagagaattgagtttgaaggaaatttgttggattgtagtatctaactgaaataattgtagtctgattggttcatcttatgaatgttttgtgtttcatttagcg

SEQ ID NO: 21168 - protein, 500 aa, Arabidopsis thaliana
  peptide (1)..(500): Ceres Seq. ID no. 13486986
  misc_feature (242)..(435): Pfam Name: ATPase family associated with various cellular Pfam Description: ATPase family associated with various cellular
  misc_feature (192)..(475): Homolog of NCBI NO: 29150369 NR Description: putative AAA-type ATPase [Oryza sativa (japonica
  misc_feature (10)..(479): Homolog of NCBI NO: 15233039 NR Description: AAA-type ATPase family [Arabidopsis thaliana]
  misc_feature (4)..(486): Homolog of NCBI NO: 15233040 NR Description: AAA-type ATPase family [Arabidopsis thaliana]
  misc_feature (3)..(486): Homolog of NCBI NO: 9294274 NR Description: mitochondrial protein-like [Arabidopsis thaliana]
  misc_feature (15)..(495): Homolog of NCBI NO: 15233012 NR Description: AAA-type ATPase family [Arabidopsis thaliana]
  misc_feature (1)..(495): Homolog of NCBI NO: 9294102 NR Description: contains similarity to AAA-type
  misc_feature (5)..(498): Homolog of NCBI NO: 15233016 NR Description: AAA-type ATPase family [Arabidopsis thaliana]
  misc_feature (1)..(499): Homolog of NCBI NO: 15233010 NR Description: expressed protein [Arabidopsis thaliana]
  misc_feature (1)..(499): Homolog of NCBI NO: 15242536 NR Description: AAA-type ATPase family [Arabidopsis thaliana]
  misc_feature (1)..(500): Homolog of NCBI NO: 15233037 NR Description: AAA-type ATPase family [Arabidopsis thaliana]
MAMMGQLWTNTGSALATLMFVYTIFKQFFPLFGPQLEPFLYRLFGRFYPYIQITFHEYSGEHFKRSEAYLGIQSYLSKDSSARAKKLKANTTKGSKSIVLSMDDKEEITDDFEGIRVWWQSKKEGATRQSFSFYPEANEKRYYMLRFHRRDREVIIERYLEHVMREGKTIEQKNRERKLYSNTPGQSHGNNSKWSHVTFEHPATFDTLAMEENKKEEIKSDLIKFSKSKDYYKKIGKAWKRGYLLFGPPGTGKSTMIAAMANFLEYDVYDLELTTVKDNTHLRRLLIETSAKSIIVIEDIDCSLNLTGQRKKKEEEEEDGDDKNTIEKKMMMKNEGENKESKVTLSGLLNFIDGLWSACGGERIIVFTTNFVDKLDPALIRKGRMDKHIEMSYCCFEAFKVLAKNYLDVEESEMFEEIKRLLEVEEIKMTPADVGENLLPKSEKEGGETCLKRLIEALKEEKEEAKKKVEEEEEEKQRKKEKVKEIEAEKEKKKKIEEEN

SEQ ID NO: 21169 - protein, 498 aa, Arabidopsis thaliana
  peptide (1)..(498): Ceres Seq. ID no. 13486987
  misc_feature (240)..(433): Pfam Name: ATPase family associated with various cellular Pfam Description: ATPase family associated with various cellular
  misc_feature (190)..(473): Homolog of NCBI NO: 29150369 NR Description: putative AAA-type ATPase [Oryza sativa (japonica
  misc_feature (8)..(477): Homolog of NCBI NO: 15233039 NR Description: AAA-type ATPase family [Arabidopsis thaliana]
  misc_feature (2)..(484): Homolog of NCBI NO: 15233040 NR Description: AAA-type ATPase family [Arabidopsis thaliana]
  misc_feature (1)..(484): Homolog of NCBI NO: 9294274 NR Description: mitochondrial protein-like [Arabidopsis thaliana]
  misc_feature (13)..(493): Homolog of NCBI NO: 15233012 NR Description: AAA-type ATPase family [Arabidopsis thaliana]
  misc_feature (1)..(493): Homolog of NCBI NO: 9294102 NR Description: contains similarity to AAA-type
  misc_feature (3)..(496): Homolog of NCBI NO: 15233016 NR Description: AAA-type ATPase family [Arabidopsis thaliana]
  misc_feature (1)..(497): Homolog of NCBI NO: 15233010 NR Description: expressed protein [Arabidopsis thaliana]
  misc_feature (1)..(497): Homolog of NCBI NO: 15242536 NR Description: AAA-type ATPase family [Arabidopsis thaliana]
  misc_feature (1)..(498): Homolog of NCBI NO: 15233037 NR Description: AAA-type ATPase family [Arabidopsis thaliana]
MMGQLWTNTGSALATLMFVYTIFKQFFPLFGPQLEPFLYRLFGRFYPYIQITFHEYSGEHFKRSEAYLGIQSYLSKDSSARAKKLKANTTKGSKSIVLSMDDKEEITDDFEGIRVWWQSKKEGATRQSFSFYPEANEKRYYMLRFHRRDREVIIERYLEHVMREGKTIEQKNRERKLYSNTPGQSHGNNSKWSHVTFEHPATFDTLAMEENKKEEIKSDLIKFSKSKDYYKKIGKAWKRGYLLFGPPGTGKSTMIAAMANFLEYDVYDLELTTVKDNTHLRRLLIETSAKSIIVIEDIDCSLNLTGQRKKKEEEEEDGDDKNTIEKKMMMKNEGENKESKVTLSGLLNFIDGLWSACGGERIIVFTTNFVDKLDPALIRKGRMDKHIEMSYCCFEAFKVLAKNYLDVEESEMFEEIKRLLEVEEIKMTPADVGENLLPKSEKEGGETCLKRLIEALKEEKEEAKKKVEEEEEEKQRKKEKVKEIEAEKEKKKKIEEEN

SEQ ID NO: 21170 - protein, 497 aa, Arabidopsis thaliana
  peptide (1)..(497): Ceres Seq. ID no. 13486988
  misc_feature (239)..(432): Pfam Name: ATPase family associated with various cellular Pfam Description: ATPase family associated with various cellular
  misc_feature (189)..(472): Homolog of NCBI NO: 29150369 NR Description: putative AAA-type ATPase [Oryza sativa (japonica
  misc_feature (7)..(476): Homolog of NCBI NO: 15233039 NR Description: AAA-type ATPase family [Arabidopsis thaliana]
  misc_feature (1)..(483): Homolog of NCBI NO: 15233040 NR Description: AAA-type ATPase family [Arabidopsis thaliana]
  misc_feature (1)..(483): Homolog of NCBI NO: 9294274 NR Description: mitochondrial protein-like [Arabidopsis thaliana]
  misc_feature (12)..(492): Homolog of NCBI NO: 15233012 NR Description: AAA-type ATPase family [Arabidopsis thaliana]
  misc_feature (1)..(492): Homolog of NCBI NO: 9294102 NR Description: contains similarity to AAA-type
  misc_feature (2)..(495): Homolog of NCBI NO: 15233016 NR Description: AAA-type ATPase family [Arabidopsis thaliana]
  misc_feature (1)..(496): Homolog of NCBI NO: 15233010 NR Description: expressed protein [Arabidopsis thaliana]
  misc_feature (1)..(496): Homolog of NCBI NO: 15242536 NR Description: AAA-type ATPase family [Arabidopsis thaliana]
  misc_feature (1)..(497): Homolog of NCBI NO: 15233037 NR Description: AAA-type ATPase family [Arabidopsis thaliana]
MGQLWTNTGSALATLMFVYTIFKQFFPLFGPQLEPFLYRLFGRFYPYIQITFHEYSGEHFKRSEAYLGIQSYLSKDSSARAKKLKANTTKGSKSIVLSMDDKEEITDDFEGIRVWWQSKKEGATRQSFSFYPEANEKRYYMLRFHRRDREVIIERYLEHVMREGKTIEQKNRERKLYSNTPGQSHGNNSKWSHVTFEHPATFDTLAMEENKKEEIKSDLIKFSKSKDYYKKIGKAWKRGYLLFGPPGTGKSTMIAAMANFLEYDVYDLELTTVKDNTHLRRLLIETSAKSIIVIEDIDCSLNLTGQRKKKEEEEEDGDDKNTIEKKMMMKNEGENKESKVTLSGLLNFIDGLWSACGGERIIVFTTNFVDKLDPALIRKGRMDKHIEMSYCCFEAFKVLAKNYLDVEESEMFEEIKRLLEVEEIKMTPADVGENLLPKSEKEGGETCLKRLIEALKEEKEEAKKKVEEEEEEKQRKKEKVKEIEAEKEKKKKIEEEN

SEQ ID NO: 21171 - DNA, 1859 bp, Arabidopsis thaliana
  misc_feature (1)..(1859): Ceres Seq. ID no. 13646168
  misc_feature: MA Experiment ID: 108434 Result: Up-regulated in Transcription
  misc_feature: MA Experiment 108434 PARAMETER Experiment Name: At_Root_Tips_cDNA_P Parameter: Tissue Value: Root Tips
  misc_feature: MA Experiment ID: 108462 Result: Down-regulated in Transcription
  misc_feature: MA Experiment 108462 PARAMETER Experiment Name: At_Germinating_Seeds_cDNA_P Parameter: Age (day) Value: 2 vs. 0
  misc_feature: MA Experiment 108462 PARAMETER Experiment Name: At_Germinating_Seeds_cDNA_P Parameter: Tissue Value: Germinating Seeds
  misc_feature: MA Experiment ID: 108463 Result: Down-regulated in Transcription
  misc_feature: MA Experiment 108463 PARAMETER Experiment Name: At_Germinating_Seeds_cDNA_P Parameter: Age (day) Value: 3 vs. 0
  misc_feature: MA Experiment 108463 PARAMETER Experiment Name: At_Germinating_Seeds_cDNA_P Parameter: Tissue Value: Germinating Seeds
  misc_feature: MA Experiment ID: 108573 Result: Down-regulated in Transcription
  misc_feature: MA Experiment 108573 PARAMETER Experiment Name: At_Drought_cDNA_P Parameter: Timepoint (hr) Value: 6
  misc_feature: MA Experiment 108573 PARAMETER Experiment Name: At_Drought_cDNA_P Parameter: Tissue Value: Aerial
  misc_feature: MA Experiment 108573 PARAMETER Experiment Name: At_Drought_cDNA_P Parameter: Treatment Value: Drought vs. No Drought
  misc_feature: MA Experiment ID: 20001905 Result: Down-regulated in Transcription
  misc_feature: MA Experiment 20001905 PARAMETER Experiment Name: At_Drought_Reproduction_P Parameter: Age (day) Value: 40
  misc_feature: MA Experiment 20001905 PARAMETER Experiment Name: At_Drought_Reproduction_P Parameter: Organism Value: A. thaliana
  misc_feature: MA Experiment 20001905 PARAMETER Experiment Name: At_Drought_Reproduction_P Parameter: Plant Line Value: WS
  misc_feature: MA Experiment 20001905 PARAMETER Experiment Name: At_Drought_Reproduction_P Parameter: Timepoint (day) Value: 10
  misc_feature: MA Experiment 20001905 PARAMETER Experiment Name: At_Drought_Reproduction_P Parameter: Tissue Value: Rosettes
  misc_feature: MA Experiment 20001905 PARAMETER Experiment Name: At_Drought_Reproduction_P Parameter: Treatment Value: Drought vs. No Drought
atagtcaacaagagaacaaagccacagagagagagagacactaaaaccctaatctcttactcactgtctctcttcttcaatccatgtcttcaacacaagaagcgtctgttactgatttgcccgtgaagagacctagagaagcagaggaggacaataacggcggcgccatggaaacagagaacggtggaggagagataaaggagccttcttgtatgtcctctattattcctggatggttctctgagattagtcctatgtggccaggagaagcacattctctcaaggtagagaagattctattccaagggaaatcagattaccaggatgttattgttttccagtctgcaacatatggaaaggttttggttttggatggagtgattcaactcactgagagagatgaatgtgcgtatcaagaaatgatcactcatcttcctttgtgctctatctccaaccccaaaaaggtactggtgattggaggaggagatggaggagtcctgagggaagtggcacgtcatagttctgttgagcagattgacatttgtgaaatagataaaatggtggttgatgtggctaagcagtatttccctaatgtagcagttgttttttttttttttttttcctaaaaccttccataatttataatccagaacgaaagatgttcaacatagaatccatgataactcaaattaaagagcttacaaaattcccaaatagaaatgcagtttttaaaagataagagagaaagagaaggatcgatctaccgctacaacagatcaagcttcaactccttctttctggtaaacgtaggtgagtccacacttaccacagtaatggcgatcaaaatgactcgccatgaaagtcccagctccacaggttgcgttagggcactccttcctcaaacgctgaacctttccagatccatcgattttgtaaaactgaagaacagcgagcttaaccttcttatgcttgtgcttgatcttcttcggcttggtgtaagtcttcttcttcctcttcttagcaccaccacggagacggaggacgagatgaagcgtcgattccttctggatgttgtagtcggcgagggtacggccgtcttcaagctgtttcccggcgaaaatcaatcgctgctggtccggtgggattccttccttgtcttggatcttcgccttcacattgtcgatggtgtcggatgattcaacctcaagggttatggtcttccacgttagggttttcacgaagaacgctgctgaaggaacctatgatgcagttattgttgattcatctgatccaatcggtccagcaaaagagctatttgagaaacctttctttgagtcagtgaatagagctcttcgtcctggtggagttgtgtgcacacaagctaaaagcttgtggcttcacatggatatcattgaagacattgtttctaattgccgtgacatctttaaaggatctgttaactacgcttggaccagtgttccaacttacccgagtggagtcattggattcatgctttgttcatctgaaggaccacaagtcgatttcaagaagccagtgagtctaatcgatactgatgaaagctctatcaaatcacactgtcccttgaagtattacaacgctgagattcactcagctgctttctgcttgccctcttttgctaagaaggtgattgattcgaaagccaactagaaaagagaagagaaatcatttgctttagagaaacttcatgtggaagtgataatatgatgatacaatgatcctttggaaaaaaataaagaagttttaatttttagaatgtaatgttctttcacctgcaatgttatgtgactgcactgagctatcaatctctttttataagc

SEQ ID NO: 21172 - protein, 180 aa, Arabidopsis thaliana
  peptide (1)..(180): Ceres Seq. ID no. 13646169
  misc_feature (50)..(173): Pfam Name: Spermine/spermidine synthase Pfam Description: Spermine/spermidine synthase
  misc_feature (50)..(173): Pfam Name: Spermine/spermidine synthase Pfam Description: Spermine/spermidine synthase
  misc_feature (1)..(173): Homolog of NCBI NO: 23495352 NR Description: spermidine synthase [Malus x domestica]
  misc_feature (40)..(173): Homolog of NCBI NO: 6094330 NR Description: Spermidine synthase 2 (Putrescine
  misc_feature (39)..(173): Homolog of NCBI NO: 6094327 NR Description: Spermidine synthase 1 (Putrescine
  misc_feature (10)..(175): Homolog of NCBI NO: 12229958 NR Description: Spermidine synthase 1 (Putrescine
  misc_feature (10)..(173): Homolog of NCBI NO: 15150055 NR Description: spermidine synthase [Solanum tuberosum]
  misc_feature (39)..(173): Homolog of NCBI NO: 6094327 NR Description: Spermidine synthase 1 (Putrescine
  misc_feature (10)..(173): Homolog of NCBI NO: 15150055 NR Description: spermidine synthase [Solanum tuberosum]
  misc_feature (11)..(173): Homolog of NCBI NO: 23495354 NR Description: spermidine synthase [Malus x domestica]
  misc_feature (40)..(173): Homolog of NCBI NO: 6094330 NR Description: Spermidine synthase 2 (Putrescine
  misc_feature (1)..(173): Homolog of NCBI NO: 23495352 NR Description: spermidine synthase [Malus x domestica]
  misc_feature (1)..(173): Homolog of NCBI NO: 15223115 NR Description: spermidine synthase -related [Arabidopsis
  misc_feature (51)..(173): Homolog of NCBI NO: 2821961 NR Description: spermidine synthase [Arabidopsis thaliana]
  misc_feature (5)..(173): Homolog of NCBI NO: 15220885 NR Description: spermidine synthase -related [Arabidopsis
  misc_feature (10)..(173): Homolog of NCBI NO: 12230013 NR Description: Spermidine synthase (Putrescine
  misc_feature (10)..(175): Homolog of NCBI NO: 12229958 NR Description: Spermidine synthase 1 (Putrescine
  misc_feature (10)..(173): Homolog of NCBI NO: 12230013 NR Description: Spermidine synthase (Putrescine
  misc_feature (11)..(173): Homolog of NCBI NO: 23495354 NR Description: spermidine synthase [Malus x domestica]
  misc_feature (5)..(173): Homolog of NCBI NO: 15220885 NR Description: spermidine synthase -related [Arabidopsis
  misc_feature (51)..(173): Homolog of NCBI NO: 2821961 NR Description: spermidine synthase [Arabidopsis thaliana]
  misc_feature (1)..(173): Homolog of NCBI NO: 15223115 NR Description: spermidine synthase -related [Arabidopsis
MSSTQEASVTDLPVKRPREAEEDNNGGAMETENGGGEIKEPSCMSSIIPGWFSEISPMWPGEAHSLKVEKILFQGKSDYQDVIVFQSATYGKVLVLDGVIQLTERDECAYQEMITHLPLCSISNPKKVLVIGGGDGGVLREVARHSSVEQIDICEIDKMVVDVAKQYFPNVAVVFFFFFS

SEQ ID NO: 21173 - protein, 168 aa, Arabidopsis thaliana
  peptide (1)..(168): Ceres Seq. ID no. 13646170
  misc_feature (18)..(123): Pfam Name: Spermine/spermidine synthase Pfam Description: Spermine/spermidine synthase
  misc_feature (18)..(123): Pfam Name: Spermine/spermidine synthase Pfam Description: Spermine/spermidine synthase
  misc_feature (18)..(167): Homolog of NCBI NO: 23495352 NR Description: spermidine synthase [Malus x domestica]
  misc_feature (18)..(167): Homolog of NCBI NO: 6094330 NR Description: Spermidine synthase 2 (Putrescine
  misc_feature (18)..(166): Homolog of NCBI NO: 6094327 NR Description: Spermidine synthase 1 (Putrescine
  misc_feature (18)..(168): Homolog of NCBI NO: 12229958 NR Description: Spermidine synthase 1 (Putrescine
  misc_feature (18)..(166): Homolog of NCBI NO: 15150055 NR Description: spermidine synthase [Solanum tuberosum]
  misc_feature (18)..(167): Homolog of NCBI NO: 23495352 NR Description: spermidine synthase [Malus x domestica]
  misc_feature (18)..(166): Homolog of NCBI NO: 6094327 NR Description: Spermidine synthase 1 (Putrescine
  misc_feature (18)..(166): Homolog of NCBI NO: 15150055 NR Description: spermidine synthase [Solanum tuberosum]
  misc_feature (18)..(168): Homolog of NCBI NO: 15223115 NR Description: spermidine synthase -related [Arabidopsis
  misc_feature (18)..(168): Homolog of NCBI NO: 2821961 NR Description: spermidine synthase [Arabidopsis thaliana]
  misc_feature (18)..(168): Homolog of NCBI NO: 15220885 NR Description: spermidine synthase -related [Arabidopsis
  misc_feature (18)..(167): Homolog of NCBI NO: 23495354 NR Description: spermidine synthase [Malus x domestica]
  misc_feature (18)..(166): Homolog of NCBI NO: 12230013 NR Description: Spermidine synthase (Putrescine
  misc_feature (18)..(168): Homolog of NCBI NO: 12229958 NR Description: Spermidine synthase 1 (Putrescine
  misc_feature (18)..(167): Homolog of NCBI NO: 6094330 NR Description: Spermidine synthase 2 (Putrescine
  misc_feature (18)..(166): Homolog of NCBI NO: 12230013 NR Description: Spermidine synthase (Putrescine
  misc_feature (18)..(167): Homolog of NCBI NO: 23495354 NR Description: spermidine synthase [Malus x domestica]
  misc_feature (18)..(168): Homolog of NCBI NO: 15220885 NR Description: spermidine synthase -related [Arabidopsis
  misc_feature (18)..(168): Homolog of NCBI NO: 2821961 NR Description: spermidine synthase [Arabidopsis thaliana]
  misc_feature (18)..(168): Homolog of NCBI NO: 15223115 NR Description: spermidine synthase -related [Arabidopsis
MVSDDSTSRVMVFHVRVFTKNAAEGTYDAVIVDSSDPIGPAKELFEKPFFESVNRALRPGGVVCTQAKSLWLHMDIIEDIVSNCRDIFKGSVNYAWTSVPTYPSGVIGFMLCSSEGPQVDFKKPVSLIDTDESSIKSHCPLKYYNAEIHSAAFCLPSFAKKVIDSKAN

SEQ ID NO: 21174 - protein, 158 aa, Arabidopsis thaliana
  peptide (1)..(158): Ceres Seq. ID no. 13646171
  misc_feature (8)..(113): Pfam Name: Spermine/spermidine synthase Pfam Description: Spermine/spermidine synthase
  misc_feature (8)..(113): Pfam Name: Spermine/spermidine synthase Pfam Description: Spermine/spermidine synthase
  misc_feature (8)..(157): Homolog of NCBI NO: 23495352 NR Description: spermidine synthase [Malus x domestica]
  misc_feature (8)..(157): Homolog of NCBI NO: 6094330 NR Description: Spermidine synthase 2 (Putrescine
  misc_feature (8)..(156): Homolog of NCBI NO: 6094327 NR Description: Spermidine synthase 1 (Putrescine
  misc_feature (8)..(158): Homolog of NCBI NO: 12229958 NR Description: Spermidine synthase 1 (Putrescine
  misc_feature (8)..(156): Homolog of NCBI NO: 15150055 NR Description: spermidine synthase [Solanum tuberosum]
  misc_feature (8)..(157): Homolog of NCBI NO: 23495352 NR Description: spermidine synthase [Malus x domestica]
  misc_feature (8)..(156): Homolog of NCBI NO: 6094327 NR Description: Spermidine synthase 1 (Putrescine
  misc_feature (8)..(156): Homolog of NCBI NO: 15150055 NR Description: spermidine synthase [Solanum tuberosum]
  misc_feature (8)..(158): Homolog of NCBI NO: 15223115 NR Description: spermidine synthase -related [Arabidopsis
  misc_feature (8)..(158): Homolog of NCBI NO: 2821961 NR Description: spermidine synthase [Arabidopsis thaliana]
  misc_feature (8)..(158): Homolog of NCBI NO: 15220885 NR Description: spermidine synthase -related [Arabidopsis
  misc_feature (8)..(157): Homolog of NCBI NO: 23495354 NR Description: spermidine synthase [Malus x domestica]
  misc_feature (8)..(156): Homolog of NCBI NO: 12230013 NR Description: Spermidine synthase (Putrescine
  misc_feature (8)..(158): Homolog of NCBI NO: 12229958 NR Description: Spermidine synthase 1 (Putrescine
  misc_feature (8)..(157): Homolog of NCBI NO: 6094330 NR Description: Spermidine synthase 2 (Putrescine
  misc_feature (8)..(156): Homolog of NCBI NO: 12230013 NR Description: Spermidine synthase (Putrescine
  misc_feature (8)..(157): Homolog of NCBI NO: 23495354 NR Description: spermidine synthase [Malus x domestica]
  misc_feature (8)..(158): Homolog of NCBI NO: 15220885 NR Description: spermidine synthase -related [Arabidopsis
  misc_feature (8)..(158): Homolog of NCBI NO: 2821961 NR Description: spermidine synthase [Arabidopsis thaliana]
  misc_feature (8)..(158): Homolog of NCBI NO: 15223115 NR Description: spermidine synthase -related [Arabidopsis
MVFHVRVFTKNAAEGTYDAVIVDSSDPIGPAKELFEKPFFESVNRALRPGGVVCTQAKSLWLHMDIIEDIVSNCRDIFKGSVNYAWTSVPTYPSGVIGFMLCSSEGPQVDFKKPVSLIDTDESSIKSHCPLKYYNAEIHSAAFCLPSFAKKVIDSKAN

SEQ ID NO: 21175 - DNA, 835 bp, Arabidopsis thaliana
  misc_feature (1)..(835): Ceres Seq. ID no. 13509143
  misc_feature: MA Experiment ID: 20000180 Result: Down-regulated in Transcription
  misc_feature: MA Experiment 20000180 PARAMETER Experiment Name: At_Germinating_Seeds_P Parameter: Age (hr) Value: 24 vs. 0
  misc_feature: MA Experiment 20000180 PARAMETER Experiment Name: At_Germinating_Seeds_P Parameter: Tissue Value: Germinating Seeds
  misc_feature: MA Experiment ID: 20000794 Result: Down-regulated in Transcription
  misc_feature: MA Experiment 20000794 PARAMETER Experiment Name: At_Petals_P Parameter: Age (day) Value: 23-25 days
  misc_feature: MA Experiment 20000794 PARAMETER Experiment Name: At_Petals_P Parameter: Plant Line Value: WS
  misc_feature: MA Experiment 20000794 PARAMETER Experiment Name: At_Petals_P Parameter: Tissue Value: Petals vs. Whole plant
ctctaaattcacagctcatcgaaaatgggctcacggcaaggaccaccgaagcatcagaacaaattcgcctgggttcccaaagccggcgtcaagatcaacgaaacggaagtcggcgggagatttagaccattatccgagattaccggagtttgctaccgatgtcgagagcagatcgcctggaaacgcaaatacggcaaatacaaaaccctaactgaagccaccaaatgtcagaagtgtacaaagcgaaatgttcgtcaagcataccataagttatgccctggttgtgccaaggagcaaaaggtgtgtgcaaagtgttgtcaaagtgttgatcaaatccttggaagagatatttacgaagtagaggctgaacagaagctgcttgatgagactatcaagaatgctagggaaagagatcgaaggaccctattacgtgctatgaacaaagataacaaaccaaataaatcagatgaagaagcgtcaaggagtgatagcagcaaggttggtgatgtgtttccctcaacttcccttgaagaatatgcaaacaagtccggaagagttagcgggattattggtcatggtagtgtgcctgatcatgcccatgatgatgctagtggacctgaatcagatgaggatgacaatgttggtgatgatgagcatgatttgcgcgaagacagtgatgaaaatgagcaatctcaactgcagaaataaactcatgtttggttgtactactgtcaatttggtaggattgtgagattttgcaagactgtttattcctgttgttttgataaaacttttacttggtcacctgcaatgcaagactagcaaagaatactat

SEQ ID NO: 21176 - protein, 227 aa, Arabidopsis thaliana
  peptide (1)..(227): Ceres Seq. ID no. 13509144
  misc_feature (1)..(156): Homolog of NCBI NO: 34869598 NR Description: similar to RIKEN cDNA 1110059E24 [Rattus
  misc_feature (1)..(156): Homolog of NCBI NO: 13384816 NR Description: RIKEN cDNA 1110059E24 [Mus musculus]
  misc_feature (1)..(156): Homolog of NCBI NO: 34862080 NR Description: similar to RIKEN cDNA 1110059E24 [Rattus
  misc_feature (1)..(105): Homolog of NCBI NO: 16552651 NR Description: unnamed protein product [Homo sapiens]
  misc_feature (1)..(224): Homolog of NCBI NO: 24642765 NR Description: CG8675-PA [Drosophila melanogaster]
  misc_feature (1)..(175): Homolog of NCBI NO: 34909774 NR Description: P0512C01.29 [Oryza sativa (japonica
  misc_feature (1)..(227): Homolog of NCBI NO: 26453098 NR Description: unknown protein [Arabidopsis thaliana]
  misc_feature (1)..(227): Homolog of NCBI NO: 15232864 NR Description: expressed protein [Arabidopsis thaliana]
MGSRQGPPKHQNKFAWVPKAGVKINETEVGGRFRPLSEITGVCYRCREQIAWKRKYGKYKTLTEATKCQKCTKRNVRQAYHKLCPGCAKEQKVCAKCCQSVDQILGRDIYEVEAEQKLLDETIKNARERDRRTLLRAMNKDNKPNKSDEEASRSDSSKVGDVFPSTSLEEYANKSGRVSGIIGHGSVPDHAHDDASGPESDEDDNVGDDEHDLREDSDENEQSQLQK

SEQ ID NO: 21177 - DNA, 716 bp, Arabidopsis thaliana
  misc_feature (1)..(716): Ceres Seq. ID no. 12393247
  misc_feature: MA Experiment ID: 108434 Result: Down-regulated in Transcription
  misc_feature: MA Experiment 108434 PARAMETER Experiment Name: At_Root_Tips_cDNA_P Parameter: Tissue Value: Root Tips
  misc_feature: MA Experiment ID: 108595 Result: Up-regulated in Transcription
  misc_feature: MA Experiment 108595 PARAMETER Experiment Name: At_Ler-pi_Ovule_cDNA_P Parameter: Plant Line Value: null
  misc_feature: MA Experiment ID: 20000224 Result: Down-regulated in Transcription
  misc_feature: MA Experiment ID: 20001905 Result: Up-regulated in Transcription
  misc_feature: MA Experiment 20001905 PARAMETER Experiment Name: At_Drought_Reproduction_P Parameter: Age (day) Value: 40
  misc_feature: MA Experiment 20001905 PARAMETER Experiment Name: At_Drought_Reproduction_P Parameter: Organism Value: A. thaliana
  misc_feature: MA Experiment 20001905 PARAMETER Experiment Name: At_Drought_Reproduction_P Parameter: Plant Line Value: WS
  misc_feature: MA Experiment 20001905 PARAMETER Experiment Name: At_Drought_Reproduction_P Parameter: Timepoint (day) Value: 10
  misc_feature: MA Experiment 20001905 PARAMETER Experiment Name: At_Drought_Reproduction_P Parameter: Tissue Value: Rosettes
  misc_feature: MA Experiment 20001905 PARAMETER Experiment Name: At_Drought_Reproduction_P Parameter: Treatment Value: Drought vs. No Drought
  misc_feature: MA Experiment ID: 20001910 Result: Up-regulated in Transcription
  misc_feature: MA Experiment 20001910 PARAMETER Experiment Name: At_Drought_Reproduction_P Parameter: Age (day) Value: 37
  misc_feature: MA Experiment 20001910 PARAMETER Experiment Name: At_Drought_Reproduction_P Parameter: Organism Value: A. thaliana
  misc_feature: MA Experiment 20001910 PARAMETER Experiment Name: At_Drought_Reproduction_P Parameter: Plant Line Value: WS
  misc_feature: MA Experiment 20001910 PARAMETER Experiment Name: At_Drought_Reproduction_P Parameter: Timepoint (day) Value: 7
  misc_feature: MA Experiment 20001910 PARAMETER Experiment Name: At_Drought_Reproduction_P Parameter: Tissue Value: Flowers
  misc_feature: MA Experiment 20001910 PARAMETER Experiment Name: At_Drought_Reproduction_P Parameter: Treatment Value: Drought vs. No Drought
aaacaacgtttcgtcttctcagattctttacctttcttaaggaaaaaccccaaaagagagaagataaaaatctcgcattcagattttagggtttctgacaaattctccgacgaaattcaagatccgaatctcggcaatgtcgacaatctcgccgtcattagccgtaattgcgtttctttttctgattcttctgaatctatcttcggttttcgctgatccttcgacggaaggaggagagattattaggttaccttcggagaagatcaacggtgaaaaaaacagaggcgaattctgtgaaggaattgctaaaccggcttcgtgtccggttcagtgtttcaggcctgatccggtttgcggtgaagacagcgttacttactggtgcggttgtgcagatgctttgtgccatggtgttcgtgttgtgaaacaaggagcttgtgatgttggtaatggtgttggtttgtctgttcctggacaagctctgcttttgatacacattgtctggatgatgcttcttgggttttctattctctttgggctcttttgattttggttctaatttctctgaatcaaaacaacatatagaagattgtttaggttttcagattgcaaatgacgaatcttttttgtttatactcttctttttttctttatattgctctgtattcatattacattaaaactatgaggaaatattattattatttggtttgttgcgc

SEQ ID NO: 21178 - protein, 135 aa, Arabidopsis thaliana
  peptide (1)..(135): Ceres Seq. ID no. 12393248
  misc_feature (53)..(100): Pfam Name: Kazal-type serine protease inhibitor domain Pfam Description: Kazal-type serine protease inhibitor domain
  misc_feature (9)..(133): Homolog of NCBI NO: 34909170 NR Description: P0468B07.28 [Oryza sativa (japonica
  misc_feature (6)..(135): Homolog of NCBI NO: 21554106 NR Description: unknown [Arabidopsis thaliana]
  misc_feature (6)..(135): Homolog of NCBI NO: 18412211 NR Description: expressed protein
  misc_feature (1)..(135): Homolog of NCBI NO: 21555759 NR Description: unknown [Arabidopsis thaliana]
  misc_feature (1)..(135): Homolog of NCBI NO: 18411677 NR Description: Expressed protein
MSTISPSLAVIAFLFLILLNLSSVFADPSTEGGEIIRLPSEKINGEKNRGEFCEGIAKPASCPVQCFRPDPVCGEDSVTYWCGCADALCHGVRVVKQGACDVGNGVGLSVPGQALLLIHIVWMMLLGFSILFGLF

SEQ ID NO: 21179 - protein, 71 aa, Arabidopsis thaliana
  peptide (1)..(71): Ceres Seq. ID no. 12393249
KQRFVFSDSLPFLRKNPKREKIKISHSDFRVSDKFSDEIQDPNLGNVDNLAVISRNCVSFSDSSESIFGFR

SEQ ID NO: 21180 - DNA, 668 bp, Arabidopsis thaliana
  misc_feature (1)..(668): Ceres Seq. ID no. 12482739
  misc_feature: MA Experiment ID: 108434 Result: Down-regulated in Transcription
  misc_feature: MA Experiment 108434 PARAMETER Experiment Name: At_Root_Tips_cDNA_P Parameter: Tissue Value: Root Tips
  misc_feature: MA Experiment ID: 108595 Result: Down-regulated in Transcription
  misc_feature: MA Experiment 108595 PARAMETER Experiment Name: At_Ler-pi_Ovule_cDNA_P Parameter: Plant Line Value: null
  misc_feature: MA Experiment ID: 108668 Result: Up-regulated in Transcription
  misc_feature: MA Experiment 108668 PARAMETER Experiment Name: At_2mM_SA_cDNA_P Parameter: Plant Line Value: WS
  misc_feature: MA Experiment 108668 PARAMETER Experiment Name: At_2mM_SA_cDNA_P Parameter: Timepoint (hr) Value: 6
  misc_feature: MA Experiment 108668 PARAMETER Experiment Name: At_2mM_SA_cDNA_P Parameter: Treatment Value: 2mM SA vs. No Treatment
  misc_feature: MA Experiment ID: 20000090 Result: Up-regulated in Transcription
  misc_feature: MA Experiment ID: 20000111 Result: Down-regulated in Transcription
  misc_feature: MA Experiment 20000111 PARAMETER Experiment Name: At_42deg_Heat_cDNA_P Parameter: Temperature (deg C) Value: 42 vs. 22
  misc_feature: MA Experiment 20000111 PARAMETER Experiment Name: At_42deg_Heat_cDNA_P Parameter: Timepoint (hr) Value: 6
  misc_feature: MA Experiment 20000111 PARAMETER Experiment Name: At_42deg_Heat_cDNA_P Parameter: Tissue Value: Aerial
  misc_feature: MA Experiment ID: 20000113 Result: Down-regulated in Transcription
  misc_feature: MA Experiment 20000113 PARAMETER Experiment Name: At_42deg_Heat_cDNA_P Parameter: Temperature (deg C) Value: 42 vs. 22
  misc_feature: MA Experiment 20000113 PARAMETER Experiment Name: At_42deg_Heat_cDNA_P Parameter: Timepoint (hr) Value: 8
  misc_feature: MA Experiment 20000113 PARAMETER Experiment Name: At_42deg_Heat_cDNA_P Parameter: Tissue Value: Aerial
  misc_feature: MA Experiment ID: 20000180 Result: Up-regulated in Transcription
  misc_feature: MA Experiment 20000180 PARAMETER Experiment Name: At_Germinating_Seeds_P Parameter: Age (hr) Value: 24 vs. 0
  misc_feature: MA Experiment 20000180 PARAMETER Experiment Name: At_Germinating_Seeds_P Parameter: Tissue Value: Germinating Seeds
  misc_feature: MA Experiment ID: 20000182 Result: Up-regulated in Transcription
  misc_feature: MA Experiment 20000182 PARAMETER Experiment Name: At_2mM_SA_P Parameter: Age (day) Value: 14
  misc_feature: MA Experiment 20000182 PARAMETER Experiment Name: At_2mM_SA_P Parameter: Organism Value: A. thaliana
  misc_feature: MA Experiment 20000182 PARAMETER Experiment Name: At_2mM_SA_P Parameter: Plant Line Value: WS
  misc_feature: MA Experiment 20000182 PARAMETER Experiment Name: At_2mM_SA_P Parameter: Timepoint (hr) Value: 6
  misc_feature: MA Experiment 20000182 PARAMETER Experiment Name: At_2mM_SA_P Parameter: Tissue Value: Aerial
  misc_feature: MA Experiment 20000182 PARAMETER Experiment Name: At_2mM_SA_P Parameter: Treatment Value: 2mM SA vs. No Treatment
  misc_feature: MA Experiment ID: 20000234 Result: Down-regulated in Transcription
  misc_feature: MA Experiment 20000234 PARAMETER Experiment Name: At_Siliques_P Parameter: Age (day) Value: 21
  misc_feature: MA Experiment 20000234 PARAMETER Experiment Name: At_Siliques_P Parameter: Organism Value: A. thaliana
  misc_feature: MA Experiment 20000234 PARAMETER Experiment Name: At_Siliques_P Parameter: Plant Line Value: WS
  misc_feature: MA Experiment 20000234 PARAMETER Experiment Name: At_Siliques_P Parameter: Tissue Value: Less Than 5mm Siliques vs. Whole Plant
  misc_feature: MA Experiment ID: 20000235 Result: Down-regulated in Transcription
  misc_feature: MA Experiment 20000235 PARAMETER Experiment Name: At_Siliques_P Parameter: Age (day) Value: 21
  misc_feature: MA Experiment 20000235 PARAMETER Experiment Name: At_Siliques_P Parameter: Organism Value: A. thaliana
  misc_feature: MA Experiment 20000235 PARAMETER Experiment Name: At_Siliques_P Parameter: Plant Line Value: WS
  misc_feature: MA Experiment 20000235 PARAMETER Experiment Name: At_Siliques_P Parameter: Tissue Value: 5-10mm Siliques vs. Whole Plant
  misc_feature: MA Experiment ID: 20000286 Result: Down-regulated in Transcription
  misc_feature: MA Experiment 20000286 PARAMETER Experiment Name: At_Open_Flower_P Parameter: Age (day) Value: 21
  misc_feature: MA Experiment 20000286 PARAMETER Experiment Name: At_Open_Flower_P Parameter: Plant Line Value: WS
  misc_feature: MA Experiment 20000286 PARAMETER Experiment Name: At_Open_Flower_P Parameter: Tissue Value: Half Open vs. Whole Plant
  misc_feature: MA Experiment ID: 20001905 Result: Down-regulated in Transcription
  misc_feature: MA Experiment 20001905 PARAMETER Experiment Name: At_Drought_Reproduction_P Parameter: Age (day) Value: 40
  misc_feature: MA Experiment 20001905 PARAMETER Experiment Name: At_Drought_Reproduction_P Parameter: Organism Value: A. thaliana
  misc_feature: MA Experiment 20001905 PARAMETER Experiment Name: At_Drought_Reproduction_P Parameter: Plant Line Value: WS
  misc_feature: MA Experiment 20001905 PARAMETER Experiment Name: At_Drought_Reproduction_P Parameter: Timepoint (day) Value: 10
  misc_feature: MA Experiment 20001905 PARAMETER Experiment Name: At_Drought_Reproduction_P Parameter: Tissue Value: Rosettes
  misc_feature: MA Experiment 20001905 PARAMETER Experiment Name: At_Drought_Reproduction_P Parameter: Treatment Value: Drought vs. No Drought
acgcacacagagttttctcttcttcgtcctagtttcttctattccaggtgagaagaaaaaatggcgtttgtgaccactgcggaagtgtgtgacgcgaatcaagagatgattcgaagtggccagctccgagctctgcaacccgtttttcagatttatggtcgtcgtcaaatattttcaggtccagtagttactgttaaagtctttgaagacaatggcttaatccgtcacttcctcgaagagaaaggcaatggtagagttcttgtggtggatggtggagggagtttacgctgtgcgatactaggaggaaacccggtcgtacaagcgcagaacaacggatgggcagggatcatagtgaatggatgcatcagagacgttgatgagatcaatggttgcgacattggagtgagagctttagcttctcatccaataaaggctagtaagaaaggacttggtgaacaaagagtctctttgaacattgcaggcactcggatatgcgatggcgaatggctttatgcagatactgatggtatccttgtttctcagattgaattatccgtttaaaaggacacaagtgatgttgttgatttgttaaaatctgtaagctactacttttgtgctttgtgtttctgtaatggctatcagagtaaaagttggcttctttgaatatg

SEQ ID NO: 21181 - protein, 166 aa, Arabidopsis thaliana
  peptide (1)..(166): Ceres Seq. ID no. 12482740
  misc_feature (2)..(159): Pfam Name: Demethylmenaquinone methyltransferase Pfam Description: Demethylmenaquinone methyltransferase
  misc_feature (1)..(160): Homolog of NCBI NO: 15596969 NR Description: probable methyltransferase [Pseudomonas
  misc_feature (1)..(160): Homolog of NCBI NO: 34497095 NR Description: S-adenosylmethionine:2-demethylmenaquinone
  misc_feature (1)..(164): Homolog of NCBI NO: 22982141 NR Description: hypothetical protein [Burkholderia fungorum]
  misc_feature (6)..(164): Homolog of NCBI NO: 22978085 NR Description: hypothetical protein [Ralstonia metallidurans]
  misc_feature (4)..(164): Homolog of NCBI NO: 17546073 NR Description: PROBABLE
  misc_feature (1)..(166): Homolog of NCBI NO: 15241161 NR Description: expressed protein; protein id: At5g56260.1
  misc_feature (4)..(166): Homolog of NCBI NO: 34910724 NR Description: S-adenosylmethionine:2-demethylmenaquinone
  misc_feature (1)..(166): Homolog of NCBI NO: 21537415 NR Description: S-adenosylmethionine:2-demethylmenaquinone
  misc_feature (1)..(166): Homolog of NCBI NO: 15237348 NR Description: expressed protein
  misc_feature (1)..(166): Homolog of NCBI NO: 15232963 NR Description: expressed protein
MAFVTTAEVCDANQEMIRSGQLRALQPVFQIYGRRQIFSGPVVTVKVFEDNGLIRHFLEEKGNGRVLVVDGGGSLRCAILGGNPVVQAQNNGWAGIIVNGCIRDVDEINGCDIGVRALASHPIKASKKGLGEQRVSLNIAGTRICDGEWLYADTDGILVSQIELSV

SEQ ID NO: 21182 - protein, 151 aa, Arabidopsis thaliana
  peptide (1)..(151): Ceres Seq. ID no. 12482741
  misc_feature (1)..(144): Pfam Name: Demethylmenaquinone methyltransferase Pfam Description: Demethylmenaquinone methyltransferase
  misc_feature (1)..(145): Homolog of NCBI NO: 15596969 NR Description: probable methyltransferase [Pseudomonas
  misc_feature (1)..(145): Homolog of NCBI NO: 34497095 NR Description: S-adenosylmethionine:2-demethylmenaquinone
  misc_feature (1)..(149): Homolog of NCBI NO: 22982141 NR Description: hypothetical protein [Burkholderia fungorum]
  misc_feature (1)..(149): Homolog of NCBI NO: 22978085 NR Description: hypothetical protein [Ralstonia metallidurans]
  misc_feature (1)..(149): Homolog of NCBI NO: 17546073 NR Description: PROBABLE
  misc_feature (1)..(151): Homolog of NCBI NO: 15241161 NR Description: expressed protein; protein id: At5g56260.1
  misc_feature (1)..(151): Homolog of NCBI NO: 34910724 NR Description: S-adenosylmethionine:2-demethylmenaquinone
  misc_feature (1)..(151): Homolog of NCBI NO: 21537415 NR Description: S-adenosylmethionine:2-demethylmenaquinone
  misc_feature (1)..(151): Homolog of NCBI NO: 15237348 NR Description: expressed protein
  misc_feature (1)..(151): Homolog of NCBI NO: 15232963 NR Description: expressed protein
MIRSGQLRALQPVFQIYGRRQIFSGPVVTVKVFEDNGLIRHFLEEKGNGRVLVVDGGGSLRCAILGGNPVVQAQNNGWAGIIVNGCIRDVDEINGCDIGVRALASHPIKASKKGLGEQRVSLNIAGTRICDGEWLYADTDGILVSQIELSV

SEQ ID NO: 21183 - DNA, 937 bp, Arabidopsis thaliana
  misc_feature (1)..(937): Ceres Seq. ID no. 12482820
  misc_feature: MA Experiment ID: 108433 Result: Up-regulated in Transcription
  misc_feature: MA Experiment 108433 PARAMETER Experiment Name: At_rhl_Mutant2_cDNA_P Parameter: Age (day) Value: 7
  misc_feature: MA Experiment 108433 PARAMETER Experiment Name: At_rhl_Mutant2_cDNA_P Parameter: Organism Value: A. thaliana
  misc_feature: MA Experiment 108433 PARAMETER Experiment Name: At_rhl_Mutant2_cDNA_P Parameter: Plant Line Value: rhl Mutant vs. wt landsburg
  misc_feature: MA Experiment 108433 PARAMETER Experiment Name: At_rhl_Mutant2_cDNA_P Parameter: Tissue Value: Roots
  misc_feature: MA Experiment ID: 108435 Result: Up-regulated in Transcription
  misc_feature: MA Experiment 108435 PARAMETER Experiment Name: At_stm_Mutants_cDNA_P Parameter: Plant Line Value: wt Landsburg vs stm
  misc_feature: MA Experiment 108435 PARAMETER Experiment Name: At_stm_Mutants_cDNA_P Parameter: Tissue Value: Shoot Apical Meristem Region
  misc_feature: MA Experiment ID: 108461 Result: Up-regulated in Transcription
  misc_feature: MA Experiment 108461 PARAMETER Experiment Name: At_Germinating_Seeds_cDNA_P Parameter: Age (day) Value: 1 vs. 0
  misc_feature: MA Experiment 108461 PARAMETER Experiment Name: At_Germinating_Seeds_cDNA_P Parameter: Tissue Value: Germinating Seeds
  misc_feature: MA Experiment ID: 108462 Result: Up-regulated in Transcription
  misc_feature: MA Experiment 108462 PARAMETER Experiment Name: At_Germinating_Seeds_cDNA_P Parameter: Age (day) Value: 2 vs. 0
  misc_feature: MA Experiment 108462 PARAMETER Experiment Name: At_Germinating_Seeds_cDNA_P Parameter: Tissue Value: Germinating Seeds
  misc_feature: MA Experiment ID: 108463 Result: Up-regulated in Transcription
  misc_feature: MA Experiment 108463 PARAMETER Experiment Name: At_Germinating_Seeds_cDNA_P Parameter: Age (day) Value: 3 vs. 0
  misc_feature: MA Experiment 108463 PARAMETER Experiment Name: At_Germinating_Seeds_cDNA_P Parameter: Tissue Value: Germinating Seeds
  misc_feature: MA Experiment ID: 108464 Result: Up-regulated in Transcription
  misc_feature: MA Experiment 108464 PARAMETER Experiment Name: At_Germinating_Seeds_cDNA_P Parameter: Age (day) Value: 4 vs. 0
  misc_feature: MA Experiment 108464 PARAMETER Experiment Name: At_Germinating_Seeds_cDNA_P Parameter: Tissue Value: Germinating Seeds
  misc_feature: MA Experiment ID: 20000088 Result: Down-regulated in Transcription
  misc_feature: MA Experiment 20000088 PARAMETER Experiment Name: At_100uM_ABA_Mutants_cDNA_P Parameter: Plant Line Value: Landsberg
  misc_feature: MA Experiment 20000088 PARAMETER Experiment Name: At_100uM_ABA_Mutants_cDNA_P Parameter: Timepoint (hr) Value: 6
  misc_feature: MA Experiment 20000088 PARAMETER Experiment Name: At_100uM_ABA_Mutants_cDNA_P Parameter: Tissue Value: Aerial
  misc_feature: MA Experiment 20000088 PARAMETER Experiment Name: At_100uM_ABA_Mutants_cDNA_P Parameter: Treatment Value: 100uM ABA vs. No Treatment
  misc_feature: MA Experiment ID: 20000111 Result: Up-regulated in Transcription
  misc_feature: MA Experiment 20000111 PARAMETER Experiment Name: At_42deg_Heat_cDNA_P Parameter: Temperature (deg C) Value: 42 vs. 22
  misc_feature: MA Experiment 20000111 PARAMETER Experiment Name: At_42deg_Heat_cDNA_P Parameter: Timepoint (hr) Value: 6
  misc_feature: MA Experiment 20000111 PARAMETER Experiment Name: At_42deg_Heat_cDNA_P Parameter: Tissue Value: Aerial
  misc_feature: MA Experiment ID: 20000113 Result: Up-regulated in Transcription
  misc_feature: MA Experiment 20000113 PARAMETER Experiment Name: At_42deg_Heat_cDNA_P Parameter: Temperature (deg C) Value: 42 vs. 22
  misc_feature: MA Experiment 20000113 PARAMETER Experiment Name: At_42deg_Heat_cDNA_P Parameter: Timepoint (hr) Value: 8
  misc_feature: MA Experiment 20000113 PARAMETER Experiment Name: At_42deg_Heat_cDNA_P Parameter: Tissue Value: Aerial
  misc_feature: MA Experiment ID: 20000184 Result: Up-regulated in Transcription
  misc_feature: MA Experiment 20000184 PARAMETER Experiment Name: At_Shoots__P Parameter: Age (day) Value: 7
  misc_feature: MA Experiment 20000184 PARAMETER Experiment Name: At_Shoots__P Parameter: Tissue Value: Shoots vs. Whole Plant
  misc_feature: MA Experiment ID: 20000185 Result: Up-regulated in Transcription
  misc_feature: MA Experiment 20000185 PARAMETER Experiment Name: At_Roots__P Parameter: Age (day) Value: 7 vs. 21
  misc_feature: MA Experiment 20000185 PARAMETER Experiment Name: At_Roots__P Parameter: Organism Value: A. thaliana
  misc_feature: MA Experiment 20000185 PARAMETER Experiment Name: At_Roots__P Parameter: Tissue Value: Roots vs. Whole Plant
  misc_feature: MA Experiment ID: 20000224 Result: Down-regulated in Transcription
  misc_feature: MA Experiment ID: 20000234 Result: Up-regulated in Transcription
  misc_feature: MA Experiment 20000234 PARAMETER Experiment Name: At_Siliques_P Parameter: Age (day) Value: 21
  misc_feature: MA Experiment 20000234 PARAMETER Experiment Name: At_Siliques_P Parameter: Organism Value: A. thaliana
  misc_feature: MA Experiment 20000234 PARAMETER Experiment Name: At_Siliques_P Parameter: Plant Line Value: WS
  misc_feature: MA Experiment 20000234 PARAMETER Experiment Name: At_Siliques_P Parameter: Tissue Value: Less Than 5mm Siliques vs. Whole Plant
  misc_feature: MA Experiment ID: 20000235 Result: Up-regulated in Transcription
  misc_feature: MA Experiment 20000235 PARAMETER Experiment Name: At_Siliques_P Parameter: Age (day) Value: 21
  misc_feature: MA Experiment 20000235 PARAMETER Experiment Name: At_Siliques_P Parameter: Organism Value: A. thaliana
  misc_feature: MA Experiment 20000235 PARAMETER Experiment Name: At_Siliques_P Parameter: Plant Line Value: WS
  misc_feature: MA Experiment 20000235 PARAMETER Experiment Name: At_Siliques_P Parameter: Tissue Value: 5-10mm Siliques vs. Whole Plant
  misc_feature: MA Experiment ID: 20000264 Result: Up-regulated in Transcription
  misc_feature: MA Experiment 20000264 PARAMETER Experiment Name: At_Open_Flower_P Parameter: Age (day) Value: 21
  misc_feature: MA Experiment 20000264 PARAMETER Experiment Name: At_Open_Flower_P Parameter: Plant Line Value: WS
  misc_feature: MA Experiment 20000264 PARAMETER Experiment Name: At_Open_Flower_P Parameter: Tissue Value: Open Flower vs. Whole Plant
  misc_feature: MA Experiment ID: 20000265 Result: Up-regulated in Transcription
  misc_feature: MA Experiment 20000265 PARAMETER Experiment Name: At_Open_Flower_P Parameter: Age (day) Value: 21
  misc_feature: MA Experiment 20000265 PARAMETER Experiment Name: At_Open_Flower_P Parameter: Plant Line Value: WS
  misc_feature: MA Experiment 20000265 PARAMETER Experiment Name: At_Open_Flower_P Parameter: Tissue Value: Closed Flower vs. Whole Plant
  misc_feature: MA Experiment ID: 20000286 Result: Up-regulated in Transcription
  misc_feature: MA Experiment 20000286 PARAMETER Experiment Name: At_Open_Flower_P Parameter: Age (day) Value: 21
  misc_feature: MA Experiment 20000286 PARAMETER Experiment Name: At_Open_Flower_P Parameter: Plant Line Value: WS
  misc_feature: MA Experiment 20000286 PARAMETER Experiment Name: At_Open_Flower_P Parameter: Tissue Value: Half Open vs. Whole Plant
  misc_feature: MA Experiment ID: 20000438 Result: Up-regulated in Transcription
  misc_feature: MA Experiment 20000438 PARAMETER Experiment Name: At_Shoots__P Parameter: Age (day) Value: 14
  misc_feature: MA Experiment 20000438 PARAMETER Experiment Name: At_Shoots__P Parameter: Tissue Value: Shoots vs. Whole Plant
  misc_feature: MA Experiment ID: 20000439 Result: Up-regulated in Transcription
  misc_feature: MA Experiment 20000439 PARAMETER Experiment Name: At_Roots__P Parameter: Age (day) Value: 14 vs. 21
  misc_feature: MA Experiment 20000439 PARAMETER Experiment Name: At_Roots__P Parameter: Organism Value: A. thaliana
  misc_feature: MA Experiment 20000439 PARAMETER Experiment Name: At_Roots__P Parameter: Tissue Value: Roots vs. Whole Plant
  misc_feature: MA Experiment ID: 20000441 Result: Up-regulated in Transcription
  misc_feature: MA Experiment 20000441 PARAMETER Experiment Name: At_1uM_BR-BRZ__P Parameter: Tissue Value: Shoot Apices
  misc_feature: MA Experiment 20000441 PARAMETER Experiment Name: At_1uM_BR-BRZ__P Parameter: Treatment Value: 1uM BR vs. No Treatment
  misc_feature: MA Experiment ID: 20000443 Result: Up-regulated in Transcription
  misc_feature: MA Experiment 20000443 PARAMETER Experiment Name: At_1uM_BR-BRZ__P Parameter: Tissue Value: Shoot Apices
  misc_feature: MA Experiment 20000443 PARAMETER Experiment Name: At_1uM_BR-BRZ__P Parameter: Treatment Value: 1uM BRZ vs. No Treatment
  misc_feature: MA Experiment ID: 20000460 Result: Down-regulated in Transcription
  misc_feature: MA Experiment 20000460 PARAMETER Experiment Name: At_10percent_PEG_P Parameter: Age (day) Value: 12
  misc_feature: MA Experiment 20000460 PARAMETER Experiment Name: At_10percent_PEG_P Parameter: Organism Value: A. thaliana
  misc_feature: MA Experiment 20000460 PARAMETER Experiment Name: At_10percent_PEG_P Parameter: Plant Line Value: WS
  misc_feature: MA Experiment 20000460 PARAMETER Experiment Name: At_10percent_PEG_P Parameter: Timepoint (day) Value: 12
  misc_feature: MA Experiment 20000460 PARAMETER Experiment Name: At_10percent_PEG_P Parameter: Tissue Value: Whole Plant
  misc_feature: MA Experiment 20000460 PARAMETER Experiment Name: At_10percent_PEG_P Parameter: Treatment Value: 10percent PEG vs. No Treatment
  misc_feature: MA Experiment ID: 20000527 Result: Down-regulated in Transcription
  misc_feature: MA Experiment 20000527 PARAMETER Experiment Name: At_10percent_PEG_P Parameter: Age (day) Value: 20
  misc_feature: MA Experiment 20000527 PARAMETER Experiment Name: At_10percent_PEG_P Parameter: Organism Value: A. thaliana
  misc_feature: MA Experiment 20000527 PARAMETER Experiment Name: At_10percent_PEG_P Parameter: Plant Line Value: WS
  misc_feature: MA Experiment 20000527 PARAMETER Experiment Name: At_10percent_PEG_P Parameter: Timepoint (day) Value: 20
  misc_feature: MA Experiment 20000527 PARAMETER Experiment Name: At_10percent_PEG_P Parameter: Tissue Value: Whole Plant
  misc_feature: MA Experiment 20000527 PARAMETER Experiment Name: At_10percent_PEG_P Parameter: Treatment Value: 10percent PEG vs. No Treatment
  misc_feature: MA Experiment ID: 20000573 Result: Down-regulated in Transcription
  misc_feature: MA Experiment 20000573 PARAMETER Experiment Name: At_100uM_ABA_Mutants__P Parameter: Organism Value: A. thaliana
  misc_feature: MA Experiment 20000573 PARAMETER Experiment Name: At_100uM_ABA_Mutants__P Parameter: Plant Line Value: CS22 vs. Ler wt
  misc_feature: MA Experiment 20000573 PARAMETER Experiment Name: At_100uM_ABA_Mutants__P Parameter: Timepoint (hr) Value: N/A
  misc_feature: MA Experiment 20000573 PARAMETER Experiment Name: At_100uM_ABA_Mutants__P Parameter: Tissue Value: Whole Plant
  misc_feature: MA Experiment 20000573 PARAMETER Experiment Name: At_100uM_ABA_Mutants__P Parameter: Treatment Value: None
  misc_feature: MA Experiment ID: 20000574 Result: Down-regulated in Transcription
  misc_feature: MA Experiment 20000574 PARAMETER Experiment Name: At_100uM_ABA_Mutants__P Parameter: Organism Value: A. thaliana
  misc_feature: MA Experiment 20000574 PARAMETER Experiment Name: At_100uM_ABA_Mutants__P Parameter: Plant Line Value: CS23 vs. Ler wt
  misc_feature: MA Experiment 20000574 PARAMETER Experiment Name: At_100uM_ABA_Mutants__P Parameter: Timepoint (hr) Value: N/A
  misc_feature: MA Experiment 20000574 PARAMETER Experiment Name: At_100uM_ABA_Mutants__P Parameter: Tissue Value: Whole Plant
  misc_feature: MA Experiment 20000574 PARAMETER Experiment Name: At_100uM_ABA_Mutants__P Parameter: Treatment Value: None
  misc_feature: MA Experiment ID: 20000576 Result: Down-regulated in Transcription
  misc_feature: MA Experiment 20000576 PARAMETER Experiment Name: At_100uM_ABA_Mutants__P Parameter: Organism Value: A. thaliana
  misc_feature: MA Experiment 20000576 PARAMETER Experiment Name: At_100uM_ABA_Mutants__P Parameter: Plant Line Value: CS23
  misc_feature: MA Experiment 20000576 PARAMETER Experiment Name: At_100uM_ABA_Mutants__P Parameter: Timepoint (hr) Value: 6
  misc_feature: MA Experiment 20000576 PARAMETER Experiment Name: At_100uM_ABA_Mutants__P Parameter: Tissue Value: Whole Plant
  misc_feature: MA Experiment 20000576 PARAMETER Experiment Name: At_100uM_ABA_Mutants__P Parameter: Treatment Value: 1uM ABA vs. No Treatment
  misc_feature: MA Experiment ID: 20000794 Result: Up-regulated in Transcription
  misc_feature: MA Experiment 20000794 PARAMETER Experiment Name: At_Petals_P Parameter: Age (day) Value: 23-25 days
  misc_feature: MA Experiment 20000794 PARAMETER Experiment Name: At_Petals_P Parameter: Plant Line Value: WS
  misc_feature: MA Experiment 20000794 PARAMETER Experiment Name: At_Petals_P Parameter: Tissue Value: Petals vs. Whole plant
  misc_feature: MA Experiment ID: 20001247 Result: Up-regulated in Transcription
  misc_feature: MA Experiment 20001247 PARAMETER Experiment Name: At_Far-red-induction_P Parameter: Age (day) Value: 7
  misc_feature: MA Experiment 20001247 PARAMETER Experiment Name: At_Far-red-induction_P Parameter: Light Value: Far-red vs. White
  misc_feature: MA Experiment 20001247 PARAMETER Experiment Name: At_Far-red-induction_P Parameter: Organism Value: A. thaliana
  misc_feature: MA Experiment 20001247 PARAMETER Experiment Name: At_Far-red-induction_P Parameter: Plant Line Value: Columbia
  misc_feature: MA Experiment 20001247 PARAMETER Experiment Name: At_Far-red-induction_P Parameter: Timepoint (hr) Value: 1
  misc_feature: MA Experiment 20001247 PARAMETER Experiment Name: At_Far-red-induction_P Parameter: Tissue Value: Whole Plant
  misc_feature: MA Experiment ID: 20001557 Result: Down-regulated in Transcription
  misc_feature: MA Experiment 20001557 PARAMETER Experiment Name: At_Drought_Soil_Dry_P Parameter: Age (day) Value: 27
  misc_feature: MA Experiment 20001557 PARAMETER Experiment Name: At_Drought_Soil_Dry_P Parameter: Organism Value: A. thaliana
  misc_feature: MA Experiment 20001557 PARAMETER Experiment Name: At_Drought_Soil_Dry_P Parameter: Plant Line Value: WS
  misc_feature: MA Experiment 20001557 PARAMETER Experiment Name: At_Drought_Soil_Dry_P Parameter: Post Timepoint (hr) Value: 3
  misc_feature: MA Experiment 20001557 PARAMETER Experiment Name: At_Drought_Soil_Dry_P Parameter: Post-Treatment Value: Re-Water vs. No Drought
  misc_feature: MA Experiment 20001557 PARAMETER Experiment Name: At_Drought_Soil_Dry_P Parameter: Timepoint (day) Value: 13
  misc_feature: MA Experiment 20001557 PARAMETER Experiment Name: At_Drought_Soil_Dry_P Parameter: Treatment Value: Drought vs. No Drought
  misc_feature: MA Experiment ID: 20001560 Result: Down-regulated in Transcription
  misc_feature: MA Experiment 20001560 PARAMETER Experiment Name: At_Drought_Soil_Dry_P Parameter: Age (day) Value: 28
  misc_feature: MA Experiment 20001560 PARAMETER Experiment Name: At_Drought_Soil_Dry_P Parameter: Organism Value: A. thaliana
  misc_feature: MA Experiment 20001560 PARAMETER Experiment Name: At_Drought_Soil_Dry_P Parameter: Plant Line Value: WS
  misc_feature: MA Experiment 20001560 PARAMETER Experiment Name: At_Drought_Soil_Dry_P Parameter: Post Timepoint (hr) Value: None
  misc_feature: MA Experiment 20001560 PARAMETER Experiment Name: At_Drought_Soil_Dry_P Parameter: Post-Treatment Value: None
  misc_feature: MA Experiment 20001560 PARAMETER Experiment Name: At_Drought_Soil_Dry_P Parameter: Timepoint (day) Value: 14
  misc_feature: MA Experiment 20001560 PARAMETER Experiment Name: At_Drought_Soil_Dry_P Parameter: Treatment Value: Drought vs. No Drought
  misc_feature: MA Experiment ID: 20001906 Result: Down-regulated in Transcription
  misc_feature: MA Experiment 20001906 PARAMETER Experiment Name: At_Drought_Reproduction_P Parameter: Age (day) Value: 35
  misc_feature: MA Experiment 20001906 PARAMETER Experiment Name: At_Drought_Reproduction_P Parameter: Organism Value: A. thaliana
  misc_feature: MA Experiment 20001906 PARAMETER Experiment Name: At_Drought_Reproduction_P Parameter: Plant Line Value: WS
  misc_feature: MA Experiment 20001906 PARAMETER Experiment Name: At_Drought_Reproduction_P Parameter: Timepoint (day) Value: 5
  misc_feature: MA Experiment 20001906 PARAMETER Experiment Name: At_Drought_Reproduction_P Parameter: Tissue Value: Siliques
  misc_feature: MA Experiment 20001906 PARAMETER Experiment Name: At_Drought_Reproduction_P Parameter: Treatment Value: Drought vs. No Drought
  misc_feature: MA Experiment ID: 20001907 Result: Down-regulated in Transcription
  misc_feature: MA Experiment 20001907 PARAMETER Experiment Name: At_Drought_Reproduction_P Parameter: Age (day) Value: 37
  misc_feature: MA Experiment 20001907 PARAMETER Experiment Name: At_Drought_Reproduction_P Parameter: Organism Value: A. thaliana
  misc_feature: MA Experiment 20001907 PARAMETER Experiment Name: At_Drought_Reproduction_P Parameter: Plant Line Value: WS
  misc_feature: MA Experiment 20001907 PARAMETER Experiment Name: At_Drought_Reproduction_P Parameter: Timepoint (day) Value: 7
  misc_feature: MA Experiment 20001907 PARAMETER Experiment Name: At_Drought_Reproduction_P Parameter: Tissue Value: Siliques
  misc_feature: MA Experiment 20001907 PARAMETER Experiment Name: At_Drought_Reproduction_P Parameter: Treatment Value: Drought vs. No Drought
  misc_feature: MA Experiment ID: 20001908 Result: Down-regulated in Transcription
  misc_feature: MA Experiment 20001908 PARAMETER Experiment Name: At_Drought_Reproduction_P Parameter: Age (day) Value: 40
  misc_feature: MA Experiment 20001908 PARAMETER Experiment Name: At_Drought_Reproduction_P Parameter: Organism Value: A. thaliana
  misc_feature: MA Experiment 20001908 PARAMETER Experiment Name: At_Drought_Reproduction_P Parameter: Plant Line Value: WS
  misc_feature: MA Experiment 20001908 PARAMETER Experiment Name: At_Drought_Reproduction_P Parameter: Timepoint (day) Value: 10
  misc_feature: MA Experiment 20001908 PARAMETER Experiment Name: At_Drought_Reproduction_P Parameter: Tissue Value: Siliques
  misc_feature: MA Experiment 20001908 PARAMETER Experiment Name: At_Drought_Reproduction_P Parameter: Treatment Value: Drought vs. No Drought
  misc_feature: MA Experiment ID: 20001911 Result: Down-regulated in Transcription
  misc_feature: MA Experiment 20001911 PARAMETER Experiment Name: At_Drought_Reproduction_P Parameter: Age (day) Value: 40
  misc_feature: MA Experiment 20001911 PARAMETER Experiment Name: At_Drought_Reproduction_P Parameter: Organism Value: A. thaliana
  misc_feature: MA Experiment 20001911 PARAMETER Experiment Name: At_Drought_Reproduction_P Parameter: Plant Line Value: WS
  misc_feature: MA Experiment 20001911 PARAMETER Experiment Name: At_Drought_Reproduction_P Parameter: Timepoint (day) Value: 10
  misc_feature: MA Experiment 20001911 PARAMETER Experiment Name: At_Drought_Reproduction_P Parameter: Tissue Value: Flowers
  misc_feature: MA Experiment 20001911 PARAMETER Experiment Name: At_Drought_Reproduction_P Parameter: Treatment Value: Drought vs. No Drought
ctatctctcatccacatcttagttcatgttcgagtttctctgcttcaattacaaagaatggctgcttcaagtgctgtcaccgcaaactacgtcctcaagccacctccattcgcactggatgctttggagccgcatatgagcaaacaaactctggagtttcactggggaaaacatcacagagcttacgtggacaacctcaagaaacaggttcttggaaccgagcttgaaggcaagcccttagagcacattatccacagcacttacaacaatggtgatctcctccctgctttcaacaacgctgctcaggcgtggaaccacgagttcttctgggagtcaatgaaaccaggtggtggaggaaaaccatcaggagagcttcttgctttgcttgaaagagatttcacttcttatgagaagttctatgaagagttcaatgctgctgcagccactcagtttggagctggctgggcctggcttgcttattcaaatgaaaaactcaaagtagtgaaaactcccaatgctgtgaatccccttgtgctcggctctttcccattgcttaccattgatgtctgggagcatgcttactaccttgacttccagaaccgaagaccagattacataaagacattcatgaccaatcttgtgtcttgggaagctgtaagtgccagacttgaggccgccaaggctgcttctgcttaagcaaatttctgaacaatttgacttcagtgacagtgagttctgcatcaccgaagtctcttataaaatattggtcgctgtaataaggacacagctctcttgttgtgtatgtgtcacagagttcttcattttgcttgtgtaatgaacaattaaacatgctcttttctgagtgtgtgtgcgttttgtgtgtgtcaagtttttcatcgtctcctttattaaactcaaattggcacctaccatcagt

SEQ ID NO: 21184 - protein, 231 aa, Arabidopsis thaliana
  peptide (1)..(231): Ceres Seq. ID no. 12482821
  misc_feature (19)..(177): Homolog of NCBI NO: 16974682 NR Description: Fe-superoxide dismutase precursor [Medicago
  misc_feature (11)..(228): Homolog of NCBI NO: 33439120 NR Description: iron superoxide dismutase [Lycopersicon
  misc_feature (11)..(228): Homolog of NCBI NO: 33413303 NR Description: superoxide dismutase [Fe] [Lycopersicon
  misc_feature (159)..(231): Homolog of NCBI NO: 6840824 NR Description: iron-superoxide dismutase precursor [Vigna
  misc_feature (26)..(176): Homolog of NCBI NO: 6840824 NR Description: iron-superoxide dismutase precursor [Vigna
  misc_feature (20)..(231): Homolog of NCBI NO: 3114705 NR Description: superoxide dismutase [Raphanus sativus]
  misc_feature (20)..(231): Homolog of NCBI NO: 15234913 NR Description: iron superoxide dismutase (FSD1)
  misc_feature (8)..(231): Homolog of NCBI NO: 99759 NR Description: superoxide dismutase (EC 1.15.1.1) (Fe) -
  misc_feature (8)..(231): Homolog of NCBI NO: 7433338 NR Description: superoxide dismutase (EC 1.15.1.1) (Fe) -
  misc_feature (8)..(231): Homolog of NCBI NO: 166700 NR Description: Fe-superoxide dismutase
LSLIHILVHVRVSLLQLQRMAASSAVTANYVLKPPPFALDALEPHMSKQTLEFHWGKHHRAYVDNLKKQVLGTELEGKPLEHIIHSTYNNGDLLPAFNNAAQAWNHEFFWESMKPGGGGKPSGELLALLERDFTSYEKFYEEFNAAAATQFGAGWAWLAYSNEKLKVVKTPNAVNPLVLGSFPLLTIDVWEHAYYLDFQNRRPDYIKTFMTNLVSWEAVSARLEAAKAASA

SEQ ID NO: 21185 - protein, 212 aa, Arabidopsis thaliana
  peptide (1)..(212): Ceres Seq. ID no. 12482822
  misc_feature (1)..(158): Homolog of NCBI NO: 16974682 NR Description: Fe-superoxide dismutase precursor [Medicago
  misc_feature (1)..(209): Homolog of NCBI NO: 33439120 NR Description: iron superoxide dismutase [Lycopersicon
  misc_feature (1)..(209): Homolog of NCBI NO: 33413303 NR Description: superoxide dismutase [Fe] [Lycopersicon
  misc_feature (140)..(212): Homolog of NCBI NO: 6840824 NR Description: iron-superoxide dismutase precursor [Vigna
  misc_feature (7)..(157): Homolog of NCBI NO: 6840824 NR Description: iron-superoxide dismutase precursor [Vigna
  misc_feature (1)..(212): Homolog of NCBI NO: 3114705 NR Description: superoxide dismutase [Raphanus sativus]
  misc_feature (1)..(212): Homolog of NCBI NO: 15234913 NR Description: iron superoxide dismutase (FSD1)
  misc_feature (1)..(212): Homolog of NCBI NO: 99759 NR Description: superoxide dismutase (EC 1.15.1.1) (Fe) -
  misc_feature (1)..(212): Homolog of NCBI NO: 7433338 NR Description: superoxide dismutase (EC 1.15.1.1) (Fe) -
  misc_feature (1)..(212): Homolog of NCBI NO: 166700 NR Description: Fe-superoxide dismutase
MAASSAVTANYVLKPPPFALDALEPHMSKQTLEFHWGKHHRAYVDNLKKQVLGTELEGKPLEHIIHSTYNNGDLLPAFNNAAQAWNHEFFWESMKPGGGGKPSGELLALLERDFTSYEKFYEEFNAAAATQFGAGWAWLAYSNEKLKVVKTPNAVNPLVLGSFPLLTIDVWEHAYYLDFQNRRPDYIKTFMTNLVSWEAVSARLEAAKAASA

SEQ ID NO: 21186 - protein, 186 aa, Arabidopsis thaliana
  peptide (1)..(186): Ceres Seq. ID no. 12482823
  misc_feature (1)..(132): Homolog of NCBI NO: 16974682 NR Description: Fe-superoxide dismutase precursor [Medicago
  misc_feature (1)..(183): Homolog of NCBI NO: 33439120 NR Description: iron superoxide dismutase [Lycopersicon
  misc_feature (1)..(183): Homolog of NCBI NO: 33413303 NR Description: superoxide dismutase [Fe] [Lycopersicon
  misc_feature (114)..(186): Homolog of NCBI NO: 6840824 NR Description: iron-superoxide dismutase precursor [Vigna
  misc_feature (1)..(131): Homolog of NCBI NO: 6840824 NR Description: iron-superoxide dismutase precursor [Vigna
  misc_feature (1)..(186): Homolog of NCBI NO: 3114705 NR Description: superoxide dismutase [Raphanus sativus]
  misc_feature (1)..(186): Homolog of NCBI NO: 15234913 NR Description: iron superoxide dismutase (FSD1)
  misc_feature (1)..(186): Homolog of NCBI NO: 99759 NR Description: superoxide dismutase (EC 1.15.1.1) (Fe) -
  misc_feature (1)..(186): Homolog of NCBI NO: 7433338 NR Description: superoxide dismutase (EC 1.15.1.1) (Fe) -
  misc_feature (1)..(186): Homolog of NCBI NO: 166700 NR Description: Fe-superoxide dismutase
MSKQTLEFHWGKHHRAYVDNLKKQVLGTELEGKPLEHIIHSTYNNGDLLPAFNNAAQAWNHEFFWESMKPGGGGKPSGELLALLERDFTSYEKFYEEFNAAAATQFGAGWAWLAYSNEKLKVVKTPNAVNPLVLGSFPLLTIDVWEHAYYLDFQNRRPDYIKTFMTNLVSWEAVSARLEAAKAASA

SEQ ID NO: 21187 - DNA, 844 bp, Arabidopsis thaliana
  misc_feature (1)..(844): Ceres Seq. ID no. 12377524
  misc_feature: MA Experiment ID: 20000179 Result: Up-regulated in Transcription
  misc_feature: MA Experiment 20000179 PARAMETER Experiment Name: At_Germinating_Seeds_P Parameter: Age (hr) Value: 6 vs. 0
  misc_feature: MA Experiment 20000179 PARAMETER Experiment Name: At_Germinating_Seeds_P Parameter: Tissue Value: Germinating Seeds
  misc_feature: MA Experiment ID: 20000180 Result: Up-regulated in Transcription
  misc_feature: MA Experiment 20000180 PARAMETER Experiment Name: At_Germinating_Seeds_P Parameter: Age (hr) Value: 24 vs. 0
  misc_feature: MA Experiment 20000180 PARAMETER Experiment Name: At_Germinating_Seeds_P Parameter: Tissue Value: Germinating Seeds
  misc_feature: MA Experiment ID: 20000185 Result: Down-regulated in Transcription
  misc_feature: MA Experiment 20000185 PARAMETER Experiment Name: At_Roots__P Parameter: Age (day) Value: 7 vs. 21
  misc_feature: MA Experiment 20000185 PARAMETER Experiment Name: At_Roots__P Parameter: Organism Value: A. thaliana
  misc_feature: MA Experiment 20000185 PARAMETER Experiment Name: At_Roots__P Parameter: Tissue Value: Roots vs. Whole Plant
  misc_feature: MA Experiment ID: 20000286 Result: Down-regulated in Transcription
  misc_feature: MA Experiment 20000286 PARAMETER Experiment Name: At_Open_Flower_P Parameter: Age (day) Value: 21
  misc_feature: MA Experiment 20000286 PARAMETER Experiment Name: At_Open_Flower_P Parameter: Plant Line Value: WS
  misc_feature: MA Experiment 20000286 PARAMETER Experiment Name: At_Open_Flower_P Parameter: Tissue Value: Half Open vs. Whole Plant
  misc_feature: MA Experiment ID: 20000437 Result: Down-regulated in Transcription
  misc_feature: MA Experiment 20000437 PARAMETER Experiment Name: At_Drought_P Parameter: Age (day) Value: 8
  misc_feature: MA Experiment 20000437 PARAMETER Experiment Name: At_Drought_P Parameter: Organism Value: A. thaliana
  misc_feature: MA Experiment 20000437 PARAMETER Experiment Name: At_Drought_P Parameter: Plant Line Value: WS
  misc_feature: MA Experiment 20000437 PARAMETER Experiment Name: At_Drought_P Parameter: Timepoint (hr) Value: 24
  misc_feature: MA Experiment 20000437 PARAMETER Experiment Name: At_Drought_P Parameter: Tissue Value: Whole Plant
  misc_feature: MA Experiment 20000437 PARAMETER Experiment Name: At_Drought_P Parameter: Treatment Value: Drought vs. No Drought
  misc_feature: MA Experiment ID: 20000438 Result: Up-regulated in Transcription
  misc_feature: MA Experiment 20000438 PARAMETER Experiment Name: At_Shoots__P Parameter: Age (day) Value: 14
  misc_feature: MA Experiment 20000438 PARAMETER Experiment Name: At_Shoots__P Parameter: Tissue Value: Shoots vs. Whole Plant
  misc_feature: MA Experiment ID: 20000439 Result: Down-regulated in Transcription
  misc_feature: MA Experiment 20000439 PARAMETER Experiment Name: At_Roots__P Parameter: Age (day) Value: 14 vs. 21
  misc_feature: MA Experiment 20000439 PARAMETER Experiment Name: At_Roots__P Parameter: Organism Value: A. thaliana
  misc_feature: MA Experiment 20000439 PARAMETER Experiment Name: At_Roots__P Parameter: Tissue Value: Roots vs. Whole Plant
  misc_feature: MA Experiment ID: 20000496 Result: Down-regulated in Transcription
  misc_feature: MA Experiment 20000496 PARAMETER Experiment Name: At_Guard_Cells_P Parameter: Harvest Date Value: 7/19/2002
  misc_feature: MA Experiment 20000496 PARAMETER Experiment Name: At_Guard_Cells_P Parameter: Organism Value: Canola
  misc_feature: MA Experiment 20000496 PARAMETER Experiment Name: At_Guard_Cells_P Parameter: Tissue Value: Guard Cells vs. Leaves
  misc_feature: MA Experiment ID: 20000794 Result: Down-regulated in Transcription
  misc_feature: MA Experiment 20000794 PARAMETER Experiment Name: At_Petals_P Parameter: Age (day) Value: 23-25 days
  misc_feature: MA Experiment 20000794 PARAMETER Experiment Name: At_Petals_P Parameter: Plant Line Value: WS
  misc_feature: MA Experiment 20000794 PARAMETER Experiment Name: At_Petals_P Parameter: Tissue Value: Petals vs. Whole plant
  misc_feature: MA Experiment ID: 20001248 Result: Down-regulated in Transcription
  misc_feature: MA Experiment 20001248 PARAMETER Experiment Name: At_Far-red-induction_P Parameter: Age (day) Value: 7
  misc_feature: MA Experiment 20001248 PARAMETER Experiment Name: At_Far-red-induction_P Parameter: Light Value: Far-red vs. White
  misc_feature: MA Experiment 20001248 PARAMETER Experiment Name: At_Far-red-induction_P Parameter: Organism Value: A. thaliana
  misc_feature: MA Experiment 20001248 PARAMETER Experiment Name: At_Far-red-induction_P Parameter: Plant Line Value: Columbia
  misc_feature: MA Experiment 20001248 PARAMETER Experiment Name: At_Far-red-induction_P Parameter: Timepoint (hr) Value: 4
  misc_feature: MA Experiment 20001248 PARAMETER Experiment Name: At_Far-red-induction_P Parameter: Tissue Value: Whole Plant
  misc_feature: MA Experiment ID: 20001451 Result: Down-regulated in Transcription
  misc_feature: MA Experiment 20001451 PARAMETER Experiment Name: At_Far-red-induction_P Parameter: Age (day) Value: 7
  misc_feature: MA Experiment 20001451 PARAMETER Experiment Name: At_Far-red-induction_P Parameter: Light Value: Far-red vs. White
  misc_feature: MA Experiment 20001451 PARAMETER Experiment Name: At_Far-red-induction_P Parameter: Organism Value: A. thaliana
  misc_feature: MA Experiment 20001451 PARAMETER Experiment Name: At_Far-red-induction_P Parameter: Plant Line Value: Columbia
  misc_feature: MA Experiment 20001451 PARAMETER Experiment Name: At_Far-red-induction_P Parameter: Timepoint (hr) Value: 24
  misc_feature: MA Experiment 20001451 PARAMETER Experiment Name: At_Far-red-induction_P Parameter: Tissue Value: Whole Plant
  misc_feature: MA Experiment ID: 20001558 Result: Down-regulated in Transcription
  misc_feature: MA Experiment 20001558 PARAMETER Experiment Name: At_Drought_Soil_Dry_P Parameter: Age (day) Value: 27
  misc_feature: MA Experiment 20001558 PARAMETER Experiment Name: At_Drought_Soil_Dry_P Parameter: Organism Value: A. thaliana
  misc_feature: MA Experiment 20001558 PARAMETER Experiment Name: At_Drought_Soil_Dry_P Parameter: Plant Line Value: WS
  misc_feature: MA Experiment 20001558 PARAMETER Experiment Name: At_Drought_Soil_Dry_P Parameter: Post Timepoint (hr) Value: 6
  misc_feature: MA Experiment 20001558 PARAMETER Experiment Name: At_Drought_Soil_Dry_P Parameter: Post-Treatment Value: Re-Water vs. No Drought
  misc_feature: MA Experiment 20001558 PARAMETER Experiment Name: At_Drought_Soil_Dry_P Parameter: Timepoint (day) Value: 13
  misc_feature: MA Experiment 20001558 PARAMETER Experiment Name: At_Drought_Soil_Dry_P Parameter: Treatment Value: Drought vs. No Drought
  misc_feature: MA Experiment ID: 20001757 Result: Up-regulated in Transcription
  misc_feature: MA Experiment 20001757 PARAMETER Experiment Name: At_50mM_NH4NO3_L-to-H_P Parameter: Timepoint (hr) Value: 6
  misc_feature: MA Experiment 20001757 PARAMETER Experiment Name: At_50mM_NH4NO3_L-to-H_P Parameter: Tissue Value: Leaf
  misc_feature: MA Experiment 20001757 PARAMETER Experiment Name: At_50mM_NH4NO3_L-to-H_P Parameter: Treatment Value: 50mM NH4NO3 vs 100mM Mannitol
  misc_feature: MA Experiment ID: 20001905 Result: Down-regulated in Transcription
  misc_feature: MA Experiment 20001905 PARAMETER Experiment Name: At_Drought_Reproduction_P Parameter: Age (day) Value: 40
  misc_feature: MA Experiment 20001905 PARAMETER Experiment Name: At_Drought_Reproduction_P Parameter: Organism Value: A. thaliana
  misc_feature: MA Experiment 20001905 PARAMETER Experiment Name: At_Drought_Reproduction_P Parameter: Plant Line Value: WS
  misc_feature: MA Experiment 20001905 PARAMETER Experiment Name: At_Drought_Reproduction_P Parameter: Timepoint (day) Value: 10
  misc_feature: MA Experiment 20001905 PARAMETER Experiment Name: At_Drought_Reproduction_P Parameter: Tissue Value: Rosettes
  misc_feature: MA Experiment 20001905 PARAMETER Experiment Name: At_Drought_Reproduction_P Parameter: Treatment Value: Drought vs. No Drought
  misc_feature: MA Experiment ID: 20001906 Result: Down-regulated in Transcription
  misc_feature: MA Experiment 20001906 PARAMETER Experiment Name: At_Drought_Reproduction_P Parameter: Age (day) Value: 35
  misc_feature: MA Experiment 20001906 PARAMETER Experiment Name: At_Drought_Reproduction_P Parameter: Organism Value: A. thaliana
  misc_feature: MA Experiment 20001906 PARAMETER Experiment Name: At_Drought_Reproduction_P Parameter: Plant Line Value: WS
  misc_feature: MA Experiment 20001906 PARAMETER Experiment Name: At_Drought_Reproduction_P Parameter: Timepoint (day) Value: 5
  misc_feature: MA Experiment 20001906 PARAMETER Experiment Name: At_Drought_Reproduction_P Parameter: Tissue Value: Siliques
  misc_feature: MA Experiment 20001906 PARAMETER Experiment Name: At_Drought_Reproduction_P Parameter: Treatment Value: Drought vs. No Drought
  misc_feature: MA Experiment ID: 20001908 Result: Down-regulated in Transcription
  misc_feature: MA Experiment 20001908 PARAMETER Experiment Name: At_Drought_Reproduction_P Parameter: Age (day) Value: 40
  misc_feature: MA Experiment 20001908 PARAMETER Experiment Name: At_Drought_Reproduction_P Parameter: Organism Value: A. thaliana
  misc_feature: MA Experiment 20001908 PARAMETER Experiment Name: At_Drought_Reproduction_P Parameter: Plant Line Value: WS
  misc_feature: MA Experiment 20001908 PARAMETER Experiment Name: At_Drought_Reproduction_P Parameter: Timepoint (day) Value: 10
  misc_feature: MA Experiment 20001908 PARAMETER Experiment Name: At_Drought_Reproduction_P Parameter: Tissue Value: Siliques
  misc_feature: MA Experiment 20001908 PARAMETER Experiment Name: At_Drought_Reproduction_P Parameter: Treatment Value: Drought vs. No Drought
atctcttttctcttctcatcaaaacataccaataagcaatttgctcattagagaacagagaaaaaaaaaacaatggcaactcaagccgccgggatcttcaactccgccataacaaccgccgcaacctccggcgtcaagaaactccactttttctcaacaacccaccgtcccaaatccctctccttcaccaaaaccgcaatccgcgccgagaaaacagattcctccgccgccgctgctgcagcccccgccacgaaagaagctcccgtgggattcacgccaccgcagctagacccaaacacaccgtctccgatcttcgctggaagcaccggtggtcttctacgtaaagcgcaagtggaagagttctacgttatcacgtggaactcaccgaaagaacagatctttgagatgccgacaggaggagcagcgatcatgagagaaggtccgaatcttctgaagctagcgaggaaagagcagtgtttagctttggggacaaggcttagatccaagtacaagatcacttaccagttttacagagtgtttcctaacggtgaggttcaatatcttcatcctaaagatggtgtttatccagagaaggcgaatccaggaagagaaggtgttggtctcaacatgagatctattgggaaaaatgttagtcccattgaagttaagtttactggcaaacaaagttatgatttgtaagatctgtaaactaaaaaaaccaaaaactatgtgcatgtggtgatgattatgactatgtttcatgttaatttttaatggattttgttttgataatttgttgttccatttggtttaatggatcttttatgggcctaaactataacgt

SEQ ID NO: 21188 - protein, 208 aa, Arabidopsis thaliana
  peptide (1)..(208): Ceres Seq. ID no. 12377525
  misc_feature (70)..(207): Pfam Name: PsaD Pfam Description: PsaD
  misc_feature (70)..(207): Pfam Name: PsaD Pfam Description: PsaD
  misc_feature (5)..(208): Homolog of NCBI NO: 1488649 NR Description: psaD [Spinacia oleracea]
  misc_feature (1)..(208): Homolog of NCBI NO: 34787117 NR Description: putative photosystem I reaction centre PSI-D
  misc_feature (1)..(208): Homolog of NCBI NO: 417544 NR Description: Photosystem I reaction center subunit II,
  misc_feature (1)..(208): Homolog of NCBI NO: 19855891 NR Description: Photosystem I reaction center subunit II,
  misc_feature (1)..(208): Homolog of NCBI NO: 21293 NR Description: 20 kDa protein (AA 1-212) [Spinacia oleracea]
  misc_feature (1)..(208): Homolog of NCBI NO: 21595031 NR Description: putative photosystem I reaction center subunit II
  misc_feature (1)..(208): Homolog of NCBI NO: 34787117 NR Description: putative photosystem I reaction centre PSI-D
  misc_feature (1)..(208): Homolog of NCBI NO: 15218708 NR Description: putative photosystem I reaction center subunit II
  misc_feature (1)..(208): Homolog of NCBI NO: 5732201 NR Description: photosystem I subunit II precursor [Arabidopsis
  misc_feature (1)..(208): Homolog of NCBI NO: 72680 NR Description: photosystem I chain II precursor - spinach
  misc_feature (1)..(208): Homolog of NCBI NO: 21293 NR Description: 20 kDa protein (AA 1-212) [Spinacia oleracea]
  misc_feature (1)..(208): Homolog of NCBI NO: 19855891 NR Description: Photosystem I reaction center subunit II,
  misc_feature (1)..(208): Homolog of NCBI NO: 417544 NR Description: Photosystem I reaction center subunit II,
  misc_feature (5)..(208): Homolog of NCBI NO: 1488649 NR Description: psaD [Spinacia oleracea]
  misc_feature (1)..(208): Homolog of NCBI NO: 15235503 NR Description: putative photosystem I reaction center subunit II
  misc_feature (1)..(208): Homolog of NCBI NO: 72680 NR Description: photosystem I chain II precursor - spinach
  misc_feature (1)..(208): Homolog of NCBI NO: 5732201 NR Description: photosystem I subunit II precursor [Arabidopsis
  misc_feature (1)..(208): Homolog of NCBI NO: 15218708 NR Description: putative photosystem I reaction center subunit II
  misc_feature (1)..(208): Homolog of NCBI NO: 21595031 NR Description: putative photosystem I reaction center subunit II
  misc_feature (1)..(208): Homolog of NCBI NO: 15235503 NR Description: putative photosystem I reaction center subunit II
MATQAAGIFNSAITTAATSGVKKLHFFSTTHRPKSLSFTKTAIRAEKTDSSAAAAAAPATKEAPVGFTPPQLDPNTPSPIFAGSTGGLLRKAQVEEFYVITWNSPKEQIFEMPTGGAAIMREGPNLLKLARKEQCLALGTRLRSKYKITYQFYRVFPNGEVQYLHPKDGVYPEKANPGREGVGLNMRSIGKNVSPIEVKFTGKQSYDL

SEQ ID NO: 21189 - DNA, 817 bp, Arabidopsis thaliana
  misc_feature (1)..(817): Ceres Seq. ID no. 13496797
  misc_feature: MA Experiment ID: 108461 Result: Down-regulated in Transcription
  misc_feature: MA Experiment 108461 PARAMETER Experiment Name: At_Germinating_Seeds_cDNA_P Parameter: Age (day) Value: 1 vs. 0
  misc_feature: MA Experiment 108461 PARAMETER Experiment Name: At_Germinating_Seeds_cDNA_P Parameter: Tissue Value: Germinating Seeds
  misc_feature: MA Experiment ID: 108462 Result: Down-regulated in Transcription
  misc_feature: MA Experiment 108462 PARAMETER Experiment Name: At_Germinating_Seeds_cDNA_P Parameter: Age (day) Value: 2 vs. 0
  misc_feature: MA Experiment 108462 PARAMETER Experiment Name: At_Germinating_Seeds_cDNA_P Parameter: Tissue Value: Germinating Seeds
  misc_feature: MA Experiment ID: 108463 Result: Down-regulated in Transcription
  misc_feature: MA Experiment 108463 PARAMETER Experiment Name: At_Germinating_Seeds_cDNA_P Parameter: Age (day) Value: 3 vs. 0
  misc_feature: MA Experiment 108463 PARAMETER Experiment Name: At_Germinating_Seeds_cDNA_P Parameter: Tissue Value: Germinating Seeds
  misc_feature: MA Experiment ID: 108464 Result: Down-regulated in Transcription
  misc_feature: MA Experiment 108464 PARAMETER Experiment Name: At_Germinating_Seeds_cDNA_P Parameter: Age (day) Value: 4 vs. 0
  misc_feature: MA Experiment 108464 PARAMETER Experiment Name: At_Germinating_Seeds_cDNA_P Parameter: Tissue Value: Germinating Seeds
  misc_feature: MA Experiment ID: 108501 Result: Down-regulated in Transcription
  misc_feature: MA Experiment 108501 PARAMETER Experiment Name: At_ap2_floral_buds_cDNA_P Parameter: Plant Line Value: ap2 (Ler.)
  misc_feature: MA Experiment 108501 PARAMETER Experiment Name: At_ap2_floral_buds_cDNA_P Parameter: Tissue Value: Closed Flower
  misc_feature: MA Experiment ID: 108608 Result: Up-regulated in Transcription
  misc_feature: MA Experiment 108608 PARAMETER Experiment Name: At_100uM_ABA_cDNA_P Parameter: Timepoint (hr) Value: 1
  misc_feature: MA Experiment 108608 PARAMETER Experiment Name: At_100uM_ABA_cDNA_P Parameter: Tissue Value: Aerial
  misc_feature: MA Experiment 108608 PARAMETER Experiment Name: At_100uM_ABA_cDNA_P Parameter: Treatment Value: 100uM ABA vs. No Treatment
  misc_feature: MA Experiment ID: 20000072 Result: Up-regulated in Transcription
  misc_feature: MA Experiment 20000072 PARAMETER Experiment Name: At_100uM_ABA_Mutants_cDNA_P Parameter: Plant Line Value: CS8105
  misc_feature: MA Experiment 20000072 PARAMETER Experiment Name: At_100uM_ABA_Mutants_cDNA_P Parameter: Timepoint (hr) Value: 6
  misc_feature: MA Experiment 20000072 PARAMETER Experiment Name: At_100uM_ABA_Mutants_cDNA_P Parameter: Tissue Value: Aerial
  misc_feature: MA Experiment 20000072 PARAMETER Experiment Name: At_100uM_ABA_Mutants_cDNA_P Parameter: Treatment Value: 100uM ABA vs. No Treatment
  misc_feature: MA Experiment ID: 20000087 Result: Up-regulated in Transcription
  misc_feature: MA Experiment 20000087 PARAMETER Experiment Name: At_100uM_ABA_Mutants_cDNA_P Parameter: Plant Line Value: WS
  misc_feature: MA Experiment 20000087 PARAMETER Experiment Name: At_100uM_ABA_Mutants_cDNA_P Parameter: Timepoint (hr) Value: 6
  misc_feature: MA Experiment 20000087 PARAMETER Experiment Name: At_100uM_ABA_Mutants_cDNA_P Parameter: Tissue Value: Aerial
  misc_feature: MA Experiment 20000087 PARAMETER Experiment Name: At_100uM_ABA_Mutants_cDNA_P Parameter: Treatment Value: 100uM ABA vs. No Treatment
  misc_feature: MA Experiment ID: 20000180 Result: Down-regulated in Transcription
  misc_feature: MA Experiment 20000180 PARAMETER Experiment Name: At_Germinating_Seeds_P Parameter: Age (hr) Value: 24 vs. 0
  misc_feature: MA Experiment 20000180 PARAMETER Experiment Name: At_Germinating_Seeds_P Parameter: Tissue Value: Germinating Seeds
  misc_feature: MA Experiment ID: 20000184 Result: Up-regulated in Transcription
  misc_feature: MA Experiment 20000184 PARAMETER Experiment Name: At_Shoots__P Parameter: Age (day) Value: 7
  misc_feature: MA Experiment 20000184 PARAMETER Experiment Name: At_Shoots__P Parameter: Tissue Value: Shoots vs. Whole Plant
  misc_feature: MA Experiment ID: 20000264 Result: Up-regulated in Transcription
  misc_feature: MA Experiment 20000264 PARAMETER Experiment Name: At_Open_Flower_P Parameter: Age (day) Value: 21
  misc_feature: MA Experiment 20000264 PARAMETER Experiment Name: At_Open_Flower_P Parameter: Plant Line Value: WS
  misc_feature: MA Experiment 20000264 PARAMETER Experiment Name: At_Open_Flower_P Parameter: Tissue Value: Open Flower vs. Whole Plant
  misc_feature: MA Experiment ID: 20000265 Result: Up-regulated in Transcription
  misc_feature: MA Experiment 20000265 PARAMETER Experiment Name: At_Open_Flower_P Parameter: Age (day) Value: 21
  misc_feature: MA Experiment 20000265 PARAMETER Experiment Name: At_Open_Flower_P Parameter: Plant Line Value: WS
  misc_feature: MA Experiment 20000265 PARAMETER Experiment Name: At_Open_Flower_P Parameter: Tissue Value: Closed Flower vs. Whole Plant
  misc_feature: MA Experiment ID: 20000794 Result: Up-regulated in Transcription
  misc_feature: MA Experiment 20000794 PARAMETER Experiment Name: At_Petals_P Parameter: Age (day) Value: 23-25 days
  misc_feature: MA Experiment 20000794 PARAMETER Experiment Name: At_Petals_P Parameter: Plant Line Value: WS
  misc_feature: MA Experiment 20000794 PARAMETER Experiment Name: At_Petals_P Parameter: Tissue Value: Petals vs. Whole plant
  misc_feature: MA Experiment ID: 20001451 Result: Up-regulated in Transcription
  misc_feature: MA Experiment 20001451 PARAMETER Experiment Name: At_Far-red-induction_P Parameter: Age (day) Value: 7
  misc_feature: MA Experiment 20001451 PARAMETER Experiment Name: At_Far-red-induction_P Parameter: Light Value: Far-red vs. White
  misc_feature: MA Experiment 20001451 PARAMETER Experiment Name: At_Far-red-induction_P Parameter: Organism Value: A. thaliana
  misc_feature: MA Experiment 20001451 PARAMETER Experiment Name: At_Far-red-induction_P Parameter: Plant Line Value: Columbia
  misc_feature: MA Experiment 20001451 PARAMETER Experiment Name: At_Far-red-induction_P Parameter: Timepoint (hr) Value: 24
  misc_feature: MA Experiment 20001451 PARAMETER Experiment Name: At_Far-red-induction_P Parameter: Tissue Value: Whole Plant
  misc_feature: MA Experiment ID: 20001557 Result: Up-regulated in Transcription
  misc_feature: MA Experiment 20001557 PARAMETER Experiment Name: At_Drought_Soil_Dry_P Parameter: Age (day) Value: 27
  misc_feature: MA Experiment 20001557 PARAMETER Experiment Name: At_Drought_Soil_Dry_P Parameter: Organism Value: A. thaliana
  misc_feature: MA Experiment 20001557 PARAMETER Experiment Name: At_Drought_Soil_Dry_P Parameter: Plant Line Value: WS
  misc_feature: MA Experiment 20001557 PARAMETER Experiment Name: At_Drought_Soil_Dry_P Parameter: Post Timepoint (hr) Value: 3
  misc_feature: MA Experiment 20001557 PARAMETER Experiment Name: At_Drought_Soil_Dry_P Parameter: Post-Treatment Value: Re-Water vs. No Drought
  misc_feature: MA Experiment 20001557 PARAMETER Experiment Name: At_Drought_Soil_Dry_P Parameter: Timepoint (day) Value: 13
  misc_feature: MA Experiment 20001557 PARAMETER Experiment Name: At_Drought_Soil_Dry_P Parameter: Treatment Value: Drought vs. No Drought
gactctctacgtttccttcgtcttcttcttcttctctcttccctatatataaaacccttcatgttgtttagatcaggttaagatcattttgagtctctccaaaccctaatatcaaattctcatctcataactaacaaaagcatcccaaaatttctagtaaatggcggaggaattcgatgaatctgaggtagtgttctccgatggtttaagctccgttctccataaagagaacgagaatcgcctgtttggttctgatatggagaggaagaagacgaggcggatcaagaggacgacgacggagaaggcgtcgttgtcgagctcgcttccggtgagtatccctgagaacatctttcggaggtacgttgggaaagaggaggatgaatactcagaggaggaatattccgaaggaggaggagagatgattccgccgcatattatgatcggacggaggatccaaggaggacaaatggcgttttccgtttgttcaggtagtggaaggactcttaagggaagagatctgagccgggttcggaattcggttcttaggttaaccggttttttggaggcttgaaccgttaccggtttgccatacttcatcatcttttcccaactcttttgtttttttgcatattacggaaaattgctagtggatccccgtgttgtttatttaagtaaagggtggggaaaatgtgaaacaaagctttctccttagtttttgtttttccatattcttttgtttttcctaaattgtaataggaaacaaggaaatttcgggttaattatgagaagaataacaataattcttgtgttaggattt

SEQ ID NO: 21190 - protein, 136 aa, Arabidopsis thaliana
  peptide (1)..(136): Ceres Seq. ID no. 13496798
  misc_feature (1)..(135): Pfam Name: Protein of unknown function, DUF584 Pfam Description: Protein of unknown function, DUF584
  misc_feature (42)..(135): Homolog of NCBI NO: 7485420 NR Description: hypothetical protein F13C5.150 - Arabidopsis
  misc_feature (3)..(133): Homolog of NCBI NO: 15234679 NR Description: hypothetical protein [Arabidopsis thaliana]
  misc_feature (4)..(135): Homolog of NCBI NO: 15230636 NR Description: expressed protein [Arabidopsis thaliana]
  misc_feature (52)..(134): Homolog of NCBI NO: 34909498 NR Description: P0481E12.19 [Oryza sativa (japonica
  misc_feature (3)..(135): Homolog of NCBI NO: 26452217 NR Description: unknown protein [Arabidopsis thaliana]
  misc_feature (3)..(135): Homolog of NCBI NO: 25354620 NR Description: hypothetical protein AT4g04630 [imported] -
  misc_feature (3)..(135): Homolog of NCBI NO: 18412629 NR Description: expressed protein [Arabidopsis thaliana]
  misc_feature (56)..(136): Homolog of NCBI NO: 34910798 NR Description: P0042A10.28 [Oryza sativa (japonica
  misc_feature (1)..(136): Homolog of NCBI NO: 15220508 NR Description: expressed protein [Arabidopsis thaliana]
  misc_feature (1)..(136): Homolog of NCBI NO: 18403527 NR Description: expressed protein [Arabidopsis thaliana]
MAEEFDESEVVFSDGLSSVLHKENENRLFGSDMERKKTRRIKRTTTEKASLSSSLPVSIPENIFRRYVGKEEDEYSEEEYSEGGGEMIPPHIMIGRRIQGGQMAFSVCSGSGRTLKGRDLSRVRNSVLRLTGFLEA

SEQ ID NO: 21191 - protein, 104 aa, Arabidopsis thaliana
  peptide (1)..(104): Ceres Seq. ID no. 13496799
  misc_feature (1)..(103): Pfam Name: Protein of unknown function, DUF584 Pfam Description: Protein of unknown function, DUF584
  misc_feature (10)..(103): Homolog of NCBI NO: 7485420 NR Description: hypothetical protein F13C5.150 - Arabidopsis
  misc_feature (1)..(101): Homolog of NCBI NO: 15234679 NR Description: hypothetical protein [Arabidopsis thaliana]
  misc_feature (1)..(103): Homolog of NCBI NO: 15230636 NR Description: expressed protein [Arabidopsis thaliana]
  misc_feature (20)..(102): Homolog of NCBI NO: 34909498 NR Description: P0481E12.19 [Oryza sativa (japonica
  misc_feature (1)..(103): Homolog of NCBI NO: 26452217 NR Description: unknown protein [Arabidopsis thaliana]
  misc_feature (1)..(103): Homolog of NCBI NO: 25354620 NR Description: hypothetical protein AT4g04630 [imported] -
  misc_feature (1)..(103): Homolog of NCBI NO: 18412629 NR Description: expressed protein [Arabidopsis thaliana]
  misc_feature (24)..(104): Homolog of NCBI NO: 34910798 NR Description: P0042A10.28 [Oryza sativa (japonica
  misc_feature (1)..(104): Homolog of NCBI NO: 15220508 NR Description: expressed protein [Arabidopsis thaliana]
  misc_feature (1)..(104): Homolog of NCBI NO: 18403527 NR Description: expressed protein [Arabidopsis thaliana]
MERKKTRRIKRTTTEKASLSSSLPVSIPENIFRRYVGKEEDEYSEEEYSEGGGEMIPPHIMIGRRIQGGQMAFSVCSGSGRTLKGRDLSRVRNSVLRLTGFLEA

SEQ ID NO: 21192 - DNA, 1010 bp, Arabidopsis thaliana
  misc_feature (1)..(1010): Ceres Seq. ID no. 13648013
  misc_feature: MA Experiment ID: 108435 Result: Down-regulated in Transcription
  misc_feature: MA Experiment 108435 PARAMETER Experiment Name: At_stm_Mutants_cDNA_P Parameter: Plant Line Value: wt Landsburg vs stm
  misc_feature: MA Experiment 108435 PARAMETER Experiment Name: At_stm_Mutants_cDNA_P Parameter: Tissue Value: Shoot Apical Meristem Region
  misc_feature: MA Experiment ID: 108461 Result: Up-regulated in Transcription
  misc_feature: MA Experiment 108461 PARAMETER Experiment Name: At_Germinating_Seeds_cDNA_P Parameter: Age (day) Value: 1 vs. 0
  misc_feature: MA Experiment 108461 PARAMETER Experiment Name: At_Germinating_Seeds_cDNA_P Parameter: Tissue Value: Germinating Seeds
  misc_feature: MA Experiment ID: 108462 Result: Up-regulated in Transcription
  misc_feature: MA Experiment 108462 PARAMETER Experiment Name: At_Germinating_Seeds_cDNA_P Parameter: Age (day) Value: 2 vs. 0
  misc_feature: MA Experiment 108462 PARAMETER Experiment Name: At_Germinating_Seeds_cDNA_P Parameter: Tissue Value: Germinating Seeds
  misc_feature: MA Experiment ID: 108488 Result: Up-regulated in Transcription
  misc_feature: MA Experiment ID: 108561 Result: Down-regulated in Transcription
  misc_feature: MA Experiment 108561 PARAMETER Experiment Name: At_100uM_ABA_cDNA_P Parameter: Timepoint (hr) Value: 6
  misc_feature: MA Experiment 108561 PARAMETER Experiment Name: At_100uM_ABA_cDNA_P Parameter: Tissue Value: Aerial
  misc_feature: MA Experiment 108561 PARAMETER Experiment Name: At_100uM_ABA_cDNA_P Parameter: Treatment Value: 100uM ABA vs. No Treatment
  misc_feature: MA Experiment ID: 108573 Result: Down-regulated in Transcription
  misc_feature: MA Experiment 108573 PARAMETER Experiment Name: At_Drought_cDNA_P Parameter: Timepoint (hr) Value: 6
  misc_feature: MA Experiment 108573 PARAMETER Experiment Name: At_Drought_cDNA_P Parameter: Tissue Value: Aerial
  misc_feature: MA Experiment 108573 PARAMETER Experiment Name: At_Drought_cDNA_P Parameter: Treatment Value: Drought vs. No Drought
  misc_feature: MA Experiment ID: 108585 Result: Down-regulated in Transcription
  misc_feature: MA Experiment 108585 PARAMETER Experiment Name: At_5mM_NaNP_cDNA_P Parameter: Timepoint (hr) Value: 6
  misc_feature: MA Experiment 108585 PARAMETER Experiment Name: At_5mM_NaNP_cDNA_P Parameter: Tissue Value: Aerial
  misc_feature: MA Experiment 108585 PARAMETER Experiment Name: At_5mM_NaNP_cDNA_P Parameter: Treatment Value: null
  misc_feature: MA Experiment ID: 108595 Result: Down-regulated in Transcription
  misc_feature: MA Experiment 108595 PARAMETER Experiment Name: At_Ler-pi_Ovule_cDNA_P Parameter: Plant Line Value: null
  misc_feature: MA Experiment ID: 108607 Result: Down-regulated in Transcription
  misc_feature: MA Experiment 108607 PARAMETER Experiment Name: At_100uM_ABA_cDNA_P Parameter: Timepoint (hr) Value: 4
  misc_feature: MA Experiment 108607 PARAMETER Experiment Name: At_100uM_ABA_cDNA_P Parameter: Tissue Value: Aerial
  misc_feature: MA Experiment 108607 PARAMETER Experiment Name: At_100uM_ABA_cDNA_P Parameter: Treatment Value: 100uM ABA vs. No Treatment
  misc_feature: MA Experiment ID: 108668 Result: Down-regulated in Transcription
  misc_feature: MA Experiment 108668 PARAMETER Experiment Name: At_2mM_SA_cDNA_P Parameter: Plant Line Value: WS
  misc_feature: MA Experiment 108668 PARAMETER Experiment Name: At_2mM_SA_cDNA_P Parameter: Timepoint (hr) Value: 6
  misc_feature: MA Experiment 108668 PARAMETER Experiment Name: At_2mM_SA_cDNA_P Parameter: Treatment Value: 2mM SA vs. No Treatment
  misc_feature: MA Experiment ID: 20000070 Result: Down-regulated in Transcription
  misc_feature: MA Experiment 20000070 PARAMETER Experiment Name: At_100uM_ABA_Mutants_cDNA_P Parameter: Plant Line Value: CS24
  misc_feature: MA Experiment 20000070 PARAMETER Experiment Name: At_100uM_ABA_Mutants_cDNA_P Parameter: Timepoint (hr) Value: 6
  misc_feature: MA Experiment 20000070 PARAMETER Experiment Name: At_100uM_ABA_Mutants_cDNA_P Parameter: Tissue Value: Aerial
  misc_feature: MA Experiment 20000070 PARAMETER Experiment Name: At_100uM_ABA_Mutants_cDNA_P Parameter: Treatment Value: 100uM ABA vs. No Treatment
  misc_feature: MA Experiment ID: 20000071 Result: Down-regulated in Transcription
  misc_feature: MA Experiment 20000071 PARAMETER Experiment Name: At_100uM_ABA_Mutants_cDNA_P Parameter: Plant Line Value: CS8104
  misc_feature: MA Experiment 20000071 PARAMETER Experiment Name: At_100uM_ABA_Mutants_cDNA_P Parameter: Timepoint (hr) Value: 6
  misc_feature: MA Experiment 20000071 PARAMETER Experiment Name: At_100uM_ABA_Mutants_cDNA_P Parameter: Tissue Value: Aerial
  misc_feature: MA Experiment 20000071 PARAMETER Experiment Name: At_100uM_ABA_Mutants_cDNA_P Parameter: Treatment Value: 100uM ABA vs. No Treatment
  misc_feature: MA Experiment ID: 20000086 Result: Down-regulated in Transcription
  misc_feature: MA Experiment 20000086 PARAMETER Experiment Name: At_100uM_ABA_Mutants_cDNA_P Parameter: Plant Line Value: CS22
  misc_feature: MA Experiment 20000086 PARAMETER Experiment Name: At_100uM_ABA_Mutants_cDNA_P Parameter: Timepoint (hr) Value: 6
  misc_feature: MA Experiment 20000086 PARAMETER Experiment Name: At_100uM_ABA_Mutants_cDNA_P Parameter: Tissue Value: Aerial
  misc_feature: MA Experiment 20000086 PARAMETER Experiment Name: At_100uM_ABA_Mutants_cDNA_P Parameter: Treatment Value: 100uM ABA vs. No Treatment
  misc_feature: MA Experiment ID: 20000112 Result: Down-regulated in Transcription
  misc_feature: MA Experiment 20000112 PARAMETER Experiment Name: At_42deg_Heat_cDNA_P Parameter: Temperature (deg C) Value: 42 vs. 22
  misc_feature: MA Experiment 20000112 PARAMETER Experiment Name: At_42deg_Heat_cDNA_P Parameter: Timepoint (hr) Value: 2
  misc_feature: MA Experiment 20000112 PARAMETER Experiment Name: At_42deg_Heat_cDNA_P Parameter: Tissue Value: Aerial
  misc_feature: MA Experiment ID: 20000113 Result: Down-regulated in Transcription
  misc_feature: MA Experiment 20000113 PARAMETER Experiment Name: At_42deg_Heat_cDNA_P Parameter: Temperature (deg C) Value: 42 vs. 22
  misc_feature: MA Experiment 20000113 PARAMETER Experiment Name: At_42deg_Heat_cDNA_P Parameter: Timepoint (hr) Value: 8
  misc_feature: MA Experiment 20000113 PARAMETER Experiment Name: At_42deg_Heat_cDNA_P Parameter: Tissue Value: Aerial
  misc_feature: MA Experiment ID: 20000117 Result: Down-regulated in Transcription
  misc_feature: MA Experiment 20000117 PARAMETER Experiment Name: At_100uM_ABA_Mutants_cDNA_P Parameter: Plant Line Value: Columbia
  misc_feature: MA Experiment 20000117 PARAMETER Experiment Name: At_100uM_ABA_Mutants_cDNA_P Parameter: Timepoint (hr) Value: 6
  misc_feature: MA Experiment 20000117 PARAMETER Experiment Name: At_100uM_ABA_Mutants_cDNA_P Parameter: Tissue Value: Aerial
  misc_feature: MA Experiment 20000117 PARAMETER Experiment Name: At_100uM_ABA_Mutants_cDNA_P Parameter: Treatment Value: 100uM ABA vs. No Treatment
  misc_feature: MA Experiment ID: 20000173 Result: Down-regulated in Transcription
  misc_feature: MA Experiment 20000173 PARAMETER Experiment Name: At_42deg_Heat_P Parameter: Age (day) Value: 14
  misc_feature: MA Experiment 20000173 PARAMETER Experiment Name: At_42deg_Heat_P Parameter: Organism Value: A. thaliana
  misc_feature: MA Experiment 20000173 PARAMETER Experiment Name: At_42deg_Heat_P Parameter: Plant Line Value: WS
  misc_feature: MA Experiment 20000173 PARAMETER Experiment Name: At_42deg_Heat_P Parameter: Temperature (deg C) Value: 42 vs. 22
  misc_feature: MA Experiment 20000173 PARAMETER Experiment Name: At_42deg_Heat_P Parameter: Timepoint (hr) Value: 6
  misc_feature: MA Experiment 20000173 PARAMETER Experiment Name: At_42deg_Heat_P Parameter: Tissue Value: Aerial
  misc_feature: MA Experiment ID: 20000180 Result: Up-regulated in Transcription
  misc_feature: MA Experiment 20000180 PARAMETER Experiment Name: At_Germinating_Seeds_P Parameter: Age (hr) Value: 24 vs. 0
  misc_feature: MA Experiment 20000180 PARAMETER Experiment Name: At_Germinating_Seeds_P Parameter: Tissue Value: Germinating Seeds
  misc_feature: MA Experiment ID: 20000182 Result: Down-regulated in Transcription
  misc_feature: MA Experiment 20000182 PARAMETER Experiment Name: At_2mM_SA_P Parameter: Age (day) Value: 14
  misc_feature: MA Experiment 20000182 PARAMETER Experiment Name: At_2mM_SA_P Parameter: Organism Value: A. thaliana
  misc_feature: MA Experiment 20000182 PARAMETER Experiment Name: At_2mM_SA_P Parameter: Plant Line Value: WS
  misc_feature: MA Experiment 20000182 PARAMETER Experiment Name: At_2mM_SA_P Parameter: Timepoint (hr) Value: 6
  misc_feature: MA Experiment 20000182 PARAMETER Experiment Name: At_2mM_SA_P Parameter: Tissue Value: Aerial
  misc_feature: MA Experiment 20000182 PARAMETER Experiment Name: At_2mM_SA_P Parameter: Treatment Value: 2mM SA vs. No Treatment
  misc_feature: MA Experiment ID: 20000185 Result: Down-regulated in Transcription
  misc_feature: MA Experiment 20000185 PARAMETER Experiment Name: At_Roots__P Parameter: Age (day) Value: 7 vs. 21
  misc_feature: MA Experiment 20000185 PARAMETER Experiment Name: At_Roots__P Parameter: Organism Value: A. thaliana
  misc_feature: MA Experiment 20000185 PARAMETER Experiment Name: At_Roots__P Parameter: Tissue Value: Roots vs. Whole Plant
  misc_feature: MA Experiment ID: 20000224 Result: Up-regulated in Transcription
  misc_feature: MA Experiment ID: 20000234 Result: Up-regulated in Transcription
  misc_feature: MA Experiment 20000234 PARAMETER Experiment Name: At_Siliques_P Parameter: Age (day) Value: 21
  misc_feature: MA Experiment 20000234 PARAMETER Experiment Name: At_Siliques_P Parameter: Organism Value: A. thaliana
  misc_feature: MA Experiment 20000234 PARAMETER Experiment Name: At_Siliques_P Parameter: Plant Line Value: WS
  misc_feature: MA Experiment 20000234 PARAMETER Experiment Name: At_Siliques_P Parameter: Tissue Value: Less Than 5mm Siliques vs. Whole Plant
  misc_feature: MA Experiment ID: 20000437 Result: Down-regulated in Transcription
  misc_feature: MA Experiment 20000437 PARAMETER Experiment Name: At_Drought_P Parameter: Age (day) Value: 8
  misc_feature: MA Experiment 20000437 PARAMETER Experiment Name: At_Drought_P Parameter: Organism Value: A. thaliana
  misc_feature: MA Experiment 20000437 PARAMETER Experiment Name: At_Drought_P Parameter: Plant Line Value: WS
  misc_feature: MA Experiment 20000437 PARAMETER Experiment Name: At_Drought_P Parameter: Timepoint (hr) Value: 24
  misc_feature: MA Experiment 20000437 PARAMETER Experiment Name: At_Drought_P Parameter: Tissue Value: Whole Plant
  misc_feature: MA Experiment 20000437 PARAMETER Experiment Name: At_Drought_P Parameter: Treatment Value: Drought vs. No Drought
  misc_feature: MA Experiment ID: 20000438 Result: Up-regulated in Transcription
  misc_feature: MA Experiment 20000438 PARAMETER Experiment Name: At_Shoots__P Parameter: Age (day) Value: 14
  misc_feature: MA Experiment 20000438 PARAMETER Experiment Name: At_Shoots__P Parameter: Tissue Value: Shoots vs. Whole Plant
  misc_feature: MA Experiment ID: 20000439 Result: Down-regulated in Transcription
  misc_feature: MA Experiment 20000439 PARAMETER Experiment Name: At_Roots__P Parameter: Age (day) Value: 14 vs. 21
  misc_feature: MA Experiment 20000439 PARAMETER Experiment Name: At_Roots__P Parameter: Organism Value: A. thaliana
  misc_feature: MA Experiment 20000439 PARAMETER Experiment Name: At_Roots__P Parameter: Tissue Value: Roots vs. Whole Plant
  misc_feature: MA Experiment ID: 20000794 Result: Down-regulated in Transcription
  misc_feature: MA Experiment 20000794 PARAMETER Experiment Name: At_Petals_P Parameter: Age (day) Value: 23-25 days
  misc_feature: MA Experiment 20000794 PARAMETER Experiment Name: At_Petals_P Parameter: Plant Line Value: WS
  misc_feature: MA Experiment 20000794 PARAMETER Experiment Name: At_Petals_P Parameter: Tissue Value: Petals vs. Whole plant
  misc_feature: MA Experiment ID: 20001248 Result: Down-regulated in Transcription
  misc_feature: MA Experiment 20001248 PARAMETER Experiment Name: At_Far-red-induction_P Parameter: Age (day) Value: 7
  misc_feature: MA Experiment 20001248 PARAMETER Experiment Name: At_Far-red-induction_P Parameter: Light Value: Far-red vs. White
  misc_feature: MA Experiment 20001248 PARAMETER Experiment Name: At_Far-red-induction_P Parameter: Organism Value: A. thaliana
  misc_feature: MA Experiment 20001248 PARAMETER Experiment Name: At_Far-red-induction_P Parameter: Plant Line Value: Columbia
  misc_feature: MA Experiment 20001248 PARAMETER Experiment Name: At_Far-red-induction_P Parameter: Timepoint (hr) Value: 4
  misc_feature: MA Experiment 20001248 PARAMETER Experiment Name: At_Far-red-induction_P Parameter: Tissue Value: Whole Plant
  misc_feature: MA Experiment ID: 20001450 Result: Down-regulated in Transcription
  misc_feature: MA Experiment 20001450 PARAMETER Experiment Name: At_Far-red-induction_P Parameter: Age (day) Value: 7
  misc_feature: MA Experiment 20001450 PARAMETER Experiment Name: At_Far-red-induction_P Parameter: Light Value: Far-red vs. White
  misc_feature: MA Experiment 20001450 PARAMETER Experiment Name: At_Far-red-induction_P Parameter: Organism Value: A. thaliana
  misc_feature: MA Experiment 20001450 PARAMETER Experiment Name: At_Far-red-induction_P Parameter: Plant Line Value: Columbia
  misc_feature: MA Experiment 20001450 PARAMETER Experiment Name: At_Far-red-induction_P Parameter: Timepoint (hr) Value: 8
  misc_feature: MA Experiment 20001450 PARAMETER Experiment Name: At_Far-red-induction_P Parameter: Tissue Value: Whole Plant
  misc_feature: MA Experiment ID: 20001905 Result: Down-regulated in Transcription
  misc_feature: MA Experiment 20001905 PARAMETER Experiment Name: At_Drought_Reproduction_P Parameter: Age (day) Value: 40
  misc_feature: MA Experiment 20001905 PARAMETER Experiment Name: At_Drought_Reproduction_P Parameter: Organism Value: A. thaliana
  misc_feature: MA Experiment 20001905 PARAMETER Experiment Name: At_Drought_Reproduction_P Parameter: Plant Line Value: WS
  misc_feature: MA Experiment 20001905 PARAMETER Experiment Name: At_Drought_Reproduction_P Parameter: Timepoint (day) Value: 10
  misc_feature: MA Experiment 20001905 PARAMETER Experiment Name: At_Drought_Reproduction_P Parameter: Tissue Value: Rosettes
  misc_feature: MA Experiment 20001905 PARAMETER Experiment Name: At_Drought_Reproduction_P Parameter: Treatment Value: Drought vs. No Drought
  misc_feature: MA Experiment ID: 20001906 Result: Down-regulated in Transcription
  misc_feature: MA Experiment 20001906 PARAMETER Experiment Name: At_Drought_Reproduction_P Parameter: Age (day) Value: 35
  misc_feature: MA Experiment 20001906 PARAMETER Experiment Name: At_Drought_Reproduction_P Parameter: Organism Value: A. thaliana
  misc_feature: MA Experiment 20001906 PARAMETER Experiment Name: At_Drought_Reproduction_P Parameter: Plant Line Value: WS
  misc_feature: MA Experiment 20001906 PARAMETER Experiment Name: At_Drought_Reproduction_P Parameter: Timepoint (day) Value: 5
  misc_feature: MA Experiment 20001906 PARAMETER Experiment Name: At_Drought_Reproduction_P Parameter: Tissue Value: Siliques
  misc_feature: MA Experiment 20001906 PARAMETER Experiment Name: At_Drought_Reproduction_P Parameter: Treatment Value: Drought vs. No Drought
  misc_feature: MA Experiment ID: 20001908 Result: Down-regulated in Transcription
  misc_feature: MA Experiment 20001908 PARAMETER Experiment Name: At_Drought_Reproduction_P Parameter: Age (day) Value: 40
  misc_feature: MA Experiment 20001908 PARAMETER Experiment Name: At_Drought_Reproduction_P Parameter: Organism Value: A. thaliana
  misc_feature: MA Experiment 20001908 PARAMETER Experiment Name: At_Drought_Reproduction_P Parameter: Plant Line Value: WS
  misc_feature: MA Experiment 20001908 PARAMETER Experiment Name: At_Drought_Reproduction_P Parameter: Timepoint (day) Value: 10
  misc_feature: MA Experiment 20001908 PARAMETER Experiment Name: At_Drought_Reproduction_P Parameter: Tissue Value: Siliques
  misc_feature: MA Experiment 20001908 PARAMETER Experiment Name: At_Drought_Reproduction_P Parameter: Treatment Value: Drought vs. No Drought
  misc_feature: Phenotype: WHOLE PLANT Color-Yellow-Green Viable 1
  misc_feature: Phenotype: WHOLE PLANT Color-Yellow-Green Viable 1
  misc_feature: Phenotype: WHOLE PLANT Color-Yellow-Green Viable 1
  misc_feature: Phenotype: WHOLE PLANT Color-Yellow-Green Viable 1
  misc_feature: Phenotype: WHOLE PLANT Color-Yellow-Green Viable 1
agaaccactagttgtgatttgtgaaactactgaagtaaacaagtaaaccacaacaatggcgttgttctccccgccaatctcttcttcatctcttcaaaatcccaatttcatcccgaaattctcattctctctcctctccagtaaccgcttctctctcctctccgtcactcgagcttcctccgacagtggatcaacctctcccaccgccgccgtctccgtagaggctcctgagcccgtggaagtgatagttaaagagcctccccaatcaacaccagctgttaaaaaggaagaaaccgccaccgctaaaaatgttgccgtcgaaggtgaagagatgaaaacaacggagagtgttatcaaattccaagatgcgaggtggattaatggaacttgggatctgaaacaattcgagaaagatggaaaaaccgattgggattctgtaatcgttgctgaggcaaagagaagaaaatggctagaagagaatccagaaacaacgagtaacgacgagccagtgcttttcgatacatcgattattccatggtgggcttggattaagagataccacttacctgaagctgaactcttaaatggtcgtgcggcgatgataggattctttatggcttactttgtcgatagtcttactggagtaggacttgttgatcaaatggggaatttcttctgcaagacactattgtttgtggctgtggccggagttttgtttattcgtaagaatgaggatgtggataaactcaagaatttgtttgatgagactacattgtatgataagcaatggcaagcagcttggaaaaatgatgatgatgagtcattgggttctaagaagaagtgataacaaagattcttgctttctttttttgttgttgttgtaattaggagatgaacttaccaaatgtaatatcaagagatttgaacaatgtttcctcagattatcgttaatcatgtctagtctctacttaaaaaaaaaaaaaaaaaaaactcgagggggggcccggtac

SEQ ID NO: 21193 - protein, 262 aa, Arabidopsis thaliana
  peptide (1)..(262): Ceres Seq. ID no. 15219523
  misc_feature (1)..(261): Homolog of NCBI NO: 8978078 NR Description: Lil3 protein [Arabidopsis thaliana]
  misc_feature (1)..(261): Homolog of NCBI NO: 30695110 NR Description: Lil3 protein [Arabidopsis thaliana]
  misc_feature (1)..(262): Homolog of NCBI NO: 18414927 NR Description: Lil3 protein [Arabidopsis thaliana]
  misc_feature (1)..(262): Homolog of NCBI NO: 7485188 NR Description: hypothetical protein - Arabidopsis thaliana
  misc_feature (1)..(262): Homolog of NCBI NO: 21555799 NR Description: Lil3 protein [Arabidopsis thaliana]
  misc_feature (1)..(261): Homolog of NCBI NO: 8978078 NR Description: Lil3 protein [Arabidopsis thaliana]
  misc_feature (1)..(261): Homolog of NCBI NO: 30695110 NR Description: Lil3 protein [Arabidopsis thaliana]
  misc_feature (1)..(262): Homolog of NCBI NO: 18414927 NR Description: Lil3 protein [Arabidopsis thaliana]
  misc_feature (1)..(262): Homolog of NCBI NO: 7485188 NR Description: hypothetical protein - Arabidopsis thaliana
  misc_feature (1)..(262): Homolog of NCBI NO: 21555799 NR Description: Lil3 protein [Arabidopsis thaliana]
MALFSPPISSSSLQNPNFIPKFSFSLLSSNRFSLLSVTRASSDSGSTSPTAAVSVEAPEPVEVIVKEPPQSTPAVKKEETATAKNVAVEGEEMKTTESVIKFQDARWINGTWDLKQFEKDGKTDWDSVIVAEAKRRKWLEENPETTSNDEPVLFDTSIIPWWAWIKRYHLPEAELLNGRAAMIGFFMAYFVDSLTGVGLVDQMGNFFCKTLLFVAVAGVLFIRKNEDVDKLKNLFDETTLYDKQWQAAWKNDDDESLGSKKK

SEQ ID NO: 21194 - protein, 170 aa, Arabidopsis thaliana
  peptide (1)..(170): Ceres Seq. ID no. 15219524
  misc_feature (1)..(169): Homolog of NCBI NO: 8978078 NR Description: Lil3 protein [Arabidopsis thaliana]
  misc_feature (1)..(169): Homolog of NCBI NO: 30695110 NR Description: Lil3 protein [Arabidopsis thaliana]
  misc_feature (1)..(170): Homolog of NCBI NO: 18414927 NR Description: Lil3 protein [Arabidopsis thaliana]
  misc_feature (1)..(170): Homolog of NCBI NO: 7485188 NR Description: hypothetical protein - Arabidopsis thaliana
  misc_feature (1)..(170): Homolog of NCBI NO: 21555799 NR Description: Lil3 protein [Arabidopsis thaliana]
  misc_feature (1)..(169): Homolog of NCBI NO: 8978078 NR Description: Lil3 protein [Arabidopsis thaliana]
  misc_feature (1)..(169): Homolog of NCBI NO: 30695110 NR Description: Lil3 protein [Arabidopsis thaliana]
  misc_feature (1)..(170): Homolog of NCBI NO: 18414927 NR Description: Lil3 protein [Arabidopsis thaliana]
  misc_feature (1)..(170): Homolog of NCBI NO: 7485188 NR Description: hypothetical protein - Arabidopsis thaliana
  misc_feature (1)..(170): Homolog of NCBI NO: 21555799 NR Description: Lil3 protein [Arabidopsis thaliana]
MKTTESVIKFQDARWINGTWDLKQFEKDGKTDWDSVIVAEAKRRKWLEENPETTSNDEPVLFDTSIIPWWAWIKRYHLPEAELLNGRAAMIGFFMAYFVDSLTGVGLVDQMGNFFCKTLLFVAVAGVLFIRKNEDVDKLKNLFDETTLYDKQWQAAWKNDDDESLGSKKK

SEQ ID NO: 21195 - DNA, 2753 bp, Arabidopsis thaliana
  misc_feature (1)..(2753): Ceres Seq. ID no. 13492484
  misc_feature: MA Experiment ID: 108464 Result: Down-regulated in Transcription
  misc_feature: MA Experiment 108464 PARAMETER Experiment Name: At_Germinating_Seeds_cDNA_P Parameter: Age (day) Value: 4 vs. 0
  misc_feature: MA Experiment 108464 PARAMETER Experiment Name: At_Germinating_Seeds_cDNA_P Parameter: Tissue Value: Germinating Seeds
  misc_feature: MA Experiment ID: 20001911 Result: Down-regulated in Transcription
  misc_feature: MA Experiment 20001911 PARAMETER Experiment Name: At_Drought_Reproduction_P Parameter: Age (day) Value: 40
  misc_feature: MA Experiment 20001911 PARAMETER Experiment Name: At_Drought_Reproduction_P Parameter: Organism Value: A. thaliana
  misc_feature: MA Experiment 20001911 PARAMETER Experiment Name: At_Drought_Reproduction_P Parameter: Plant Line Value: WS
  misc_feature: MA Experiment 20001911 PARAMETER Experiment Name: At_Drought_Reproduction_P Parameter: Timepoint (day) Value: 10
  misc_feature: MA Experiment 20001911 PARAMETER Experiment Name: At_Drought_Reproduction_P Parameter: Tissue Value: Flowers
  misc_feature: MA Experiment 20001911 PARAMETER Experiment Name: At_Drought_Reproduction_P Parameter: Treatment Value: Drought vs. No Drought
gacttttctcggacttgggagacaatggagactgaatacgaccaagttcttcgatccgttgctcaggtgaacatcgccgaccaaatcggagaatccgacgacgtagaaagagacggaaacggcgtaaaagtttcgtgcttcactgaagttttcgatgatgttactatccagttccagatcatccgtctcgcgaaacagatttacgtatgggtcggttgcaattccgccaaatttgggagtttgtacgcagccgcttcaacacgaccgagcaatacagtgagtgttacatcggtacttggtggaacatctgataacactggatctggcattgcgcgtagattagtgttgaagactggtctcaatataatactggcttgcaacatccctaaaaacaatcccttgcttgaggcaaaagctgagaaagtgttgattagaaagctgattgatcttggttacacaatgtcaaaacctgtaagagcaacataacccaatttagctgtttcttgaggttgtttctccttcattgtgtcctaccctttttatacggaaatttgtgactgattctactaaggtatcttgatcgattggcatgaaatgatcactttttttttggttttcgataagttttcttggcattgtatcttgaagatactatcttctccccatttcgtagctgcattcatctgcataatgctcgatgagaaatgtttaaagcgtttattacttcgaccacaaaacaaagagagagttggttccttgttcatgactttcaaatgtgtttgttttcttattcttcttgccgatttggcgtgatttcttcacctaatttggaatatagttatggtgatgcaatatttgcatgtttgatcttttgttcggtaaaaaggcaaatcctttggacataccaaagtgtcaaactatatgatgaaaccattcttctttccctctatatttgtcacttgatgatctgtactattgaattgatacagagttaccaccaagaattagatgatgtgtgtatattgacgtctatataaaaatcagaagttgttttggcatctaacctttaaatttgtgaactctctgaccaaatgtaaataaaaagaattgatttttttggtttggttcggtttggccttacacacggaaactaattggacccgaataaaccgaaattgaacaaaaccctaaattatgttttacttcactcttcaataaatcatgattttcttttaaactttttatatccataaacgacgacgttttggctggcatatggtttgggtttttcacaaaatttaggattgatatttttagttttttattctcagagacgattgtgaggaagcttgttgatcgttgcggtctgagtaagcgagtagatcattggtttgtctcttctttcttacttcgattctttgcttcatccagaataatcacagttccaattctattacctttctttttggtgtttgtgactcttatgttcatagctcttctgttgaattcacaagcattgttttctttttgatctgattcatccctgagagcataatgtgattagttgtattcctgacactcctctgttacgtgtattttactatttagtttcagtcttggtagacacatataaactgagaacattgcaagtaaaaaaaaaagagttttctttgagaaatttctctttagaatggatatgccaaagagtatcctgatcctctacttagctatataactagggatttttgaatctttgctatcaggttttgttatttactttctctggccaagccaactataaaagttaatggaagaggaccattgtgaggattctcataattatatgggttttgctctgcatcaggtaaaactagtattggttctataatactgcaaaagttagtttgttgcttttgagttgatttccctatgcctgcaggctaaacttgctctggaggctcttgaagttcccgtggggtctctatttttttgctttggcttcataccaatttgtgtttcgtaccagtgtatcaattaatgtcatataggataactaatgcgttttctttctggtttgtgtggaccagatgtgtttttcttgaggacggtaaggtcattgcttcagggcgaaaccgaacaaatgagacacgcaatgccacaagacatgcagagatggaagcaattgatcagcttgtcggacagtggcagaaagatggactctcaccttcacaagtcgctgagaaattctcgaaatgtgttctttatgtaacatgtgaaccttgcataatgtgtgcatcggccttatcgtttctcggtatcaaggaagtgtattatggatgtccaaatgataaatttgggggatgtggttccattttgtcgcttcacttaggtagtgaggaagctcaaagaggaaaaggatacaagtgcagaggaggaataatggcagaagaagctgtctctcttttcaaatgtttctatgagcaaggcaatcccaacgctccaaagccacaccgccctgttgttcaaagagagaggacttgaggtgaacgtatcgttaaaactgaagttcttcggcttctgcaacaacaacaatcagacctgaagattacactcacagtccagttcaaacaacaacaatccagagcagaagccataatttgggactccaaaagcttatttattagttttggattttattcacatatatgacaatcaaaataacatgttttgttatcaaatcatggctacttcct

SEQ ID NO: 21196 - protein, 167 aa, Arabidopsis thaliana
  peptide (1)..(167): Ceres Seq. ID no. 13492485
  misc_feature (1)..(101): Pfam Name: Cytidine and deoxycytidylate deaminase Pfam Description: Cytidine and deoxycytidylate deaminase
  misc_feature (18)..(159): Homolog of NCBI NO: 17541138 NR Description: Cytidine, cytosine, dCTP et al deaminase
  misc_feature (18)..(159): Homolog of NCBI NO: 39587698 NR Description: Hypothetical protein CBG01804 [Caenorhabditis
  misc_feature (18)..(115): Homolog of NCBI NO: 34852600 NR Description: similar to RIKEN cDNA 4933426M09 [Rattus
  misc_feature (18)..(155): Homolog of NCBI NO: 21355527 NR Description: CG5292-PA [Drosophila melanogaster]
  misc_feature (18)..(53): Homolog of NCBI NO: 23619417 NR Description: cytidine and deoxycytidylate deaminase family,
  misc_feature (72)..(161): Homolog of NCBI NO: 23619417 NR Description: cytidine and deoxycytidylate deaminase family,
  misc_feature (23)..(156): Homolog of NCBI NO: 32698845 NR Description: hypothetical protein DKFZp686L1118 [Homo sapiens]
  misc_feature (18)..(156): Homolog of NCBI NO: 27754114 NR Description: RIKEN cDNA 4933426M09 [Mus musculus]
  misc_feature (46)..(167): Homolog of NCBI NO: 30694260 NR Description: expressed protein [Arabidopsis thaliana]
  misc_feature (1)..(153): Homolog of NCBI NO: 8778532 NR Description: F21D18.9 [Arabidopsis thaliana]
MSYRITNAFSFWFVWTRCVFLEDGKVIASGRNRTNETRNATRHAEMEAIDQLVGQWQKDGLSPSQVAEKFSKCVLYVTCEPCIMCASALSFLGIKEVYYGCPNDKFGGCGSILSLHLGSEEAQRGKGYKCRGGIMAEEAVSLFKCFYEQGNPNAPKPHRPVVQRERT

SEQ ID NO: 21197 - protein, 161 aa, Arabidopsis thaliana
  peptide (1)..(161): Ceres Seq. ID no. 13492486
  misc_feature (3)..(161): Homolog of NCBI NO: 25373308 NR Description: protein F21D18.10 [imported] - Arabidopsis
  misc_feature (9)..(161): Homolog of NCBI NO: 18402066 NR Description: expressed protein [Arabidopsis thaliana]
DFSRTWETMETEYDQVLRSVAQVNIADQIGESDDVERDGNGVKVSCFTEVFDDVTIQFQIIRLAKQIYVWVGCNSAKFGSLYAAASTRPSNTVSVTSVLGGTSDNTGSGIARRLVLKTGLNIILACNIPKNNPLLEAKAEKVLIRKLIDLGYTMSKPVRAT

SEQ ID NO: 21198 - protein, 153 aa, Arabidopsis thaliana
  peptide (1)..(153): Ceres Seq. ID no. 13492487
  misc_feature (1)..(153): Homolog of NCBI NO: 25373308 NR Description: protein F21D18.10 [imported] - Arabidopsis
  misc_feature (1)..(153): Homolog of NCBI NO: 18402066 NR Description: expressed protein [Arabidopsis thaliana]
METEYDQVLRSVAQVNIADQIGESDDVERDGNGVKVSCFTEVFDDVTIQFQIIRLAKQIYVWVGCNSAKFGSLYAAASTRPSNTVSVTSVLGGTSDNTGSGIARRLVLKTGLNIILACNIPKNNPLLEAKAEKVLIRKLIDLGYTMSKPVRAT

SEQ ID NO: 21199 - DNA, 1046 bp, Arabidopsis thaliana
  misc_feature (1)..(1046): Ceres Seq. ID no. 12420615
  misc_feature: MA Experiment ID: 108434 Result: Up-regulated in Transcription
  misc_feature: MA Experiment 108434 PARAMETER Experiment Name: At_Root_Tips_cDNA_P Parameter: Tissue Value: Root Tips
  misc_feature: MA Experiment ID: 108461 Result: Up-regulated in Transcription
  misc_feature: MA Experiment 108461 PARAMETER Experiment Name: At_Germinating_Seeds_cDNA_P Parameter: Age (day) Value: 1 vs. 0
  misc_feature: MA Experiment 108461 PARAMETER Experiment Name: At_Germinating_Seeds_cDNA_P Parameter: Tissue Value: Germinating Seeds
  misc_feature: MA Experiment ID: 108579 Result: Down-regulated in Transcription
  misc_feature: MA Experiment 108579 PARAMETER Experiment Name: At_4deg_Cold_cDNA_P Parameter: Temperature (deg C) Value: 4 vs. 22
  misc_feature: MA Experiment 108579 PARAMETER Experiment Name: At_4deg_Cold_cDNA_P Parameter: Timepoint (hr) Value: 6
  misc_feature: MA Experiment 108579 PARAMETER Experiment Name: At_4deg_Cold_cDNA_P Parameter: Tissue Value: Aerial
  misc_feature: MA Experiment ID: 20000171 Result: Up-regulated in Transcription
  misc_feature: MA Experiment 20000171 PARAMETER Experiment Name: At_42deg_Heat_P Parameter: Age (day) Value: 14
  misc_feature: MA Experiment 20000171 PARAMETER Experiment Name: At_42deg_Heat_P Parameter: Organism Value: A. thaliana
  misc_feature: MA Experiment 20000171 PARAMETER Experiment Name: At_42deg_Heat_P Parameter: Plant Line Value: WS
  misc_feature: MA Experiment 20000171 PARAMETER Experiment Name: At_42deg_Heat_P Parameter: Temperature (deg C) Value: 42 vs. 22
  misc_feature: MA Experiment 20000171 PARAMETER Experiment Name: At_42deg_Heat_P Parameter: Timepoint (hr) Value: 1
  misc_feature: MA Experiment 20000171 PARAMETER Experiment Name: At_42deg_Heat_P Parameter: Tissue Value: Aerial
gaagagggatgcgatcctctcgtcatcgctggttccatcagtttcagtgagaatcagatcgtcgttgtactgagagctccggcattggttcacggcggagctggagagttatctaagaacggagaggttactgatctgaattgttgaagatcggaaaatgacagaatcgagtctggatctgcaggaatctggttgggaagaacttaggcgggaagctcgtaaaattgaaggagatctagacgttaagctctcttcttacgctaagctaggcgccaggtttactcaaggcgggtatgttgacactgggtctccaaccgttggatcggggagatcatggaagtctatggagatggaaattcaatcgttgcttgagaagttgttggatattaatgattccatgagtagatgtgctgcatctgctgcacccacaacatcggttactcaaaaactagcaaggcacagggatatacttcatgaatatacccaggagtttcgaagaataaaaggaaatataaactcgttgagagaacacgctgagcttctgagttctgtcagggatgacataagtgaatataaggcttctggtagtatgtcaccaggtgtgcaagtgttaagggagagagcttcaatccatggaagtatatcccatattgatgatgtgattggtcaagctcaagcgacaagagcagttcttggctctcaacgatctctgttttcagatgttcaagggaaagtaaaaaatctcggagacaaattcccagtgattcgtggcttacttggctcaattaaaaggaaacgttctcgggacacacttatcctctccgctgtcatcgctgcttgtacgttgtttctaatcatctactggctctcaaaataaacagaatgttcatacacctaagctataaaacgagtttgccttgacatccctagatcgatttttttacaagttttttcttgcttttgtgtttttgccattatgttgggttatatgtttgtaggacaatattacaccctgaatcatatcgtaaaagtaaaattcgaaacat

SEQ ID NO: 21200 - protein, 239 aa, Arabidopsis thaliana
  peptide (1)..(239): Ceres Seq. ID no. 12420616
  misc_feature (67)..(217): Pfam Name: Vesicle transport v-SNARE protein Pfam Description: Vesicle transport v-SNARE protein
  misc_feature (1)..(232): Homolog of NCBI NO: 7498654 NR Description: hypothetical protein F08F8.4 - Caenorhabditis
  misc_feature (13)..(237): Homolog of NCBI NO: 39581354 NR Description: Hypothetical protein CBG15298 [Caenorhabditis
  misc_feature (11)..(239): Homolog of NCBI NO: 18394296 NR Description: cis-Golgi SNARE protein, putative
  misc_feature (15)..(235): Homolog of NCBI NO: 3335132 NR Description: GOS28/P28 protein [Homo sapiens]
  misc_feature (11)..(235): Homolog of NCBI NO: 4758456 NR Description: golgi SNAP receptor complex member 1; Golgi SNARE
  misc_feature (13)..(235): Homolog of NCBI NO: 16758358 NR Description: golgi SNAP receptor complex member 1; cis-Golgi
  misc_feature (13)..(235): Homolog of NCBI NO: 11132038 NR Description: 28 kDa Golgi SNARE protein (Golgi SNAP receptor
  misc_feature (13)..(235): Homolog of NCBI NO: 30388705 NR Description: Gosr1 protein [Mus musculus]
  misc_feature (13)..(235): Homolog of NCBI NO: 28280046 NR Description: Similar to golgi SNAP receptor complex member 1
  misc_feature (1)..(239): Homolog of NCBI NO: 15225431 NR Description: cis-Golgi SNARE protein, putative
MTESSLDLQESGWEELRREARKIEGDLDVKLSSYAKLGARFTQGGYVDTGSPTVGSGRSWKSMEMEIQSLLEKLLDINDSMSRCAASAAPTTSVTQKLARHRDILHEYTQEFRRIKGNINSLREHAELLSSVRDDISEYKASGSMSPGVQVLRERASIHGSISHIDDVIGQAQATRAVLGSQRSLFSDVQGKVKNLGDKFPVIRGLLGSIKRKRSRDTLILSAVIAACTLFLIIYWLSK

SEQ ID NO: 21201 - protein, 177 aa, Arabidopsis thaliana
  peptide (1)..(177): Ceres Seq. ID no. 12420617
  misc_feature (5)..(155): Pfam Name: Vesicle transport v-SNARE protein Pfam Description: Vesicle transport v-SNARE protein
  misc_feature (1)..(170): Homolog of NCBI NO: 7498654 NR Description: hypothetical protein F08F8.4 - Caenorhabditis
  misc_feature (1)..(175): Homolog of NCBI NO: 39581354 NR Description: Hypothetical protein CBG15298 [Caenorhabditis
  misc_feature (1)..(177): Homolog of NCBI NO: 18394296 NR Description: cis-Golgi SNARE protein, putative
  misc_feature (1)..(173): Homolog of NCBI NO: 3335132 NR Description: GOS28/P28 protein [Homo sapiens]
  misc_feature (1)..(173): Homolog of NCBI NO: 4758456 NR Description: golgi SNAP receptor complex member 1; Golgi SNARE
  misc_feature (1)..(173): Homolog of NCBI NO: 16758358 NR Description: golgi SNAP receptor complex member 1; cis-Golgi
  misc_feature (1)..(173): Homolog of NCBI NO: 11132038 NR Description: 28 kDa Golgi SNARE protein (Golgi SNAP receptor
  misc_feature (1)..(173): Homolog of NCBI NO: 30388705 NR Description: Gosr1 protein [Mus musculus]
  misc_feature (1)..(173): Homolog of NCBI NO: 28280046 NR Description: Similar to golgi SNAP receptor complex member 1
  misc_feature (1)..(177): Homolog of NCBI NO: 15225431 NR Description: cis-Golgi SNARE protein, putative
MEMEIQSLLEKLLDINDSMSRCAASAAPTTSVTQKLARHRDILHEYTQEFRRIKGNINSLREHAELLSSVRDDISEYKASGSMSPGVQVLRERASIHGSISHIDDVIGQAQATRAVLGSQRSLFSDVQGKVKNLGDKFPVIRGLLGSIKRKRSRDTLILSAVIAACTLFLIIYWLSK

SEQ ID NO: 21202 - protein, 175 aa, Arabidopsis thaliana
  peptide (1)..(175): Ceres Seq. ID no. 12420618
  misc_feature (3)..(153): Pfam Name: Vesicle transport v-SNARE protein Pfam Description: Vesicle transport v-SNARE protein
  misc_feature (1)..(171): Homolog of NCBI NO: 3335132 NR Description: GOS28/P28 protein [Homo sapiens]
  misc_feature (1)..(171): Homolog of NCBI NO: 4758456 NR Description: golgi SNAP receptor complex member 1; Golgi SNARE
  misc_feature (1)..(171): Homolog of NCBI NO: 16758358 NR Description: golgi SNAP receptor complex member 1; cis-Golgi
  misc_feature (1)..(171): Homolog of NCBI NO: 11132038 NR Description: 28 kDa Golgi SNARE protein (Golgi SNAP receptor
  misc_feature (1)..(173): Homolog of NCBI NO: 39581354 NR Description: Hypothetical protein CBG15298 [Caenorhabditis
  misc_feature (1)..(175): Homolog of NCBI NO: 18394296 NR Description: cis-Golgi SNARE protein, putative
  misc_feature (1)..(168): Homolog of NCBI NO: 7498654 NR Description: hypothetical protein F08F8.4 - Caenorhabditis
  misc_feature (1)..(171): Homolog of NCBI NO: 30388705 NR Description: Gosr1 protein [Mus musculus]
  misc_feature (1)..(171): Homolog of NCBI NO: 28280046 NR Description: Similar to golgi SNAP receptor complex member 1
  misc_feature (1)..(175): Homolog of NCBI NO: 15225431 NR Description: cis-Golgi SNARE protein, putative
MEIQSLLEKLLDINDSMSRCAASAAPTTSVTQKLARHRDILHEYTQEFRRIKGNINSLREHAELLSSVRDDISEYKASGSMSPGVQVLRERASIHGSISHIDDVIGQAQATRAVLGSQRSLFSDVQGKVKNLGDKFPVIRGLLGSIKRKRSRDTLILSAVIAACTLFLIIYWLSK

SEQ ID NO: 21203 - DNA, 1056 bp, Arabidopsis thaliana
  misc_feature (1)..(1056): Ceres Seq. ID no. 12327020
  misc_feature: MA Experiment ID: 108434 Result: Up-regulated in Transcription
  misc_feature: MA Experiment 108434 PARAMETER Experiment Name: At_Root_Tips_cDNA_P Parameter: Tissue Value: Root Tips
  misc_feature: MA Experiment ID: 108435 Result: Down-regulated in Transcription
  misc_feature: MA Experiment 108435 PARAMETER Experiment Name: At_stm_Mutants_cDNA_P Parameter: Plant Line Value: wt Landsburg vs stm
  misc_feature: MA Experiment 108435 PARAMETER Experiment Name: At_stm_Mutants_cDNA_P Parameter: Tissue Value: Shoot Apical Meristem Region
  misc_feature: MA Experiment ID: 108461 Result: Up-regulated in Transcription
  misc_feature: MA Experiment 108461 PARAMETER Experiment Name: At_Germinating_Seeds_cDNA_P Parameter: Age (day) Value: 1 vs. 0
  misc_feature: MA Experiment 108461 PARAMETER Experiment Name: At_Germinating_Seeds_cDNA_P Parameter: Tissue Value: Germinating Seeds
  misc_feature: MA Experiment ID: 108462 Result: Up-regulated in Transcription
  misc_feature: MA Experiment 108462 PARAMETER Experiment Name: At_Germinating_Seeds_cDNA_P Parameter: Age (day) Value: 2 vs. 0
  misc_feature: MA Experiment 108462 PARAMETER Experiment Name: At_Germinating_Seeds_cDNA_P Parameter: Tissue Value: Germinating Seeds
  misc_feature: MA Experiment ID: 108488 Result: Up-regulated in Transcription
  misc_feature: MA Experiment ID: 108595 Result: Down-regulated in Transcription
  misc_feature: MA Experiment 108595 PARAMETER Experiment Name: At_Ler-pi_Ovule_cDNA_P Parameter: Plant Line Value: null
  misc_feature: MA Experiment ID: 20000069 Result: Down-regulated in Transcription
  misc_feature: MA Experiment 20000069 PARAMETER Experiment Name: At_100uM_ABA_Mutants_cDNA_P Parameter: Plant Line Value: CS23
  misc_feature: MA Experiment 20000069 PARAMETER Experiment Name: At_100uM_ABA_Mutants_cDNA_P Parameter: Timepoint (hr) Value: 6
  misc_feature: MA Experiment 20000069 PARAMETER Experiment Name: At_100uM_ABA_Mutants_cDNA_P Parameter: Tissue Value: Aerial
  misc_feature: MA Experiment 20000069 PARAMETER Experiment Name: At_100uM_ABA_Mutants_cDNA_P Parameter: Treatment Value: 100uM ABA vs. No Treatment
  misc_feature: MA Experiment ID: 20000070 Result: Down-regulated in Transcription
  misc_feature: MA Experiment 20000070 PARAMETER Experiment Name: At_100uM_ABA_Mutants_cDNA_P Parameter: Plant Line Value: CS24
  misc_feature: MA Experiment 20000070 PARAMETER Experiment Name: At_100uM_ABA_Mutants_cDNA_P Parameter: Timepoint (hr) Value: 6
  misc_feature: MA Experiment 20000070 PARAMETER Experiment Name: At_100uM_ABA_Mutants_cDNA_P Parameter: Tissue Value: Aerial
  misc_feature: MA Experiment 20000070 PARAMETER Experiment Name: At_100uM_ABA_Mutants_cDNA_P Parameter: Treatment Value: 100uM ABA vs. No Treatment
  misc_feature: MA Experiment ID: 20000071 Result: Down-regulated in Transcription
  misc_feature: MA Experiment 20000071 PARAMETER Experiment Name: At_100uM_ABA_Mutants_cDNA_P Parameter: Plant Line Value: CS8104
  misc_feature: MA Experiment 20000071 PARAMETER Experiment Name: At_100uM_ABA_Mutants_cDNA_P Parameter: Timepoint (hr) Value: 6
  misc_feature: MA Experiment 20000071 PARAMETER Experiment Name: At_100uM_ABA_Mutants_cDNA_P Parameter: Tissue Value: Aerial
  misc_feature: MA Experiment 20000071 PARAMETER Experiment Name: At_100uM_ABA_Mutants_cDNA_P Parameter: Treatment Value: 100uM ABA vs. No Treatment
  misc_feature: MA Experiment ID: 20000072 Result: Down-regulated in Transcription
  misc_feature: MA Experiment 20000072 PARAMETER Experiment Name: At_100uM_ABA_Mutants_cDNA_P Parameter: Plant Line Value: CS8105
  misc_feature: MA Experiment 20000072 PARAMETER Experiment Name: At_100uM_ABA_Mutants_cDNA_P Parameter: Timepoint (hr) Value: 6
  misc_feature: MA Experiment 20000072 PARAMETER Experiment Name: At_100uM_ABA_Mutants_cDNA_P Parameter: Tissue Value: Aerial
  misc_feature: MA Experiment 20000072 PARAMETER Experiment Name: At_100uM_ABA_Mutants_cDNA_P Parameter: Treatment Value: 100uM ABA vs. No Treatment
  misc_feature: MA Experiment ID: 20000086 Result: Down-regulated in Transcription
  misc_feature: MA Experiment 20000086 PARAMETER Experiment Name: At_100uM_ABA_Mutants_cDNA_P Parameter: Plant Line Value: CS22
  misc_feature: MA Experiment 20000086 PARAMETER Experiment Name: At_100uM_ABA_Mutants_cDNA_P Parameter: Timepoint (hr) Value: 6
  misc_feature: MA Experiment 20000086 PARAMETER Experiment Name: At_100uM_ABA_Mutants_cDNA_P Parameter: Tissue Value: Aerial
  misc_feature: MA Experiment 20000086 PARAMETER Experiment Name: At_100uM_ABA_Mutants_cDNA_P Parameter: Treatment Value: 100uM ABA vs. No Treatment
  misc_feature: MA Experiment ID: 20000087 Result: Down-regulated in Transcription
  misc_feature: MA Experiment 20000087 PARAMETER Experiment Name: At_100uM_ABA_Mutants_cDNA_P Parameter: Plant Line Value: WS
  misc_feature: MA Experiment 20000087 PARAMETER Experiment Name: At_100uM_ABA_Mutants_cDNA_P Parameter: Timepoint (hr) Value: 6
  misc_feature: MA Experiment 20000087 PARAMETER Experiment Name: At_100uM_ABA_Mutants_cDNA_P Parameter: Tissue Value: Aerial
  misc_feature: MA Experiment 20000087 PARAMETER Experiment Name: At_100uM_ABA_Mutants_cDNA_P Parameter: Treatment Value: 100uM ABA vs. No Treatment
  misc_feature: MA Experiment ID: 20000088 Result: Down-regulated in Transcription
  misc_feature: MA Experiment 20000088 PARAMETER Experiment Name: At_100uM_ABA_Mutants_cDNA_P Parameter: Plant Line Value: Landsberg
  misc_feature: MA Experiment 20000088 PARAMETER Experiment Name: At_100uM_ABA_Mutants_cDNA_P Parameter: Timepoint (hr) Value: 6
  misc_feature: MA Experiment 20000088 PARAMETER Experiment Name: At_100uM_ABA_Mutants_cDNA_P Parameter: Tissue Value: Aerial
  misc_feature: MA Experiment 20000088 PARAMETER Experiment Name: At_100uM_ABA_Mutants_cDNA_P Parameter: Treatment Value: 100uM ABA vs. No Treatment
  misc_feature: MA Experiment ID: 20000117 Result: Down-regulated in Transcription
  misc_feature: MA Experiment 20000117 PARAMETER Experiment Name: At_100uM_ABA_Mutants_cDNA_P Parameter: Plant Line Value: Columbia
  misc_feature: MA Experiment 20000117 PARAMETER Experiment Name: At_100uM_ABA_Mutants_cDNA_P Parameter: Timepoint (hr) Value: 6
  misc_feature: MA Experiment 20000117 PARAMETER Experiment Name: At_100uM_ABA_Mutants_cDNA_P Parameter: Tissue Value: Aerial
  misc_feature: MA Experiment 20000117 PARAMETER Experiment Name: At_100uM_ABA_Mutants_cDNA_P Parameter: Treatment Value: 100uM ABA vs. No Treatment
  misc_feature: MA Experiment ID: 20000185 Result: Down-regulated in Transcription
  misc_feature: MA Experiment 20000185 PARAMETER Experiment Name: At_Roots__P Parameter: Age (day) Value: 7 vs. 21
  misc_feature: MA Experiment 20000185 PARAMETER Experiment Name: At_Roots__P Parameter: Organism Value: A. thaliana
  misc_feature: MA Experiment 20000185 PARAMETER Experiment Name: At_Roots__P Parameter: Tissue Value: Roots vs. Whole Plant
  misc_feature: MA Experiment ID: 20000214 Result: Up-regulated in Transcription
  misc_feature: MA Experiment 20000214 PARAMETER Experiment Name: At_4deg_Cold_P Parameter: Timepoint (hr) Value: 6
  misc_feature: MA Experiment ID: 20000437 Result: Down-regulated in Transcription
  misc_feature: MA Experiment 20000437 PARAMETER Experiment Name: At_Drought_P Parameter: Age (day) Value: 8
  misc_feature: MA Experiment 20000437 PARAMETER Experiment Name: At_Drought_P Parameter: Organism Value: A. thaliana
  misc_feature: MA Experiment 20000437 PARAMETER Experiment Name: At_Drought_P Parameter: Plant Line Value: WS
  misc_feature: MA Experiment 20000437 PARAMETER Experiment Name: At_Drought_P Parameter: Timepoint (hr) Value: 24
  misc_feature: MA Experiment 20000437 PARAMETER Experiment Name: At_Drought_P Parameter: Tissue Value: Whole Plant
  misc_feature: MA Experiment 20000437 PARAMETER Experiment Name: At_Drought_P Parameter: Treatment Value: Drought vs. No Drought
  misc_feature: MA Experiment ID: 20000438 Result: Up-regulated in Transcription
  misc_feature: MA Experiment 20000438 PARAMETER Experiment Name: At_Shoots__P Parameter: Age (day) Value: 14
  misc_feature: MA Experiment 20000438 PARAMETER Experiment Name: At_Shoots__P Parameter: Tissue Value: Shoots vs. Whole Plant
  misc_feature: MA Experiment ID: 20000439 Result: Down-regulated in Transcription
  misc_feature: MA Experiment 20000439 PARAMETER Experiment Name: At_Roots__P Parameter: Age (day) Value: 14 vs. 21
  misc_feature: MA Experiment 20000439 PARAMETER Experiment Name: At_Roots__P Parameter: Organism Value: A. thaliana
  misc_feature: MA Experiment 20000439 PARAMETER Experiment Name: At_Roots__P Parameter: Tissue Value: Roots vs. Whole Plant
  misc_feature: MA Experiment ID: 20000453 Result: Down-regulated in Transcription
  misc_feature: MA Experiment 20000453 PARAMETER Experiment Name: At_100uM_ABA_P Parameter: Age (day) Value: 15
  misc_feature: MA Experiment 20000453 PARAMETER Experiment Name: At_100uM_ABA_P Parameter: Organism Value: A. thaliana
  misc_feature: MA Experiment 20000453 PARAMETER Experiment Name: At_100uM_ABA_P Parameter: Plant Line Value: WS
  misc_feature: MA Experiment 20000453 PARAMETER Experiment Name: At_100uM_ABA_P Parameter: Timepoint (hr) Value: 24
  misc_feature: MA Experiment 20000453 PARAMETER Experiment Name: At_100uM_ABA_P Parameter: Tissue Value: Aerial
  misc_feature: MA Experiment 20000453 PARAMETER Experiment Name: At_100uM_ABA_P Parameter: Treatment Value: 100uM ABA vs. No Treatment
  misc_feature: MA Experiment ID: 20000794 Result: Down-regulated in Transcription
  misc_feature: MA Experiment 20000794 PARAMETER Experiment Name: At_Petals_P Parameter: Age (day) Value: 23-25 days
  misc_feature: MA Experiment 20000794 PARAMETER Experiment Name: At_Petals_P Parameter: Plant Line Value: WS
  misc_feature: MA Experiment 20000794 PARAMETER Experiment Name: At_Petals_P Parameter: Tissue Value: Petals vs. Whole plant
  misc_feature: MA Experiment ID: 20001248 Result: Down-regulated in Transcription
  misc_feature: MA Experiment 20001248 PARAMETER Experiment Name: At_Far-red-induction_P Parameter: Age (day) Value: 7
  misc_feature: MA Experiment 20001248 PARAMETER Experiment Name: At_Far-red-induction_P Parameter: Light Value: Far-red vs. White
  misc_feature: MA Experiment 20001248 PARAMETER Experiment Name: At_Far-red-induction_P Parameter: Organism Value: A. thaliana
  misc_feature: MA Experiment 20001248 PARAMETER Experiment Name: At_Far-red-induction_P Parameter: Plant Line Value: Columbia
  misc_feature: MA Experiment 20001248 PARAMETER Experiment Name: At_Far-red-induction_P Parameter: Timepoint (hr) Value: 4
  misc_feature: MA Experiment 20001248 PARAMETER Experiment Name: At_Far-red-induction_P Parameter: Tissue Value: Whole Plant
  misc_feature: MA Experiment ID: 20001450 Result: Down-regulated in Transcription
  misc_feature: MA Experiment 20001450 PARAMETER Experiment Name: At_Far-red-induction_P Parameter: Age (day) Value: 7
  misc_feature: MA Experiment 20001450 PARAMETER Experiment Name: At_Far-red-induction_P Parameter: Light Value: Far-red vs. White
  misc_feature: MA Experiment 20001450 PARAMETER Experiment Name: At_Far-red-induction_P Parameter: Organism Value: A. thaliana
  misc_feature: MA Experiment 20001450 PARAMETER Experiment Name: At_Far-red-induction_P Parameter: Plant Line Value: Columbia
  misc_feature: MA Experiment 20001450 PARAMETER Experiment Name: At_Far-red-induction_P Parameter: Timepoint (hr) Value: 8
  misc_feature: MA Experiment 20001450 PARAMETER Experiment Name: At_Far-red-induction_P Parameter: Tissue Value: Whole Plant
  misc_feature: MA Experiment ID: 20001451 Result: Down-regulated in Transcription
  misc_feature: MA Experiment 20001451 PARAMETER Experiment Name: At_Far-red-induction_P Parameter: Age (day) Value: 7
  misc_feature: MA Experiment 20001451 PARAMETER Experiment Name: At_Far-red-induction_P Parameter: Light Value: Far-red vs. White
  misc_feature: MA Experiment 20001451 PARAMETER Experiment Name: At_Far-red-induction_P Parameter: Organism Value: A. thaliana
  misc_feature: MA Experiment 20001451 PARAMETER Experiment Name: At_Far-red-induction_P Parameter: Plant Line Value: Columbia
  misc_feature: MA Experiment 20001451 PARAMETER Experiment Name: At_Far-red-induction_P Parameter: Timepoint (hr) Value: 24
  misc_feature: MA Experiment 20001451 PARAMETER Experiment Name: At_Far-red-induction_P Parameter: Tissue Value: Whole Plant
  misc_feature: MA Experiment ID: 20001904 Result: Down-regulated in Transcription
  misc_feature: MA Experiment 20001904 PARAMETER Experiment Name: At_Drought_Reproduction_P Parameter: Age (day) Value: 37
  misc_feature: MA Experiment 20001904 PARAMETER Experiment Name: At_Drought_Reproduction_P Parameter: Organism Value: A. thaliana
  misc_feature: MA Experiment 20001904 PARAMETER Experiment Name: At_Drought_Reproduction_P Parameter: Plant Line Value: WS
  misc_feature: MA Experiment 20001904 PARAMETER Experiment Name: At_Drought_Reproduction_P Parameter: Timepoint (day) Value: 7
  misc_feature: MA Experiment 20001904 PARAMETER Experiment Name: At_Drought_Reproduction_P Parameter: Tissue Value: Rosettes
  misc_feature: MA Experiment 20001904 PARAMETER Experiment Name: At_Drought_Reproduction_P Parameter: Treatment Value: Drought vs. No Drought
  misc_feature: MA Experiment ID: 20001906 Result: Down-regulated in Transcription
  misc_feature: MA Experiment 20001906 PARAMETER Experiment Name: At_Drought_Reproduction_P Parameter: Age (day) Value: 35
  misc_feature: MA Experiment 20001906 PARAMETER Experiment Name: At_Drought_Reproduction_P Parameter: Organism Value: A. thaliana
  misc_feature: MA Experiment 20001906 PARAMETER Experiment Name: At_Drought_Reproduction_P Parameter: Plant Line Value: WS
  misc_feature: MA Experiment 20001906 PARAMETER Experiment Name: At_Drought_Reproduction_P Parameter: Timepoint (day) Value: 5
  misc_feature: MA Experiment 20001906 PARAMETER Experiment Name: At_Drought_Reproduction_P Parameter: Tissue Value: Siliques
  misc_feature: MA Experiment 20001906 PARAMETER Experiment Name: At_Drought_Reproduction_P Parameter: Treatment Value: Drought vs. No Drought
aaacttaaaaaacaaggctcgaggcggttctcttatctgcaaaactaaagactgttgtctaaagcgaaccaacaaaaagtcttcatctttaatcattcaatggcttcttcgtcttctatgcagatggttcacacttcccgctccattgcccagattgggttcggtgttaagtcgcaattagtttctgcaaatcgaacaactcaatcagtttgctttggagctcgttcctctggaattgcattatcttcgagattgcactatgcatcacccattaagcaattttctggggtttatgcgaccaccaagcatcagagaaccgcttgtgttaaatccatggctgctgaggaagaagaagtaatcgaacctcaagctaaagtgacaaacaaggtttactttgatgtggaaattggaggtgaagttgctggcagaattgtgatgggtctctttggagaagttgtgcctaaaaccgttgaaaacttccgtgccttgtgtactggtgagaagaaatacgggtacaagggttcctctttccatcgtattattaaggatttcatgatccaaggaggtgatttcaccgagggaaatggtactggaggtattagtatttacggtgccaagttcgaagatgaaaacttcaccctgaagcatactggacctggaatcttgagcatggcaaacgctggtcctaatactaatggaagccagtttttcatttgtaccgtcaagacttcatggttagataacaagcatgtcgtgtttggacaagtaattgaaggtatgaagcttgttaggactcttgagtctcaagagactcgcgctttcgatgttcccaagaaaggttgtagaatctatgcctgcggagagctcccgttagatgcttgataatcactattgaccgatgcattgtctttgccatctttgttctgttttttgctattatgactattgaggaatccaaaccatcaaaaagccaaagattttcaaattctggtcttttatttattatatatttcggatacatgagttataagttcttttaatcgatgtgggattctc

SEQ ID NO: 21204 - protein, 260 aa, Arabidopsis thaliana
  peptide (1)..(260): Ceres Seq. ID no. 12327021
  misc_feature (29)..(258): Homolog of NCBI NO: 37788312 NR Description: cyclophilin-like protein [Triticum aestivum]
  misc_feature (86)..(258): Homolog of NCBI NO: 9955556 NR Description: peptidylprolyl isomerase-like protein
  misc_feature (62)..(258): Homolog of NCBI NO: 37788308 NR Description: cyclophilin-like protein [Triticum aestivum]
  misc_feature (36)..(258): Homolog of NCBI NO: 21593963 NR Description: peptidylprolyl isomerase-like protein
  misc_feature (36)..(258): Homolog of NCBI NO: 15240008 NR Description: peptidyl-prolyl isomerase protein
  misc_feature (48)..(259): Homolog of NCBI NO: 6014889 NR Description: Peptidyl-prolyl cis-trans isomerase, chloroplast (PPIase) (Rotamase) (Cyclophilin) (Cyclosporin A-binding protein)
  misc_feature (87)..(259): Homolog of NCBI NO: 34902534 NR Description: putative peptidyl-prolyl cis-trans isomerase,
  misc_feature (1)..(260): Homolog of NCBI NO: 21555831 NR Description: peptidylprolyl isomerase ROC4 [Arabidopsis
  misc_feature (1)..(260): Homolog of NCBI NO: 11762200 NR Description: AT3g62030 [Arabidopsis thaliana]
  misc_feature (1)..(260): Homolog of NCBI NO: 15228674 NR Description: peptidylprolyl isomerase ROC4
MASSSSMQMVHTSRSIAQIGFGVKSQLVSANRTTQSVCFGARSSGIALSSRLHYASPIKQFSGVYATTKHQRTACVKSMAAEEEEVIEPQAKVTNKVYFDVEIGGEVAGRIVMGLFGEVVPKTVENFRALCTGEKKYGYKGSSFHRIIKDFMIQGGDFTEGNGTGGISIYGAKFEDENFTLKHTGPGILSMANAGPNTNGSQFFICTVKTSWLDNKHVVFGQVIEGMKLVRTLESQETRAFDVPKKGCRIYACGELPLDA

SEQ ID NO: 21205 - protein, 254 aa, Arabidopsis thaliana
  peptide (1)..(254): Ceres Seq. ID no. 12327022
  misc_feature (23)..(252): Homolog of NCBI NO: 37788312 NR Description: cyclophilin-like protein [Triticum aestivum]
  misc_feature (80)..(252): Homolog of NCBI NO: 9955556 NR Description: peptidylprolyl isomerase-like protein
  misc_feature (56)..(252): Homolog of NCBI NO: 37788308 NR Description: cyclophilin-like protein [Triticum aestivum]
  misc_feature (30)..(252): Homolog of NCBI NO: 21593963 NR Description: peptidylprolyl isomerase-like protein
  misc_feature (30)..(252): Homolog of NCBI NO: 15240008 NR Description: peptidyl-prolyl isomerase protein
  misc_feature (42)..(253): Homolog of NCBI NO: 6014889 NR Description: Peptidyl-prolyl cis-trans isomerase, chloroplast (PPIase) (Rotamase) (Cyclophilin) (Cyclosporin A-binding protein)
  misc_feature (81)..(253): Homolog of NCBI NO: 34902534 NR Description: putative peptidyl-prolyl cis-trans isomerase,
  misc_feature (1)..(254): Homolog of NCBI NO: 21555831 NR Description: peptidylprolyl isomerase ROC4 [Arabidopsis
  misc_feature (1)..(254): Homolog of NCBI NO: 11762200 NR Description: AT3g62030 [Arabidopsis thaliana]
  misc_feature (1)..(254): Homolog of NCBI NO: 15228674 NR Description: peptidylprolyl isomerase ROC4
MQMVHTSRSIAQIGFGVKSQLVSANRTTQSVCFGARSSGIALSSRLHYASPIKQFSGVYATTKHQRTACVKSMAAEEEEVIEPQAKVTNKVYFDVEIGGEVAGRIVMGLFGEVVPKTVENFRALCTGEKKYGYKGSSFHRIIKDFMIQGGDFTEGNGTGGISIYGAKFEDENFTLKHTGPGILSMANAGPNTNGSQFFICTVKTSWLDNKHVVFGQVIEGMKLVRTLESQETRAFDVPKKGCRIYACGELPLDA

SEQ ID NO: 21206 - protein, 252 aa, Arabidopsis thaliana
  peptide (1)..(252): Ceres Seq. ID no. 12327023
  misc_feature (21)..(250): Homolog of NCBI NO: 37788312 NR Description: cyclophilin-like protein [Triticum aestivum]
  misc_feature (78)..(250): Homolog of NCBI NO: 9955556 NR Description: peptidylprolyl isomerase-like protein
  misc_feature (54)..(250): Homolog of NCBI NO: 37788308 NR Description: cyclophilin-like protein [Triticum aestivum]
  misc_feature (28)..(250): Homolog of NCBI NO: 21593963 NR Description: peptidylprolyl isomerase-like protein
  misc_feature (28)..(250): Homolog of NCBI NO: 15240008 NR Description: peptidyl-prolyl isomerase protein
  misc_feature (40)..(251): Homolog of NCBI NO: 6014889 NR Description: Peptidyl-prolyl cis-trans isomerase, chloroplast (PPIase) (Rotamase) (Cyclophilin) (Cyclosporin A-binding protein)
  misc_feature (79)..(251): Homolog of NCBI NO: 34902534 NR Description: putative peptidyl-prolyl cis-trans isomerase,
  misc_feature (1)..(252): Homolog of NCBI NO: 21555831 NR Description: peptidylprolyl isomerase ROC4 [Arabidopsis
  misc_feature (1)..(252): Homolog of NCBI NO: 11762200 NR Description: AT3g62030 [Arabidopsis thaliana]
  misc_feature (1)..(252): Homolog of NCBI NO: 15228674 NR Description: peptidylprolyl isomerase ROC4
MVHTSRSIAQIGFGVKSQLVSANRTTQSVCFGARSSGIALSSRLHYASPIKQFSGVYATTKHQRTACVKSMAAEEEEVIEPQAKVTNKVYFDVEIGGEVAGRIVMGLFGEVVPKTVENFRALCTGEKKYGYKGSSFHRIIKDFMIQGGDFTEGNGTGGISIYGAKFEDENFTLKHTGPGILSMANAGPNTNGSQFFICTVKTSWLDNKHVVFGQVIEGMKLVRTLESQETRAFDVPKKGCRIYACGELPLDA

SEQ ID NO: 21207 - DNA, 727 bp, Arabidopsis thaliana
  misc_feature (1)..(727): Ceres Seq. ID no. 12420972
  misc_feature: MA Experiment ID: 108434 Result: Up-regulated in Transcription
  misc_feature: MA Experiment 108434 PARAMETER Experiment Name: At_Root_Tips_cDNA_P Parameter: Tissue Value: Root Tips
  misc_feature: MA Experiment ID: 108462 Result: Down-regulated in Transcription
  misc_feature: MA Experiment 108462 PARAMETER Experiment Name: At_Germinating_Seeds_cDNA_P Parameter: Age (day) Value: 2 vs. 0
  misc_feature: MA Experiment 108462 PARAMETER Experiment Name: At_Germinating_Seeds_cDNA_P Parameter: Tissue Value: Germinating Seeds
  misc_feature: MA Experiment ID: 108463 Result: Down-regulated in Transcription
  misc_feature: MA Experiment 108463 PARAMETER Experiment Name: At_Germinating_Seeds_cDNA_P Parameter: Age (day) Value: 3 vs. 0
  misc_feature: MA Experiment 108463 PARAMETER Experiment Name: At_Germinating_Seeds_cDNA_P Parameter: Tissue Value: Germinating Seeds
  misc_feature: MA Experiment ID: 20000184 Result: Up-regulated in Transcription
  misc_feature: MA Experiment 20000184 PARAMETER Experiment Name: At_Shoots__P Parameter: Age (day) Value: 7
  misc_feature: MA Experiment 20000184 PARAMETER Experiment Name: At_Shoots__P Parameter: Tissue Value: Shoots vs. Whole Plant
ctagtttaatgtcttggtataaaagcctatattttgcatttttcatccgactctctgcgttaggtttcattttagcggcagacgagagagcaaaagcaaggagaaaccctaaccatggcgacacaaccagctactgaatctgtgcaatgcttcggaaggaagaagaccgcagtggccgtcactcactgcaagcgtggatctggtttaattaagctcaacggttgcccaatcgagcttttccagccagagatcctccgattcaagatcttcgagccgattcttctcctcggaaagcaccgtttcgcaggtgtgaacatgaggatccgtgtcaacggtggtggtcacacatcacaggtttacgccatccgtcagagtatcgcgaaggctcttgttgcgtactaccagaagtatgtggatgagcagtcgaagaaggagattaaagatatcttggtgaggtatgataggactctgcttgtggcggatccgaggaggtgtgagccgaagaagtttggtggtcgtggtgctcgttctcgttaccagaagagttaccgttaaacaaagctggtttgtgttttgtttttcaatttcgattcatctcaaggtttttggagtttttgattatggacttgtgagactcttagaatttctgttttatgatttattggataactgtgattctccaagaacttatgtcttatatgattttgtcttcatttcgttgcttcct

SEQ ID NO: 21208 - protein, 146 aa, Arabidopsis thaliana [sequence omitted]

SEQ ID NO: 21209 - protein, 90 aa, Arabidopsis thaliana
  peptide (1)..(90): Ceres Seq. ID no. 12420974
MIGLCLWRIRGGVSRRSLVVVVLVLVTRRVTVKQSWFVFCFSISIHLKVFGVFDYGLVRLLEFLFYDLLDNCDSPRTYVLYDFVFISLLP

SEQ ID NO: 21210 - protein, 79 aa, Arabidopsis thaliana
  peptide (1)..(79): Ceres Seq. ID no. 12420975
  misc_feature (1)..(79): Pfam Name: Ribosomal protein S9/S16 Pfam Description: Ribosomal protein S9/S16
  misc_feature (1)..(79): Homolog of NCBI NO: 15294045 NR Description: 40S ribosomal protein S16 [Ictalurus punctatus]
  misc_feature (1)..(79): Homolog of NCBI NO: 4506691 NR Description: ribosomal protein S16; 40S ribosomal protein S16
  misc_feature (1)..(79): Homolog of NCBI NO: 39850096 NR Description: Unknown (protein for IMAGE:6887619) [Rattus
  misc_feature (1)..(79): Homolog of NCBI NO: 17369864 NR Description: 40S ribosomal protein S16
  misc_feature (1)..(79): Homolog of NCBI NO: 1173209 NR Description: 40S RIBOSOMAL PROTEIN S16
  misc_feature (1)..(79): Homolog of NCBI NO: 3122800 NR Description: 40S RIBOSOMAL PROTEIN S16
  misc_feature (1)..(79): Homolog of NCBI NO: 15229252 NR Description: putative 40S ribosomal protein S16; protein id:
  misc_feature (1)..(79): Homolog of NCBI NO: 6984222 NR Description: 40S ribosomal protein S16 [Euphorbia esula]
  misc_feature (1)..(79): Homolog of NCBI NO: 15238809 NR Description: 40S RIBOSOMAL PROTEIN S16
  misc_feature (1)..(79): Homolog of NCBI NO: 15226676 NR Description: 40S ribosomal protein S16
MRIRVNGGGHTSQVYAIRQSIAKALVAYYQKYVDEQSKKEIKDILVRYDRTLLVADPRRCEPKKFGGRGARSRYQKSYR

SEQ ID NO: 21211 - DNA, 1041 bp, Arabidopsis thaliana
  misc_feature (1)..(1041): Ceres Seq. ID no. 12600744
  misc_feature: MA Experiment ID: 108462 Result: Up-regulated in Transcription
  misc_feature: MA Experiment 108462 PARAMETER Experiment Name: At_Germinating_Seeds_cDNA_P Parameter: Age (day) Value: 2 vs. 0
  misc_feature: MA Experiment 108462 PARAMETER Experiment Name: At_Germinating_Seeds_cDNA_P Parameter: Tissue Value: Germinating Seeds
  misc_feature: MA Experiment ID: 108464 Result: Up-regulated in Transcription
  misc_feature: MA Experiment 108464 PARAMETER Experiment Name: At_Germinating_Seeds_cDNA_P Parameter: Age (day) Value: 4 vs. 0
  misc_feature: MA Experiment 108464 PARAMETER Experiment Name: At_Germinating_Seeds_cDNA_P Parameter: Tissue Value: Germinating Seeds
  misc_feature: MA Experiment ID: 108488 Result: Up-regulated in Transcription
  misc_feature: MA Experiment ID: 20000111 Result: Up-regulated in Transcription
  misc_feature: MA Experiment 20000111 PARAMETER Experiment Name: At_42deg_Heat_cDNA_P Parameter: Temperature (deg C) Value: 42 vs. 22
  misc_feature: MA Experiment 20000111 PARAMETER Experiment Name: At_42deg_Heat_cDNA_P Parameter: Timepoint (hr) Value: 6
  misc_feature: MA Experiment 20000111 PARAMETER Experiment Name: At_42deg_Heat_cDNA_P Parameter: Tissue Value: Aerial
  misc_feature: MA Experiment ID: 20000314 Result: Down-regulated in Transcription
  misc_feature: MA Experiment 20000314 PARAMETER Experiment Name: At_14day_Shoots-Roots_Sub_P Parameter: Age (day) Value: 14
  misc_feature: MA Experiment 20000314 PARAMETER Experiment Name: At_14day_Shoots-Roots_Sub_P Parameter: Organism Value: A. thaliana
  misc_feature: MA Experiment 20000314 PARAMETER Experiment Name: At_14day_Shoots-Roots_Sub_P Parameter: Plant Line Value: WS
  misc_feature: MA Experiment 20000314 PARAMETER Experiment Name: At_14day_Shoots-Roots_Sub_P Parameter: Tissue Value: Roots vs. Whole Plant
  misc_feature: MA Experiment ID: 20000315 Result: Up-regulated in Transcription
  misc_feature: MA Experiment 20000315 PARAMETER Experiment Name: At_14day_Shoots-Roots_Sub_P Parameter: Age (day) Value: 14
  misc_feature: MA Experiment 20000315 PARAMETER Experiment Name: At_14day_Shoots-Roots_Sub_P Parameter: Organism Value: A. thaliana
  misc_feature: MA Experiment 20000315 PARAMETER Experiment Name: At_14day_Shoots-Roots_Sub_P Parameter: Plant Line Value: WS
  misc_feature: MA Experiment 20000315 PARAMETER Experiment Name: At_14day_Shoots-Roots_Sub_P Parameter: Tissue Value: Shoots vs. Whole Plant
  misc_feature: MA Experiment ID: 20000328 Result: Up-regulated in Transcription
  misc_feature: MA Experiment 20000328 PARAMETER Experiment Name: At_42deg_Heat_Sub_P Parameter: Age (day) Value: 14
  misc_feature: MA Experiment 20000328 PARAMETER Experiment Name: At_42deg_Heat_Sub_P Parameter: Organism Value: A. thaliana
  misc_feature: MA Experiment 20000328 PARAMETER Experiment Name: At_42deg_Heat_Sub_P Parameter: Plant Line Value: WS
  misc_feature: MA Experiment 20000328 PARAMETER Experiment Name: At_42deg_Heat_Sub_P Parameter: Temperature (deg C) Value: 42 vs. 22
  misc_feature: MA Experiment 20000328 PARAMETER Experiment Name: At_42deg_Heat_Sub_P Parameter: Timepoint (hr) Value: 6
  misc_feature: MA Experiment 20000328 PARAMETER Experiment Name: At_42deg_Heat_Sub_P Parameter: Tissue Value: Aerial
gaaccagttttaatcactctcactcacaagttagtcataaaaaaaaaaaacacacaaaaaagtttcaatggccgcctcaacaatggctctctcctcccctgctttcgccggaaaggctgtgaacctttcccctgcggcatcagaagtccttggaagcggccgtgtgacaatgaggaagactgttgccaagccaaagggtccatcaggcagcccatggtacggatccgaccgagtcaagtacttgggtccattctctggcgagtcacccagctaccttaccggagagttccctggagactacggatgggacacagctggtctatccgctgaccccgagacattcgcaaggaaccgtgagctagaagttatccacagcaggtgggccatgctcggagccctaggctgcgtcttccctgaacttttggccaggaacggagtcaagtttggagaggcagtttggttcaaggctggttcacagatctttagcgatggagggctcgattacttgggaaaccctagcttggttcacgctcagagcattttggccatttgggccactcaagttatcttgatgggagccgttgaaggctacagagtcgcaggaaatgggccgttgggagaggccgaggacttgctttaccccggtggtagcttcgacccattgggtttggctaccgacccagaggcattcgctgagttgaaggtgaaggagctcaagaacggaagattggctatgttctctatgtttggattcttcgttcaagccatcgtcactggtaagggaccgatagagaaccttgctgaccatttggccgatccagtcaacaacaacgcttgggcctttgccaccaactttgttcccggaaagtgagccaagttctatctgtttgtaatttacttttctttcaatcttttgaattcgagtgagagacaggaggagaaagagtaggtttgtgtttgtggtggatggtagagactttcagatgtaaatttgcaaagactttgtatgatttgtcattaatcaaataactcattgttctc

SEQ ID NO: 21212 - protein, 267 aa, Arabidopsis thaliana
  peptide (1)..(267): Ceres Seq. ID no. 12600745
  misc_feature (65)..(234): Pfam Name: Chlorophyll A-B binding protein Pfam Description: Chlorophyll A-B binding protein
  misc_feature (65)..(234): Pfam Name: Chlorophyll A-B binding protein Pfam Description: Chlorophyll A-B binding protein
  misc_feature (20)..(267): Homolog of NCBI NO: 12324161 NR Description: chlorophyll A-B-binding protein 2 precursor, 5'
  misc_feature (1)..(267): Homolog of NCBI NO: 21592428 NR Description: putative photosystem II type I chlorophyll a b
  misc_feature (1)..(267): Homolog of NCBI NO: 18266039 NR Description: chlorophyll a/b binding protein [Brassica
  misc_feature (1)..(267): Homolog of NCBI NO: 18403549 NR Description: photosystem II type I chlorophyll a /b binding
  misc_feature (1)..(267): Homolog of NCBI NO: 115778 NR Description: Chlorophyll A-B binding protein 1, chloroplast
  misc_feature (20)..(267): Homolog of NCBI NO: 12324161 NR Description: chlorophyll A-B-binding protein 2 precursor, 5'
  misc_feature (1)..(267): Homolog of NCBI NO: 18266039 NR Description: chlorophyll a/b binding protein [Brassica
  misc_feature (1)..(267): Homolog of NCBI NO: 115778 NR Description: Chlorophyll A-B binding protein 1, chloroplast
  misc_feature (1)..(267): Homolog of NCBI NO: 18397286 NR Description: photosystem II type I chlorophyll a /b binding
  misc_feature (1)..(267): Homolog of NCBI NO: 15220615 NR Description: light-harvesting chlorophyll a/b binding protein
  misc_feature (1)..(267): Homolog of NCBI NO: 17473828 NR Description: chlorophyll a/b-binding protein [Arabidopsis
  misc_feature (1)..(267): Homolog of NCBI NO: 18403546 NR Description: photosystem II type I chlorophyll a /b binding
  misc_feature (1)..(267): Homolog of NCBI NO: 31323256 NR Description: chlorophyll a/b binding protein [Brassica
  misc_feature (1)..(267): Homolog of NCBI NO: 18403549 NR Description: photosystem II type I chlorophyll a /b binding
  misc_feature (1)..(267): Homolog of NCBI NO: 21592428 NR Description: putative photosystem II type I chlorophyll a b
  misc_feature (1)..(267): Homolog of NCBI NO: 31323256 NR Description: chlorophyll a/b binding protein [Brassica
  misc_feature (1)..(267): Homolog of NCBI NO: 18403546 NR Description: photosystem II type I chlorophyll a /b binding
  misc_feature (1)..(267): Homolog of NCBI NO: 17473828 NR Description: chlorophyll a/b-binding protein [Arabidopsis
  misc_feature (1)..(267): Homolog of NCBI NO: 15220615 NR Description: light-harvesting chlorophyll a/b binding protein
  misc_feature (1)..(267): Homolog of NCBI NO: 18397286 NR Description: photosystem II type I chlorophyll a /b binding
MAASTMALSSPAFAGKAVNLSPAASEVLGSGRVTMRKTVAKPKGPSGSPWYGSDRVKYLGPFSGESPSYLTGEFPGDYGWDTAGLSADPETFARNRELEVIHSRWAMLGALGCVFPELLARNGVKFGEAVWFKAGSQIFSDGGLDYLGNPSLVHAQSILAIWATQVILMGAVEGYRVAGNGPLGEAEDLLYPGGSFDPLGLATDPEAFAELKVKELKNGRLAMFSMFGFFVQAIVTGKGPIENLADHLADPVNNNAWAFATNFVPGK

SEQ ID NO: 21213 - protein, 262 aa, Arabidopsis thaliana
  peptide (1)..(262): Ceres Seq. ID no. 12600746
  misc_feature (60)..(229): Pfam Name: Chlorophyll A-B binding protein Pfam Description: Chlorophyll A-B binding protein
  misc_feature (60)..(229): Pfam Name: Chlorophyll A-B binding protein Pfam Description: Chlorophyll A-B binding protein
  misc_feature (15)..(262): Homolog of NCBI NO: 12324161 NR Description: chlorophyll A-B-binding protein 2 precursor, 5'
  misc_feature (1)..(262): Homolog of NCBI NO: 21592428 NR Description: putative photosystem II type I chlorophyll a b
  misc_feature (1)..(262): Homolog of NCBI NO: 18266039 NR Description: chlorophyll a/b binding protein [Brassica
  misc_feature (1)..(262): Homolog of NCBI NO: 18403549 NR Description: photosystem II type I chlorophyll a /b binding
  misc_feature (1)..(262): Homolog of NCBI NO: 115778 NR Description: Chlorophyll A-B binding protein 1, chloroplast
  misc_feature (15)..(262): Homolog of NCBI NO: 12324161 NR Description: chlorophyll A-B-binding protein 2 precursor, 5'
  misc_feature (1)..(262): Homolog of NCBI NO: 18266039 NR Description: chlorophyll a/b binding protein [Brassica
  misc_feature (1)..(262): Homolog of NCBI NO: 115778 NR Description: Chlorophyll A-B binding protein 1, chloroplast
  misc_feature (1)..(262): Homolog of NCBI NO: 18397286 NR Description: photosystem II type I chlorophyll a /b binding
  misc_feature (1)..(262): Homolog of NCBI NO: 15220615 NR Description: light-harvesting chlorophyll a/b binding protein
  misc_feature (1)..(262): Homolog of NCBI NO: 17473828 NR Description: chlorophyll a/b-binding protein [Arabidopsis
  misc_feature (1)..(262): Homolog of NCBI NO: 18403546 NR Description: photosystem II type I chlorophyll a /b binding
  misc_feature (1)..(262): Homolog of NCBI NO: 31323256 NR Description: chlorophyll a/b binding protein [Brassica
  misc_feature (1)..(262): Homolog of NCBI NO: 18403549 NR Description: photosystem II type I chlorophyll a /b binding
  misc_feature (1)..(262): Homolog of NCBI NO: 21592428 NR Description: putative photosystem II type I chlorophyll a b
  misc_feature (1)..(262): Homolog of NCBI NO: 31323256 NR Description: chlorophyll a/b binding protein [Brassica
  misc_feature (1)..(262): Homolog of NCBI NO: 18403546 NR Description: photosystem II type I chlorophyll a /b binding
  misc_feature (1)..(262): Homolog of NCBI NO: 17473828 NR Description: chlorophyll a/b-binding protein [Arabidopsis
  misc_feature (1)..(262): Homolog of NCBI NO: 15220615 NR Description: light-harvesting chlorophyll a/b binding protein
  misc_feature (1)..(262): Homolog of NCBI NO: 18397286 NR Description: photosystem II type I chlorophyll a /b binding
MALSSPAFAGKAVNLSPAASEVLGSGRVTMRKTVAKPKGPSGSPWYGSDRVKYLGPFSGESPSYLTGEFPGDYGWDTAGLSADPETFARNRELEVIHSRWAMLGALGCVFPELLARNGVKFGEAVWFKAGSQIFSDGGLDYLGNPSLVHAQSILAIWATQVILMGAVEGYRVAGNGPLGEAEDLLYPGGSFDPLGLATDPEAFAELKVKELKNGRLAMFSMFGFFVQAIVTGKGPIENLADHLADPVNNNAWAFATNFVPGK

SEQ ID NO: 21214 - protein, 233 aa, Arabidopsis thaliana
  peptide (1)..(233): Ceres Seq. ID no. 12600747
  misc_feature (31)..(200): Pfam Name: Chlorophyll A-B binding protein Pfam Description: Chlorophyll A-B binding protein
  misc_feature (31)..(200): Pfam Name: Chlorophyll A-B binding protein Pfam Description: Chlorophyll A-B binding protein
  misc_feature (1)..(233): Homolog of NCBI NO: 12324161 NR Description: chlorophyll A-B-binding protein 2 precursor, 5'
  misc_feature (1)..(233): Homolog of NCBI NO: 21592428 NR Description: putative photosystem II type I chlorophyll a b
  misc_feature (1)..(233): Homolog of NCBI NO: 18266039 NR Description: chlorophyll a/b binding protein [Brassica
  misc_feature (1)..(233): Homolog of NCBI NO: 18403549 NR Description: photosystem II type I chlorophyll a /b binding
  misc_feature (1)..(233): Homolog of NCBI NO: 115778 NR Description: Chlorophyll A-B binding protein 1, chloroplast
  misc_feature (1)..(233): Homolog of NCBI NO: 18403549 NR Description: photosystem II type I chlorophyll a /b binding
  misc_feature (1)..(233): Homolog of NCBI NO: 31323256 NR Description: chlorophyll a/b binding protein [Brassica
  misc_feature (1)..(233): Homolog of NCBI NO: 17473828 NR Description: chlorophyll a/b-binding protein [Arabidopsis
  misc_feature (1)..(233): Homolog of NCBI NO: 12324161 NR Description: chlorophyll A-B-binding protein 2 precursor, 5'
  misc_feature (1)..(233): Homolog of NCBI NO: 18266039 NR Description: chlorophyll a/b binding protein [Brassica
  misc_feature (1)..(233): Homolog of NCBI NO: 21592428 NR Description: putative photosystem II type I chlorophyll a b
  misc_feature (1)..(233): Homolog of NCBI NO: 18397286 NR Description: photosystem II type I chlorophyll a /b binding
  misc_feature (1)..(233): Homolog of NCBI NO: 15220615 NR Description: light-harvesting chlorophyll a/b binding protein
  misc_feature (1)..(233): Homolog of NCBI NO: 18403546 NR Description: photosystem II type I chlorophyll a /b binding
  misc_feature (1)..(233): Homolog of NCBI NO: 115778 NR Description: Chlorophyll A-B binding protein 1, chloroplast
  misc_feature (1)..(233): Homolog of NCBI NO: 31323256 NR Description: chlorophyll a/b binding protein [Brassica
  misc_feature (1)..(233): Homolog of NCBI NO: 18403546 NR Description: photosystem II type I chlorophyll a /b binding
  misc_feature (1)..(233): Homolog of NCBI NO: 17473828 NR Description: chlorophyll a/b-binding protein [Arabidopsis
  misc_feature (1)..(233): Homolog of NCBI NO: 15220615 NR Description: light-harvesting chlorophyll a/b binding protein
  misc_feature (1)..(233): Homolog of NCBI NO: 18397286 NR Description: photosystem II type I chlorophyll a /b binding
MRKTVAKPKGPSGSPWYGSDRVKYLGPFSGESPSYLTGEFPGDYGWDTAGLSADPETFARNRELEVIHSRWAMLGALGCVFPELLARNGVKFGEAVWFKAGSQIFSDGGLDYLGNPSLVHAQSILAIWATQVILMGAVEGYRVAGNGPLGEAEDLLYPGGSFDPLGLATDPEAFAELKVKELKNGRLAMFSMFGFFVQAIVTGKGPIENLADHLADPVNNNAWAFATNFVPGK

SEQ ID NO: 21215 - DNA, 1128 bp, Arabidopsis thaliana
  misc_feature (1)..(1128): Ceres Seq. ID no. 12327330
  misc_feature: MA Experiment ID: 108576 Result: Up-regulated in Transcription
  misc_feature: MA Experiment 108576 PARAMETER Experiment Name: At_42deg_Heat_cDNA_P Parameter: Temperature (deg C) Value: 42 vs. 22
  misc_feature: MA Experiment 108576 PARAMETER Experiment Name: At_42deg_Heat_cDNA_P Parameter: Timepoint (hr) Value: 1
  misc_feature: MA Experiment 108576 PARAMETER Experiment Name: At_42deg_Heat_cDNA_P Parameter: Tissue Value: Aerial
  misc_feature: MA Experiment ID: 108668 Result: Up-regulated in Transcription
  misc_feature: MA Experiment 108668 PARAMETER Experiment Name: At_2mM_SA_cDNA_P Parameter: Plant Line Value: WS
  misc_feature: MA Experiment 108668 PARAMETER Experiment Name: At_2mM_SA_cDNA_P Parameter: Timepoint (hr) Value: 6
  misc_feature: MA Experiment 108668 PARAMETER Experiment Name: At_2mM_SA_cDNA_P Parameter: Treatment Value: 2mM SA vs. No Treatment
  misc_feature: MA Experiment ID: 20000111 Result: Up-regulated in Transcription
  misc_feature: MA Experiment 20000111 PARAMETER Experiment Name: At_42deg_Heat_cDNA_P Parameter: Temperature (deg C) Value: 42 vs. 22
  misc_feature: MA Experiment 20000111 PARAMETER Experiment Name: At_42deg_Heat_cDNA_P Parameter: Timepoint (hr) Value: 6
  misc_feature: MA Experiment 20000111 PARAMETER Experiment Name: At_42deg_Heat_cDNA_P Parameter: Tissue Value: Aerial
  misc_feature: MA Experiment ID: 20000112 Result: Up-regulated in Transcription
  misc_feature: MA Experiment 20000112 PARAMETER Experiment Name: At_42deg_Heat_cDNA_P Parameter: Temperature (deg C) Value: 42 vs. 22
  misc_feature: MA Experiment 20000112 PARAMETER Experiment Name: At_42deg_Heat_cDNA_P Parameter: Timepoint (hr) Value: 2
  misc_feature: MA Experiment 20000112 PARAMETER Experiment Name: At_42deg_Heat_cDNA_P Parameter: Tissue Value: Aerial
  misc_feature: MA Experiment ID: 20000113 Result: Up-regulated in Transcription
  misc_feature: MA Experiment 20000113 PARAMETER Experiment Name: At_42deg_Heat_cDNA_P Parameter: Temperature (deg C) Value: 42 vs. 22
  misc_feature: MA Experiment 20000113 PARAMETER Experiment Name: At_42deg_Heat_cDNA_P Parameter: Timepoint (hr) Value: 8
  misc_feature: MA Experiment 20000113 PARAMETER Experiment Name: At_42deg_Heat_cDNA_P Parameter: Tissue Value: Aerial
  misc_feature: MA Experiment ID: 20000144 Result: Up-regulated in Transcription
  misc_feature: MA Experiment 20000144 PARAMETER Experiment Name: At_42deg_Heat_cDNA_P Parameter: Temperature (deg C) Value: 42 vs. 22
  misc_feature: MA Experiment 20000144 PARAMETER Experiment Name: At_42deg_Heat_cDNA_P Parameter: Timepoint (hr) Value: 1
  misc_feature: MA Experiment 20000144 PARAMETER Experiment Name: At_42deg_Heat_cDNA_P Parameter: Tissue Value: Aerial
  misc_feature: MA Experiment ID: 20000173 Result: Up-regulated in Transcription
  misc_feature: MA Experiment 20000173 PARAMETER Experiment Name: At_42deg_Heat_P Parameter: Age (day) Value: 14
  misc_feature: MA Experiment 20000173 PARAMETER Experiment Name: At_42deg_Heat_P Parameter: Organism Value: A. thaliana
  misc_feature: MA Experiment 20000173 PARAMETER Experiment Name: At_42deg_Heat_P Parameter: Plant Line Value: WS
  misc_feature: MA Experiment 20000173 PARAMETER Experiment Name: At_42deg_Heat_P Parameter: Temperature (deg C) Value: 42 vs. 22
  misc_feature: MA Experiment 20000173 PARAMETER Experiment Name: At_42deg_Heat_P Parameter: Timepoint (hr) Value: 6
  misc_feature: MA Experiment 20000173 PARAMETER Experiment Name: At_42deg_Heat_P Parameter: Tissue Value: Aerial
  misc_feature: MA Experiment ID: 20000182 Result: Up-regulated in Transcription
  misc_feature: MA Experiment 20000182 PARAMETER Experiment Name: At_2mM_SA_P Parameter: Age (day) Value: 14
  misc_feature: MA Experiment 20000182 PARAMETER Experiment Name: At_2mM_SA_P Parameter: Organism Value: A. thaliana
  misc_feature: MA Experiment 20000182 PARAMETER Experiment Name: At_2mM_SA_P Parameter: Plant Line Value: WS
  misc_feature: MA Experiment 20000182 PARAMETER Experiment Name: At_2mM_SA_P Parameter: Timepoint (hr) Value: 6
  misc_feature: MA Experiment 20000182 PARAMETER Experiment Name: At_2mM_SA_P Parameter: Tissue Value: Aerial
  misc_feature: MA Experiment 20000182 PARAMETER Experiment Name: At_2mM_SA_P Parameter: Treatment Value: 2mM SA vs. No Treatment
atttttttgcatagaagagagagaggcggagagagaggaaagtgaagaagcaatcgtgagagactctctcgagtcttccctgagtcactcctctcctctcacacctttttgcttcgcgattaagagtcagagagagagagatagtaaacatcgaacgtcttccatttcatcttccttcgattaccttgttagggttttgtattttggcttctggattcttcttcactatgcataagttgagcagaagcaaccgtgacaaacttcagcagttcgtggctatcacaggagctagtgagaagaatgctcttcaggctctcaaagccagtgattggcaccttgaagcagcgtttgatgtgttttacagccagcctcaaccaagaagcaatgctgctgaagtaagacgcttggaggagctctacaatagatataaagacccgtattctgatatgattcttgcggagggtatctcggttctgtgtaatgatcttgaggtggaaccgcaagacatagtcacgttggttctttcgtggcatatgaatgctgcaacagcgtgtgagttttccaggcaagaatttatcagtggattacaggcattaggtgtagattcaatcgggaagttgcaggaaaagctgccatttatgcgttctgagcttaaagatgaacaaaagttccatgagatatacaactttgcttttgggtgggcgaaagagaaggggcagaaatctcttgccttagacacagcgattgggatgtggcagttgctctttgcagaaagagagtggcctttggtaactcactggtgtgatttcttgcaggatcgtcataacaaggccatatctaaggacacatgggcacagctactggaattttcaaggatggtcgacccagtgctgtcgaattacgatgcagaaggagcatggccttacctgattgatgaattcgttgagtatttgtatgacaaaaatgtcgttgagaagtgaccagccaactgggagaagtaatcaactctatttgacaatgttcctttcttctcattattttaaatagacttgcttatctcacagatttttctattgtgtttgtcagaatctttaaattgatgattaaataagtaagcttttcaacctc

SEQ ID NO: 21216 - protein, 250 aa, Arabidopsis thaliana
  peptide (1)..(250): Ceres Seq. ID no. 12327331
  misc_feature (128)..(243): Pfam Name: Domain of unknown function (DUF298) Pfam Description: Domain of unknown function (DUF298)
  misc_feature (1)..(241): Homolog of NCBI NO: 15826860 NR Description: testis derived transcript 3 [Mus musculus]
  misc_feature (1)..(246): Homolog of NCBI NO: 24664675 NR Description: CG7427-PA [Drosophila melanogaster]
  misc_feature (2)..(241): Homolog of NCBI NO: 34857167 NR Description: similar to RP42 homolog [Rattus norvegicus]
  misc_feature (1)..(241): Homolog of NCBI NO: 6166507 NR Description: RP42 [Mus musculus]
  misc_feature (1)..(241): Homolog of NCBI NO: 32966900 NR Description: leucine zipper protein [Branchiostoma belcheri
  misc_feature (1)..(241): Homolog of NCBI NO: 18700658 NR Description: leucine zipper protein [Homo sapiens]
  misc_feature (1)..(241): Homolog of NCBI NO: 34784818 NR Description: RP42 homolog [Homo sapiens]
  misc_feature (1)..(241): Homolog of NCBI NO: 34784120 NR Description: Unknown (protein for MGC:66414) [Danio rerio]
  misc_feature (1)..(250): Homolog of NCBI NO: 15292985 NR Description: unknown protein [Arabidopsis thaliana]
  misc_feature (1)..(250): Homolog of NCBI NO: 18399737 NR Description: expressed protein
MHKLSRSNRDKLQQFVAITGASEKNALQALKASDWHLEAAFDVFYSQPQPRSNAAEVRRLEELYNRYKDPYSDMILAEGISVLCNDLEVEPQDIVTLVLSWHMNAATACEFSRQEFISGLQALGVDSIGKLQEKLPFMRSELKDEQKFHEIYNFAFGWAKEKGQKSLALDTAIGMWQLLFAEREWPLVTHWCDFLQDRHNKAISKDTWAQLLEFSRMVDPVLSNYDAEGAWPYLIDEFVEYLYDKNVVEK

SEQ ID NO: 21217 - protein, 177 aa, Arabidopsis thaliana
  peptide (1)..(177): Ceres Seq. ID no. 12327332
  misc_feature (55)..(170): Pfam Name: Domain of unknown function (DUF298) Pfam Description: Domain of unknown function (DUF298)
  misc_feature (1)..(168): Homolog of NCBI NO: 15826860 NR Description: testis derived transcript 3 [Mus musculus]
  misc_feature (1)..(173): Homolog of NCBI NO: 24664675 NR Description: CG7427-PA [Drosophila melanogaster]
  misc_feature (1)..(168): Homolog of NCBI NO: 34857167 NR Description: similar to RP42 homolog [Rattus norvegicus]
  misc_feature (1)..(168): Homolog of NCBI NO: 6166507 NR Description: RP42 [Mus musculus]
  misc_feature (1)..(168): Homolog of NCBI NO: 32966900 NR Description: leucine zipper protein [Branchiostoma belcheri
  misc_feature (1)..(168): Homolog of NCBI NO: 18700658 NR Description: leucine zipper protein [Homo sapiens]
  misc_feature (1)..(168): Homolog of NCBI NO: 34784818 NR Description: RP42 homolog [Homo sapiens]
  misc_feature (1)..(168): Homolog of NCBI NO: 34784120 NR Description: Unknown (protein for MGC:66414) [Danio rerio]
  misc_feature (1)..(177): Homolog of NCBI NO: 15292985 NR Description: unknown protein [Arabidopsis thaliana]
  misc_feature (1)..(177): Homolog of NCBI NO: 18399737 NR Description: expressed protein
MILAEGISVLCNDLEVEPQDIVTLVLSWHMNAATACEFSRQEFISGLQALGVDSIGKLQEKLPFMRSELKDEQKFHEIYNFAFGWAKEKGQKSLALDTAIGMWQLLFAEREWPLVTHWCDFLQDRHNKAISKDTWAQLLEFSRMVDPVLSNYDAEGAWPYLIDEFVEYLYDKNVVEK

SEQ ID NO: 21218 - protein, 148 aa, Arabidopsis thaliana
  peptide (1)..(148): Ceres Seq. ID no. 12327333
  misc_feature (26)..(141): Pfam Name: Domain of unknown function (DUF298) Pfam Description: Domain of unknown function (DUF298)
  misc_feature (1)..(139): Homolog of NCBI NO: 15826860 NR Description: testis derived transcript 3 [Mus musculus]
  misc_feature (1)..(144): Homolog of NCBI NO: 24664675 NR Description: CG7427-PA [Drosophila melanogaster]
  misc_feature (1)..(139): Homolog of NCBI NO: 34857167 NR Description: similar to RP42 homolog [Rattus norvegicus]
  misc_feature (1)..(139): Homolog of NCBI NO: 6166507 NR Description: RP42 [Mus musculus]
  misc_feature (1)..(139): Homolog of NCBI NO: 32966900 NR Description: leucine zipper protein [Branchiostoma belcheri
  misc_feature (1)..(139): Homolog of NCBI NO: 18700658 NR Description: leucine zipper protein [Homo sapiens]
  misc_feature (1)..(139): Homolog of NCBI NO: 34784818 NR Description: RP42 homolog [Homo sapiens]
  misc_feature (1)..(139): Homolog of NCBI NO: 34784120 NR Description: Unknown (protein for MGC:66414) [Danio rerio]
  misc_feature (1)..(148): Homolog of NCBI NO: 15292985 NR Description: unknown protein [Arabidopsis thaliana]
  misc_feature (1)..(148): Homolog of NCBI NO: 18399737 NR Description: expressed protein
MNAATACEFSRQEFISGLQALGVDSIGKLQEKLPFMRSELKDEQKFHEIYNFAFGWAKEKGQKSLALDTAIGMWQLLFAEREWPLVTHWCDFLQDRHNKAISKDTWAQLLEFSRMVDPVLSNYDAEGAWPYLIDEFVEYLYDKNVVEK

SEQ ID NO: 21219 - DNA, 1159 bp, Arabidopsis thaliana
  misc_feature (1)..(1159): Ceres Seq. ID no. 12324408
  misc_feature: MA Experiment ID: 108462 Result: Up-regulated in Transcription
  misc_feature: MA Experiment 108462 PARAMETER Experiment Name: At_Germinating_Seeds_cDNA_P Parameter: Age (day) Value: 2 vs. 0
  misc_feature: MA Experiment 108462 PARAMETER Experiment Name: At_Germinating_Seeds_cDNA_P Parameter: Tissue Value: Germinating Seeds
  misc_feature: MA Experiment ID: 108463 Result: Up-regulated in Transcription
  misc_feature: MA Experiment 108463 PARAMETER Experiment Name: At_Germinating_Seeds_cDNA_P Parameter: Age (day) Value: 3 vs. 0
  misc_feature: MA Experiment 108463 PARAMETER Experiment Name: At_Germinating_Seeds_cDNA_P Parameter: Tissue Value: Germinating Seeds
  misc_feature: MA Experiment ID: 108464 Result: Up-regulated in Transcription
  misc_feature: MA Experiment 108464 PARAMETER Experiment Name: At_Germinating_Seeds_cDNA_P Parameter: Age (day) Value: 4 vs. 0
  misc_feature: MA Experiment 108464 PARAMETER Experiment Name: At_Germinating_Seeds_cDNA_P Parameter: Tissue Value: Germinating Seeds
  misc_feature: MA Experiment ID: 108576 Result: Down-regulated in Transcription
  misc_feature: MA Experiment 108576 PARAMETER Experiment Name: At_42deg_Heat_cDNA_P Parameter: Temperature (deg C) Value: 42 vs. 22
  misc_feature: MA Experiment 108576 PARAMETER Experiment Name: At_42deg_Heat_cDNA_P Parameter: Timepoint (hr) Value: 1
  misc_feature: MA Experiment 108576 PARAMETER Experiment Name: At_42deg_Heat_cDNA_P Parameter: Tissue Value: Aerial
  misc_feature: MA Experiment ID: 108668 Result: Down-regulated in Transcription
  misc_feature: MA Experiment 108668 PARAMETER Experiment Name: At_2mM_SA_cDNA_P Parameter: Plant Line Value: WS
  misc_feature: MA Experiment 108668 PARAMETER Experiment Name: At_2mM_SA_cDNA_P Parameter: Timepoint (hr) Value: 6
  misc_feature: MA Experiment 108668 PARAMETER Experiment Name: At_2mM_SA_cDNA_P Parameter: Treatment Value: 2mM SA vs. No Treatment
  misc_feature: MA Experiment ID: 20000070 Result: Down-regulated in Transcription
  misc_feature: MA Experiment 20000070 PARAMETER Experiment Name: At_100uM_ABA_Mutants_cDNA_P Parameter: Plant Line Value: CS24
  misc_feature: MA Experiment 20000070 PARAMETER Experiment Name: At_100uM_ABA_Mutants_cDNA_P Parameter: Timepoint (hr) Value: 6
  misc_feature: MA Experiment 20000070 PARAMETER Experiment Name: At_100uM_ABA_Mutants_cDNA_P Parameter: Tissue Value: Aerial
  misc_feature: MA Experiment 20000070 PARAMETER Experiment Name: At_100uM_ABA_Mutants_cDNA_P Parameter: Treatment Value: 100uM ABA vs. No Treatment
  misc_feature: MA Experiment ID: 20000088 Result: Down-regulated in Transcription
  misc_feature: MA Experiment 20000088 PARAMETER Experiment Name: At_100uM_ABA_Mutants_cDNA_P Parameter: Plant Line Value: Landsberg
  misc_feature: MA Experiment 20000088 PARAMETER Experiment Name: At_100uM_ABA_Mutants_cDNA_P Parameter: Timepoint (hr) Value: 6
  misc_feature: MA Experiment 20000088 PARAMETER Experiment Name: At_100uM_ABA_Mutants_cDNA_P Parameter: Tissue Value: Aerial
  misc_feature: MA Experiment 20000088 PARAMETER Experiment Name: At_100uM_ABA_Mutants_cDNA_P Parameter: Treatment Value: 100uM ABA vs. No Treatment
  misc_feature: MA Experiment ID: 20000089 Result: Down-regulated in Transcription
  misc_feature: MA Experiment ID: 20000090 Result: Down-regulated in Transcription
  misc_feature: MA Experiment ID: 20000173 Result: Down-regulated in Transcription
  misc_feature: MA Experiment 20000173 PARAMETER Experiment Name: At_42deg_Heat_P Parameter: Age (day) Value: 14
  misc_feature: MA Experiment 20000173 PARAMETER Experiment Name: At_42deg_Heat_P Parameter: Organism Value: A. thaliana
  misc_feature: MA Experiment 20000173 PARAMETER Experiment Name: At_42deg_Heat_P Parameter: Plant Line Value: WS
  misc_feature: MA Experiment 20000173 PARAMETER Experiment Name: At_42deg_Heat_P Parameter: Temperature (deg C) Value: 42 vs. 22
  misc_feature: MA Experiment 20000173 PARAMETER Experiment Name: At_42deg_Heat_P Parameter: Timepoint (hr) Value: 6
  misc_feature: MA Experiment 20000173 PARAMETER Experiment Name: At_42deg_Heat_P Parameter: Tissue Value: Aerial
  misc_feature: MA Experiment ID: 20000180 Result: Up-regulated in Transcription
  misc_feature: MA Experiment 20000180 PARAMETER Experiment Name: At_Germinating_Seeds_P Parameter: Age (hr) Value: 24 vs. 0
  misc_feature: MA Experiment 20000180 PARAMETER Experiment Name: At_Germinating_Seeds_P Parameter: Tissue Value: Germinating Seeds
  misc_feature: MA Experiment ID: 20000234 Result: Up-regulated in Transcription
  misc_feature: MA Experiment 20000234 PARAMETER Experiment Name: At_Siliques_P Parameter: Age (day) Value: 21
  misc_feature: MA Experiment 20000234 PARAMETER Experiment Name: At_Siliques_P Parameter: Organism Value: A. thaliana
  misc_feature: MA Experiment 20000234 PARAMETER Experiment Name: At_Siliques_P Parameter: Plant Line Value: WS
  misc_feature: MA Experiment 20000234 PARAMETER Experiment Name: At_Siliques_P Parameter: Tissue Value: Less Than 5mm Siliques vs. Whole Plant
  misc_feature: MA Experiment ID: 20000235 Result: Up-regulated in Transcription
  misc_feature: MA Experiment 20000235 PARAMETER Experiment Name: At_Siliques_P Parameter: Age (day) Value: 21
  misc_feature: MA Experiment 20000235 PARAMETER Experiment Name: At_Siliques_P Parameter: Organism Value: A. thaliana
  misc_feature: MA Experiment 20000235 PARAMETER Experiment Name: At_Siliques_P Parameter: Plant Line Value: WS
  misc_feature: MA Experiment 20000235 PARAMETER Experiment Name: At_Siliques_P Parameter: Tissue Value: 5-10mm Siliques vs. Whole Plant
  misc_feature: MA Experiment ID: 20000265 Result: Up-regulated in Transcription
  misc_feature: MA Experiment 20000265 PARAMETER Experiment Name: At_Open_Flower_P Parameter: Age (day) Value: 21
  misc_feature: MA Experiment 20000265 PARAMETER Experiment Name: At_Open_Flower_P Parameter: Plant Line Value: WS
  misc_feature: MA Experiment 20000265 PARAMETER Experiment Name: At_Open_Flower_P Parameter: Tissue Value: Closed Flower vs. Whole Plant
  misc_feature: MA Experiment ID: 20000438 Result: Up-regulated in Transcription
  misc_feature: MA Experiment 20000438 PARAMETER Experiment Name: At_Shoots__P Parameter: Age (day) Value: 14
  misc_feature: MA Experiment 20000438 PARAMETER Experiment Name: At_Shoots__P Parameter: Tissue Value: Shoots vs. Whole Plant
  misc_feature: MA Experiment ID: 20000456 Result: Down-regulated in Transcription
  misc_feature: MA Experiment 20000456 PARAMETER Experiment Name: At_100uM_BA_P Parameter: Age (day) Value: 14
  misc_feature: MA Experiment 20000456 PARAMETER Experiment Name: At_100uM_BA_P Parameter: Organism Value: A. thaliana
  misc_feature: MA Experiment 20000456 PARAMETER Experiment Name: At_100uM_BA_P Parameter: Plant Line Value: WS
  misc_feature: MA Experiment 20000456 PARAMETER Experiment Name: At_100uM_BA_P Parameter: Timepoint (hr) Value: 6
  misc_feature: MA Experiment 20000456 PARAMETER Experiment Name: At_100uM_BA_P Parameter: Tissue Value: Aerial
  misc_feature: MA Experiment 20000456 PARAMETER Experiment Name: At_100uM_BA_P Parameter: Treatment Value: 100uM BA vs. No Treatment
  misc_feature: MA Experiment ID: 20000460 Result: Down-regulated in Transcription
  misc_feature: MA Experiment 20000460 PARAMETER Experiment Name: At_10percent_PEG_P Parameter: Age (day) Value: 12
  misc_feature: MA Experiment 20000460 PARAMETER Experiment Name: At_10percent_PEG_P Parameter: Organism Value: A. thaliana
  misc_feature: MA Experiment 20000460 PARAMETER Experiment Name: At_10percent_PEG_P Parameter: Plant Line Value: WS
  misc_feature: MA Experiment 20000460 PARAMETER Experiment Name: At_10percent_PEG_P Parameter: Timepoint (day) Value: 12
  misc_feature: MA Experiment 20000460 PARAMETER Experiment Name: At_10percent_PEG_P Parameter: Tissue Value: Whole Plant
  misc_feature: MA Experiment 20000460 PARAMETER Experiment Name: At_10percent_PEG_P Parameter: Treatment Value: 10percent PEG vs. No Treatment
  misc_feature: MA Experiment ID: 20000496 Result: Up-regulated in Transcription
  misc_feature: MA Experiment 20000496 PARAMETER Experiment Name: At_Guard_Cells_P Parameter: Harvest Date Value: 7/19/2002
  misc_feature: MA Experiment 20000496 PARAMETER Experiment Name: At_Guard_Cells_P Parameter: Organism Value: Canola
  misc_feature: MA Experiment 20000496 PARAMETER Experiment Name: At_Guard_Cells_P Parameter: Tissue Value: Guard Cells vs. Leaves
  misc_feature: MA Experiment ID: 20000573 Result: Down-regulated in Transcription
  misc_feature: MA Experiment 20000573 PARAMETER Experiment Name: At_100uM_ABA_Mutants__P Parameter: Organism Value: A. thaliana
  misc_feature: MA Experiment 20000573 PARAMETER Experiment Name: At_100uM_ABA_Mutants__P Parameter: Plant Line Value: CS22 vs. Ler wt
  misc_feature: MA Experiment 20000573 PARAMETER Experiment Name: At_100uM_ABA_Mutants__P Parameter: Timepoint (hr) Value: N/A
  misc_feature: MA Experiment 20000573 PARAMETER Experiment Name: At_100uM_ABA_Mutants__P Parameter: Tissue Value: Whole Plant
  misc_feature: MA Experiment 20000573 PARAMETER Experiment Name: At_100uM_ABA_Mutants__P Parameter: Treatment Value: None
  misc_feature: MA Experiment ID: 20001248 Result: Down-regulated in Transcription
  misc_feature: MA Experiment 20001248 PARAMETER Experiment Name: At_Far-red-induction_P Parameter: Age (day) Value: 7
  misc_feature: MA Experiment 20001248 PARAMETER Experiment Name: At_Far-red-induction_P Parameter: Light Value: Far-red vs. White
  misc_feature: MA Experiment 20001248 PARAMETER Experiment Name: At_Far-red-induction_P Parameter: Organism Value: A. thaliana
  misc_feature: MA Experiment 20001248 PARAMETER Experiment Name: At_Far-red-induction_P Parameter: Plant Line Value: Columbia
  misc_feature: MA Experiment 20001248 PARAMETER Experiment Name: At_Far-red-induction_P Parameter: Timepoint (hr) Value: 4
  misc_feature: MA Experiment 20001248 PARAMETER Experiment Name: At_Far-red-induction_P Parameter: Tissue Value: Whole Plant
  misc_feature: MA Experiment ID: 20001558 Result: Up-regulated in Transcription
  misc_feature: MA Experiment 20001558 PARAMETER Experiment Name: At_Drought_Soil_Dry_P Parameter: Age (day) Value: 27
  misc_feature: MA Experiment 20001558 PARAMETER Experiment Name: At_Drought_Soil_Dry_P Parameter: Organism Value: A. thaliana
  misc_feature: MA Experiment 20001558 PARAMETER Experiment Name: At_Drought_Soil_Dry_P Parameter: Plant Line Value: WS
  misc_feature: MA Experiment 20001558 PARAMETER Experiment Name: At_Drought_Soil_Dry_P Parameter: Post Timepoint (hr) Value: 6
  misc_feature: MA Experiment 20001558 PARAMETER Experiment Name: At_Drought_Soil_Dry_P Parameter: Post-Treatment Value: Re-Water vs. No Drought
  misc_feature: MA Experiment 20001558 PARAMETER Experiment Name: At_Drought_Soil_Dry_P Parameter: Timepoint (day) Value: 13
  misc_feature: MA Experiment 20001558 PARAMETER Experiment Name: At_Drought_Soil_Dry_P Parameter: Treatment Value: Drought vs. No Drought
  misc_feature: MA Experiment ID: 20001905 Result: Down-regulated in Transcription
  misc_feature: MA Experiment 20001905 PARAMETER Experiment Name: At_Drought_Reproduction_P Parameter: Age (day) Value: 40
  misc_feature: MA Experiment 20001905 PARAMETER Experiment Name: At_Drought_Reproduction_P Parameter: Organism Value: A. thaliana
  misc_feature: MA Experiment 20001905 PARAMETER Experiment Name: At_Drought_Reproduction_P Parameter: Plant Line Value: WS
  misc_feature: MA Experiment 20001905 PARAMETER Experiment Name: At_Drought_Reproduction_P Parameter: Timepoint (day) Value: 10
  misc_feature: MA Experiment 20001905 PARAMETER Experiment Name: At_Drought_Reproduction_P Parameter: Tissue Value: Rosettes
  misc_feature: MA Experiment 20001905 PARAMETER Experiment Name: At_Drought_Reproduction_P Parameter: Treatment Value: Drought vs. No Drought
accacacgattaaaccaaagagaagagagagagagagagaaacagagaagaaaagattgaagcaatcgaatggagagtgtggtggcaacatggagcagagaagaagagaaagcattcgagaacgcaattgcgttgcattgtgtagaggaagagataacagaggatcaatggaacaaaatgtcgtcaatggtaccaagcaaagccttagaagaagtaaagaaacattaccaaatccttttagaagatgtcaaagcaatcgagaatggtcaagttcctttacctcgttatcatcaccgcaaaggtctcatcgtagatgaagcagcagcagcagctacttctcctgccaacagagactctcattcctctggatcatctgagaagaaaccaaatcctggcacctccgggataagtagctccaatggaggaagaagtggtggctcgagagctgagcaagagagaagaaaagggattccatggactgaagaagagcatcggttgtttcttttgggtttggacaagtttgggaaaggagattggagaagcatttcaaggaactttgtgatctcaagaactccaacacaagttgcaagtcatgctcaaaaatacttcatcaggcttaactcgatgaaccgagatagaaggcggtctagcattcacgacatcaccactgtgaacaatcaagctcctgcggttacaggaggaggacaacaaccgcaagtggttaaacatagaccagctcagccacaaccacagccacaaccgcaaccacaacaacatcatcccccaacaatggctggattagggatgtatggtggtgcgccagtgggacaaccgatcatcgcaccacctgatcatatgggttcagctgttggaacacctgtgatgcttccacctccaatgggaactcatcatcatcaccatcaccatcatcttggagttgctccttatgctgtaccggcttatccggtaccgccattaccgcagcaacatccagctccgtcgacaatgcactgactgaaaacaatacagttggtattaaaactgacatatattgtactgaaaacttgtgtacattctcaaatcgaatagcgaaactgcggcaaataataatgtacagcagaggaatctgtttttccatttcaaatctatgattttcttc

SEQ ID NO: 21220 - protein, 314 aa, Arabidopsis thaliana
  peptide (1)..(314): Ceres Seq. ID no. 12324409
  misc_feature (5)..(57): Pfam Name: Myb-like DNA-binding domain Pfam Description: Myb-like DNA-binding domain
  misc_feature (121)..(202): Homolog of NCBI NO: 21618234 NR Description: MYB-family transcription factor, putative
  misc_feature (121)..(202): Homolog of NCBI NO: 15229712 NR Description: MYB-family transcription factor, putative
  misc_feature (8)..(202): Homolog of NCBI NO: 30687381 NR Description: MYB family transcription factor -related
  misc_feature (8)..(202): Homolog of NCBI NO: 7446171 NR Description: probable MYB family transcription factor
  misc_feature (8)..(202): Homolog of NCBI NO: 34895714 NR Description: putative myb-related transcription activator
  misc_feature (2)..(74): Homolog of NCBI NO: 18874265 NR Description: MYB-like transcription factor DVL1 [Antirrhinum
  misc_feature (118)..(202): Homolog of NCBI NO: 18874265 NR Description: MYB-like transcription factor DVL1 [Antirrhinum
  misc_feature (8)..(314): Homolog of NCBI NO: 32487513 NR Description: OSJNBa0064G10.8 [Oryza sativa (japonica
  misc_feature (3)..(302): Homolog of NCBI NO: 34914460 NR Description: putative syringolide-induced protein 1-3-1B
  misc_feature (1)..(314): Homolog of NCBI NO: 18402458 NR Description: Expressed protein
MESVVATWSREEEKAFENAIALHCVEEEITEDQWNKMSSMVPSKALEEVKKHYQILLEDVKAIENGQVPLPRYHHRKGLIVDEAAAAATSPANRDSHSSGSSEKKPNPGTSGISSSNGGRSGGSRAEQERRKGIPWTEEEHRLFLLGLDKFGKGDWRSISRNFVISRTPTQVASHAQKYFIRLNSMNRDRRRSSIHDITTVNNQAPAVTGGGQQPQVVKHRPAQPQPQPQPQPQQHHPPTMAGLGMYGGAPVGQPIIAPPDHMGSAVGTPVMLPPPMGTHHHHHHHHLGVAPYAVPAYPVPPLPQQHPAPSTMH

SEQ ID NO: 21221 - protein, 278 aa, Arabidopsis thaliana
  peptide (1)..(278): Ceres Seq. ID no. 12324410
  misc_feature (85)..(166): Homolog of NCBI NO: 21618234 NR Description: MYB-family transcription factor, putative
  misc_feature (85)..(166): Homolog of NCBI NO: 15229712 NR Description: MYB-family transcription factor, putative
  misc_feature (1)..(166): Homolog of NCBI NO: 30687381 NR Description: MYB family transcription factor -related
  misc_feature (1)..(166): Homolog of NCBI NO: 7446171 NR Description: probable MYB family transcription factor
  misc_feature (1)..(166): Homolog of NCBI NO: 34895714 NR Description: putative myb-related transcription activator
  misc_feature (1)..(38): Homolog of NCBI NO: 18874265 NR Description: MYB-like transcription factor DVL1 [Antirrhinum
  misc_feature (82)..(166): Homolog of NCBI NO: 18874265 NR Description: MYB-like transcription factor DVL1 [Antirrhinum
  misc_feature (1)..(278): Homolog of NCBI NO: 32487513 NR Description: OSJNBa0064G10.8 [Oryza sativa (japonica
  misc_feature (1)..(266): Homolog of NCBI NO: 34914460 NR Description: putative syringolide-induced protein 1-3-1B
  misc_feature (1)..(278): Homolog of NCBI NO: 18402458 NR Description: Expressed protein
MSSMVPSKALEEVKKHYQILLEDVKAIENGQVPLPRYHHRKGLIVDEAAAAATSPANRDSHSSGSSEKKPNPGTSGISSSNGGRSGGSRAEQERRKGIPWTEEEHRLFLLGLDKFGKGDWRSISRNFVISRTPTQVASHAQKYFIRLNSMNRDRRRSSIHDITTVNNQAPAVTGGGQQPQVVKHRPAQPQPQPQPQPQQHHPPTMAGLGMYGGAPVGQPIIAPPDHMGSAVGTPVMLPPPMGTHHHHHHHHLGVAPYAVPAYPVPPLPQQHPAPSTMH

SEQ ID NO: 21222 - protein, 275 aa, Arabidopsis thaliana
  peptide (1)..(275): Ceres Seq. ID no. 12324411
  misc_feature (82)..(163): Homolog of NCBI NO: 21618234 NR Description: MYB-family transcription factor, putative
  misc_feature (82)..(163): Homolog of NCBI NO: 15229712 NR Description: MYB-family transcription factor, putative
  misc_feature (1)..(163): Homolog of NCBI NO: 30687381 NR Description: MYB family transcription factor -related
  misc_feature (1)..(163): Homolog of NCBI NO: 7446171 NR Description: probable MYB family transcription factor
  misc_feature (1)..(163): Homolog of NCBI NO: 34895714 NR Description: putative myb-related transcription activator
  misc_feature (1)..(35): Homolog of NCBI NO: 18874265 NR Description: MYB-like transcription factor DVL1 [Antirrhinum
  misc_feature (79)..(163): Homolog of NCBI NO: 18874265 NR Description: MYB-like transcription factor DVL1 [Antirrhinum
  misc_feature (1)..(275): Homolog of NCBI NO: 32487513 NR Description: OSJNBa0064G10.8 [Oryza sativa (japonica
  misc_feature (1)..(263): Homolog of NCBI NO: 34914460 NR Description: putative syringolide-induced protein 1-3-1B
  misc_feature (1)..(275): Homolog of NCBI NO: 18402458 NR Description: Expressed protein
MVPSKALEEVKKHYQILLEDVKAIENGQVPLPRYHHRKGLIVDEAAAAATSPANRDSHSSGSSEKKPNPGTSGISSSNGGRSGGSRAEQERRKGIPWTEEEHRLFLLGLDKFGKGDWRSISRNFVISRTPTQVASHAQKYFIRLNSMNRDRRRSSIHDITTVNNQAPAVTGGGQQPQVVKHRPAQPQPQPQPQPQQHHPPTMAGLGMYGGAPVGQPIIAPPDHMGSAVGTPVMLPPPMGTHHHHHHHHLGVAPYAVPAYPVPPLPQQHPAPSTMH

SEQ ID NO: 21223 - DNA, 1581 bp, Arabidopsis thaliana
  misc_feature (1)..(1581): Ceres Seq. ID no. 12325301
  misc_feature: MA Experiment ID: 108462 Result: Down-regulated in Transcription
  misc_feature: MA Experiment 108462 PARAMETER Experiment Name: At_Germinating_Seeds_cDNA_P Parameter: Age (day) Value: 2 vs. 0
  misc_feature: MA Experiment 108462 PARAMETER Experiment Name: At_Germinating_Seeds_cDNA_P Parameter: Tissue Value: Germinating Seeds
  misc_feature: MA Experiment ID: 108463 Result: Down-regulated in Transcription
  misc_feature: MA Experiment 108463 PARAMETER Experiment Name: At_Germinating_Seeds_cDNA_P Parameter: Age (day) Value: 3 vs. 0
  misc_feature: MA Experiment 108463 PARAMETER Experiment Name: At_Germinating_Seeds_cDNA_P Parameter: Tissue Value: Germinating Seeds
  misc_feature: MA Experiment ID: 108464 Result: Down-regulated in Transcription
  misc_feature: MA Experiment 108464 PARAMETER Experiment Name: At_Germinating_Seeds_cDNA_P Parameter: Age (day) Value: 4 vs. 0
  misc_feature: MA Experiment 108464 PARAMETER Experiment Name: At_Germinating_Seeds_cDNA_P Parameter: Tissue Value: Germinating Seeds
  misc_feature: MA Experiment ID: 20000087 Result: Down-regulated in Transcription
  misc_feature: MA Experiment 20000087 PARAMETER Experiment Name: At_100uM_ABA_Mutants_cDNA_P Parameter: Plant Line Value: WS
  misc_feature: MA Experiment 20000087 PARAMETER Experiment Name: At_100uM_ABA_Mutants_cDNA_P Parameter: Timepoint (hr) Value: 6
  misc_feature: MA Experiment 20000087 PARAMETER Experiment Name: At_100uM_ABA_Mutants_cDNA_P Parameter: Tissue Value: Aerial
  misc_feature: MA Experiment 20000087 PARAMETER Experiment Name: At_100uM_ABA_Mutants_cDNA_P Parameter: Treatment Value: 100uM ABA vs. No Treatment
ataccggaaatatcgtaccgtcttcctaaaataggaaatgtagcattacggagaaagacagataagctctctctgttctcttgccacacttcccaatacatggatccattttgacgtcatcttcatcttcaatcactatcactatctctctattatataaatctcttcatacccttttaccgatccttcaccgtgatcgtttaatcagacctcaatttcgttgttaaagaacaaagctttaagcagccatggatccaaaccaacgtatcgcgagaatctctgctcatctcaatcctcctaatcttcataatcagattgctgacgggtcaggtttgaatcgggtggcttgtcgggcaaaaggtggatcacccggattcaaagtggcgatacttggagcagctggtggaattggacaacctcttgcgatgttgatgaagatgaatcctttggtttcggttcttcatctctatgatgttgctaatgctcctggtgttactgctgatattagtcatatggatactagtgccgttgttcgtggatttctcgggcagccgcagttagaggaagcacttacgggtatggatttagtgatcatacctgctggtgttccgaggaaaccagggatgacgagggatgatctgtttaacattaatgctgggattgtgaagacactctctgaagctatagctaaatgttgtcctaaagcaattgtgaatataatcagtaatccggtgaactccacggtgccaatcgcagctgaggttttcaagaaagctggaacctttgatccaaagaaactcatgggtgtcactatgcttgatgttgttagagctaatacttttgtggcggaagtaatgagtcttgatccccgtgaagttgaagttccggttgttggaggacacgcaggagttacgattttaccactgctttcgcaggtgaaacctccttgctcgttcactcaaaaagagattgaatatctcacagaccgcatccaaaacggtggcactgaagttgttgaggctaaagctggagcaggttctgcaacactatccatggcatatgcagcagtggagtttgcagatgcttgcctcaggggtctacgaggtgatgcaaacatcgttgagtgcgcatatgtggcatcccatgtgactgagcttcccttcttcgcatcgaaggtgcgtctgggacgatgtgggatcgatgaagtgtacggccttggaccattgaacgaatatgagaggatgggattagagaaggcaaagaaagagctttcagtaagtattcataaaggtgttacctttgcgaagaaataaagagactcgatcgtgaataaacacacttaagtgatggttttggaatagtcagagttttggaataagaataacgcctcacaataaaagctcttgcgggttttcttggatccgatcctaaagcttcaaaaaactcaactcctttaggtaaaatcttcgattgttttatcgttccatcgaaccactttgttcttagatacaagaacgtttatgatttatgtagttgggttataaaagtgagaacagagcaataatcttgcaacattttttc

SEQ ID NO: 21224 - protein, 354 aa, Arabidopsis thaliana
  peptide (1)..(354): Ceres Seq. ID no. 12325302
  misc_feature (188)..(352): Pfam Name: lactate/malate dehydrogenase, alpha/beta Pfam Description: lactate/malate dehydrogenase, alpha/beta
  misc_feature (2)..(354): Homolog of NCBI NO: 11133654 NR Description: Malate dehydrogenase 2, glyoxysomal precursor
  misc_feature (4)..(354): Homolog of NCBI NO: 1346501 NR Description: MALATE DEHYDROGENASE, GLYOXYSOMAL PRECURSOR
  misc_feature (4)..(354): Homolog of NCBI NO: 169977 NR Description: malate dehydrogenase
  misc_feature (5)..(354): Homolog of NCBI NO: 3183079 NR Description: MALATE DEHYDROGENASE, GLYOXYSOMAL PRECURSOR
  misc_feature (2)..(354): Homolog of NCBI NO: 16323157 NR Description: AT5g09660/F17I14_150 [Arabidopsis thaliana]
  misc_feature (2)..(354): Homolog of NCBI NO: 15242466 NR Description: microbody NAD-dependent malate dehydrogenase
  misc_feature (4)..(354): Homolog of NCBI NO: 7431179 NR Description: malate dehydrogenase (EC 1.1.1.37) precursor,
  misc_feature (2)..(353): Homolog of NCBI NO: 1170897 NR Description: MALATE DEHYDROGENASE, GLYOXYSOMAL PRECURSOR
  misc_feature (2)..(353): Homolog of NCBI NO: 126894 NR Description: MALATE DEHYDROGENASE, GLYOXYSOMAL PRECURSOR
  misc_feature (1)..(354): Homolog of NCBI NO: 15227752 NR Description: putative glyoxysomal malate dehydrogenase
MDPNQRIARISAHLNPPNLHNQIADGSGLNRVACRAKGGSPGFKVAILGAAGGIGQPLAMLMKMNPLVSVLHLYDVANAPGVTADISHMDTSAVVRGFLGQPQLEEALTGMDLVIIPAGVPRKPGMTRDDLFNINAGIVKTLSEAIAKCCPKAIVNIISNPVNSTVPIAAEVFKKAGTFDPKKLMGVTMLDVVRANTFVAEVMSLDPREVEVPVVGGHAGVTILPLLSQVKPPCSFTQKEIEYLTDRIQNGGTEVVEAKAGAGSATLSMAYAAVEFADACLRGLRGDANIVECAYVASHVTELPFFASKVRLGRCGIDEVYGLGPLNEYERMGLEKAKKELSVSIHKGVTFAKK

SEQ ID NO: 21225 - protein, 295 aa, Arabidopsis thaliana
  peptide (1)..(295): Ceres Seq. ID no. 12325303
  misc_feature (129)..(293): Pfam Name: lactate/malate dehydrogenase, alpha/beta Pfam Description: lactate/malate dehydrogenase, alpha/beta
  misc_feature (1)..(295): Homolog of NCBI NO: 11133654 NR Description: Malate dehydrogenase 2, glyoxysomal precursor
  misc_feature (1)..(295): Homolog of NCBI NO: 1346501 NR Description: MALATE DEHYDROGENASE, GLYOXYSOMAL PRECURSOR
  misc_feature (1)..(295): Homolog of NCBI NO: 169977 NR Description: malate dehydrogenase
  misc_feature (1)..(295): Homolog of NCBI NO: 3183079 NR Description: MALATE DEHYDROGENASE, GLYOXYSOMAL PRECURSOR
  misc_feature (1)..(295): Homolog of NCBI NO: 16323157 NR Description: AT5g09660/F17I14_150 [Arabidopsis thaliana]
  misc_feature (1)..(295): Homolog of NCBI NO: 15242466 NR Description: microbody NAD-dependent malate dehydrogenase
  misc_feature (1)..(295): Homolog of NCBI NO: 7431179 NR Description: malate dehydrogenase (EC 1.1.1.37) precursor,
  misc_feature (1)..(294): Homolog of NCBI NO: 1170897 NR Description: MALATE DEHYDROGENASE, GLYOXYSOMAL PRECURSOR
  misc_feature (1)..(294): Homolog of NCBI NO: 126894 NR Description: MALATE DEHYDROGENASE, GLYOXYSOMAL PRECURSOR
  misc_feature (1)..(295): Homolog of NCBI NO: 15227752 NR Description: putative glyoxysomal malate dehydrogenase
MLMKMNPLVSVLHLYDVANAPGVTADISHMDTSAVVRGFLGQPQLEEALTGMDLVIIPAGVPRKPGMTRDDLFNINAGIVKTLSEAIAKCCPKAIVNIISNPVNSTVPIAAEVFKKAGTFDPKKLMGVTMLDVVRANTFVAEVMSLDPREVEVPVVGGHAGVTILPLLSQVKPPCSFTQKEIEYLTDRIQNGGTEVVEAKAGAGSATLSMAYAAVEFADACLRGLRGDANIVECAYVASHVTELPFFASKVRLGRCGIDEVYGLGPLNEYERMGLEKAKKELSVSIHKGVTFAKK

SEQ ID NO: 21226 - protein, 293 aa, Arabidopsis thaliana
  peptide (1)..(293): Ceres Seq. ID no. 12325304
  misc_feature (127)..(291): Pfam Name: lactate/malate dehydrogenase, alpha/beta Pfam Description: lactate/malate dehydrogenase, alpha/beta
  misc_feature (1)..(293): Homolog of NCBI NO: 11133654 NR Description: Malate dehydrogenase 2, glyoxysomal precursor
  misc_feature (1)..(293): Homolog of NCBI NO: 1346501 NR Description: MALATE DEHYDROGENASE, GLYOXYSOMAL PRECURSOR
  misc_feature (1)..(293): Homolog of NCBI NO: 169977 NR Description: malate dehydrogenase
  misc_feature (1)..(293): Homolog of NCBI NO: 3183079 NR Description: MALATE DEHYDROGENASE, GLYOXYSOMAL PRECURSOR
  misc_feature (1)..(293): Homolog of NCBI NO: 16323157 NR Description: AT5g09660/F17I14_150 [Arabidopsis thaliana]
  misc_feature (1)..(293): Homolog of NCBI NO: 15242466 NR Description: microbody NAD-dependent malate dehydrogenase
  misc_feature (1)..(293): Homolog of NCBI NO: 7431179 NR Description: malate dehydrogenase (EC 1.1.1.37) precursor,
  misc_feature (1)..(292): Homolog of NCBI NO: 1170897 NR Description: MALATE DEHYDROGENASE, GLYOXYSOMAL PRECURSOR
  misc_feature (1)..(292): Homolog of NCBI NO: 126894 NR Description: MALATE DEHYDROGENASE, GLYOXYSOMAL PRECURSOR
  misc_feature (1)..(293): Homolog of NCBI NO: 15227752 NR Description: putative glyoxysomal malate dehydrogenase
MKMNPLVSVLHLYDVANAPGVTADISHMDTSAVVRGFLGQPQLEEALTGMDLVIIPAGVPRKPGMTRDDLFNINAGIVKTLSEAIAKCCPKAIVNIISNPVNSTVPIAAEVFKKAGTFDPKKLMGVTMLDVVRANTFVAEVMSLDPREVEVPVVGGHAGVTILPLLSQVKPPCSFTQKEIEYLTDRIQNGGTEVVEAKAGAGSATLSMAYAAVEFADACLRGLRGDANIVECAYVASHVTELPFFASKVRLGRCGIDEVYGLGPLNEYERMGLEKAKKELSVSIHKGVTFAKK

SEQ ID NO: 21227 - DNA, 1721 bp, Arabidopsis thaliana
  misc_feature (1)..(1721): Ceres Seq. ID no. 12329109
  misc_feature: MA Experiment ID: 20000184 Result: Up-regulated in Transcription
  misc_feature: MA Experiment 20000184 PARAMETER Experiment Name: At_Shoots__P Parameter: Age (day) Value: 7
  misc_feature: MA Experiment 20000184 PARAMETER Experiment Name: At_Shoots__P Parameter: Tissue Value: Shoots vs. Whole Plant
  misc_feature: MA Experiment ID: 20001557 Result: Up-regulated in Transcription
  misc_feature: MA Experiment 20001557 PARAMETER Experiment Name: At_Drought_Soil_Dry_P Parameter: Age (day) Value: 27
  misc_feature: MA Experiment 20001557 PARAMETER Experiment Name: At_Drought_Soil_Dry_P Parameter: Organism Value: A. thaliana
  misc_feature: MA Experiment 20001557 PARAMETER Experiment Name: At_Drought_Soil_Dry_P Parameter: Plant Line Value: WS
  misc_feature: MA Experiment 20001557 PARAMETER Experiment Name: At_Drought_Soil_Dry_P Parameter: Post Timepoint (hr) Value: 3
  misc_feature: MA Experiment 20001557 PARAMETER Experiment Name: At_Drought_Soil_Dry_P Parameter: Post-Treatment Value: Re-Water vs. No Drought
  misc_feature: MA Experiment 20001557 PARAMETER Experiment Name: At_Drought_Soil_Dry_P Parameter: Timepoint (day) Value: 13
  misc_feature: MA Experiment 20001557 PARAMETER Experiment Name: At_Drought_Soil_Dry_P Parameter: Treatment Value: Drought vs. No Drought
  misc_feature: MA Experiment ID: 20001558 Result: Up-regulated in Transcription
  misc_feature: MA Experiment 20001558 PARAMETER Experiment Name: At_Drought_Soil_Dry_P Parameter: Age (day) Value: 27
  misc_feature: MA Experiment 20001558 PARAMETER Experiment Name: At_Drought_Soil_Dry_P Parameter: Organism Value: A. thaliana
  misc_feature: MA Experiment 20001558 PARAMETER Experiment Name: At_Drought_Soil_Dry_P Parameter: Plant Line Value: WS
  misc_feature: MA Experiment 20001558 PARAMETER Experiment Name: At_Drought_Soil_Dry_P Parameter: Post Timepoint (hr) Value: 6
  misc_feature: MA Experiment 20001558 PARAMETER Experiment Name: At_Drought_Soil_Dry_P Parameter: Post-Treatment Value: Re-Water vs. No Drought
  misc_feature: MA Experiment 20001558 PARAMETER Experiment Name: At_Drought_Soil_Dry_P Parameter: Timepoint (day) Value: 13
  misc_feature: MA Experiment 20001558 PARAMETER Experiment Name: At_Drought_Soil_Dry_P Parameter: Treatment Value: Drought vs. No Drought
aaaaaaactctttcggatattccaccagtctctcgcaatcttcgctcttctctttgctctctctctctcaacgcggttcagatccgagtttgggagattcaagctccctgaaaaaagccctttactctcgcttaccaactttgctccagcatggcaggatctgcaccagaaggcacacagtttgatgcacgtcagtttgaccagaaactcaatgaagtacttgagggacaagatgagttcttcacatcctatgatgatgttcatgagagctttgatgccatgggtcttcaagagaaccttctcaggggtatttatgcttatggttttgagaagccttctgctattcagcaaagaggaatcgtccccttctgtaagggtcttgatgtgattcaacaggctcagtctggtactgggaaaacagcaactttctgctctggtgtcttgcagcagctggacttctcccttatccagtgtcaggctttggttctagctccaactagagagcttgctcagcaaattgagaaggtcatgagggcccttggtgattaccttggtgtcaaggttcacgcctgtgttggtggaaccagtgtccgtgaggatcagcgcatcctccaagctggtgtccatgttgttgttggaactccagggcgtgtctttgacatgttgaagaggcagtctcttcgtgctgacaacatcaagatgtttgttctcgatgaagctgatgaaatgctctcccgtggtttcaaggaccagatctatgacatattccagcttcttccaccaaagatccaagttggtgtgttctccgcaacaatgccaccagaagctcttgagatcacaaggaagttcatgagcaagccagtgagaatcttggtgaagcgtgatgagcttacccttgaaggtatcaagcagttctacgtcaacgttgagaaagaagagtggaagctcgagacactctgtgatctctacgagactcttgccatcactcagagtgtcatcttcgtgaacaccaggcgtaaggttgattggctcacagacaaaatgagaagccgtgaccacacagtctctgcaactcacggagacatggaccagaacaccagggacatcatcatgagagagttcaggtctggttcctcccgtgttctcatcaccactgacctcttagctcgtggtattgatgtccaacaagtctccctggttatcaacttcgatctcccaactcagccagagaactaccttcaccgtatcggaagaagtggaaggttcgggagaaagggtgttgcgatcaatttcgtgacccgtgatgatgagaggatgctgtttgatattcagaaattctacaatgtggttgtcgaagagctgccttcgaacgtggccgatctgctgtgaagggagaaaagaagtcggttctgttgctgtgtttgctctgccgtactagtatcaccggagaagaaaggttttcttgttttgcaaggcactctttgatctgattttgacccgtcgtctatcagcgatttacatttcttaaattttcttagttgttgttctctcctctctctcccagctacgaacatatctctctcttcttgaccatttttaagtttaagtcatatggagtatttatttcttcactattttaatattcggctttgttgtttgtctttgatttttgtatcaatcaaatcttttcatcaaagtttggttttaagctttttcaaatc

SEQ ID NO: 21228 - protein, 412 aa, Arabidopsis thaliana
  peptide (1)..(412): Ceres Seq. ID no. 12329110
  misc_feature (52)..(255): Pfam Name: DEAD/DEAH box helicase Pfam Description: DEAD/DEAH box helicase
  misc_feature (1)..(412): Homolog of NCBI NO: 1170511 NR Description: Eukaryotic initiation factor 4A-10 (eIF-4A-10)
  misc_feature (1)..(412): Homolog of NCBI NO: 2119933 NR Description: translation initiation factor eIF-4A.11 - common
  misc_feature (1)..(412): Homolog of NCBI NO: 2500518 NR Description: Eukaryotic initiation factor 4A-11 (eIF-4A-11)
  misc_feature (1)..(412): Homolog of NCBI NO: 2500520 NR Description: Eukaryotic initiation factor 4A-14 (eIF-4A-14)
  misc_feature (1)..(412): Homolog of NCBI NO: 2119938 NR Description: translation initiation factor eIF-4A.14 - common
  misc_feature (1)..(412): Homolog of NCBI NO: 1170506 NR Description: Eukaryotic initiation factor 4A-2 (eIF-4A-2)
  misc_feature (1)..(412): Homolog of NCBI NO: 15221761 NR Description: eukaryotic translation initiation factor 4A-2
  misc_feature (1)..(412): Homolog of NCBI NO: 21555870 NR Description: Eukaryotic initiation factor 4A, putative
  misc_feature (1)..(412): Homolog of NCBI NO: 19698881 NR Description: eukaryotic translation initiation factor
  misc_feature (1)..(412): Homolog of NCBI NO: 18400210 NR Description: eukaryotic translation initiation factor 4A-1
MAGSAPEGTQFDARQFDQKLNEVLEGQDEFFTSYDDVHESFDAMGLQENLLRGIYAYGFEKPSAIQQRGIVPFCKGLDVIQQAQSGTGKTATFCSGVLQQLDFSLIQCQALVLAPTRELAQQIEKVMRALGDYLGVKVHACVGGTSVREDQRILQAGVHVVVGTPGRVFDMLKRQSLRADNIKMFVLDEADEMLSRGFKDQIYDIFQLLPPKIQVGVFSATMPPEALEITRKFMSKPVRILVKRDELTLEGIKQFYVNVEKEEWKLETLCDLYETLAITQSVIFVNTRRKVDWLTDKMRSRDHTVSATHGDMDQNTRDIIMREFRSGSSRVLITTDLLARGIDVQQVSLVINFDLPTQPENYLHRIGRSGRFGRKGVAINFVTRDDERMLFDIQKFYNVVVEELPSNVADLL

SEQ ID NO: 21229 - protein, 369 aa, Arabidopsis thaliana
  peptide (1)..(369): Ceres Seq. ID no. 12329111
  misc_feature (9)..(212): Pfam Name: DEAD/DEAH box helicase Pfam Description: DEAD/DEAH box helicase
  misc_feature (1)..(369): Homolog of NCBI NO: 1170511 NR Description: Eukaryotic initiation factor 4A-10 (eIF-4A-10)
  misc_feature (1)..(369): Homolog of NCBI NO: 2119933 NR Description: translation initiation factor eIF-4A.11 - common
  misc_feature (1)..(369): Homolog of NCBI NO: 2500518 NR Description: Eukaryotic initiation factor 4A-11 (eIF-4A-11)
  misc_feature (1)..(369): Homolog of NCBI NO: 2500520 NR Description: Eukaryotic initiation factor 4A-14 (eIF-4A-14)
  misc_feature (1)..(369): Homolog of NCBI NO: 2119938 NR Description: translation initiation factor eIF-4A.14 - common
  misc_feature (1)..(369): Homolog of NCBI NO: 1170506 NR Description: Eukaryotic initiation factor 4A-2 (eIF-4A-2)
  misc_feature (1)..(369): Homolog of NCBI NO: 15221761 NR Description: eukaryotic translation initiation factor 4A-2
  misc_feature (1)..(369): Homolog of NCBI NO: 21555870 NR Description: Eukaryotic initiation factor 4A, putative
  misc_feature (1)..(369): Homolog of NCBI NO: 19698881 NR Description: eukaryotic translation initiation factor
  misc_feature (1)..(369): Homolog of NCBI NO: 18400210 NR Description: eukaryotic translation initiation factor 4A-1
MGLQENLLRGIYAYGFEKPSAIQQRGIVPFCKGLDVIQQAQSGTGKTATFCSGVLQQLDFSLIQCQALVLAPTRELAQQIEKVMRALGDYLGVKVHACVGGTSVREDQRILQAGVHVVVGTPGRVFDMLKRQSLRADNIKMFVLDEADEMLSRGFKDQIYDIFQLLPPKIQVGVFSATMPPEALEITRKFMSKPVRILVKRDELTLEGIKQFYVNVEKEEWKLETLCDLYETLAITQSVIFVNTRRKVDWLTDKMRSRDHTVSATHGDMDQNTRDIIMREFRSGSSRVLITTDLLARGIDVQQVSLVINFDLPTQPENYLHRIGRSGRFGRKGVAINFVTRDDERMLFDIQKFYNVVVEELPSNVADLL

SEQ ID NO: 21230 - protein, 286 aa, Arabidopsis thaliana
  peptide (1)..(286): Ceres Seq. ID no. 12329112
  misc_feature (1)..(129): Pfam Name: DEAD/DEAH box helicase Pfam Description: DEAD/DEAH box helicase
  misc_feature (1)..(286): Homolog of NCBI NO: 1170511 NR Description: Eukaryotic initiation factor 4A-10 (eIF-4A-10)
  misc_feature (1)..(286): Homolog of NCBI NO: 2119933 NR Description: translation initiation factor eIF-4A.11 - common
  misc_feature (1)..(286): Homolog of NCBI NO: 2500518 NR Description: Eukaryotic initiation factor 4A-11 (eIF-4A-11)
  misc_feature (1)..(286): Homolog of NCBI NO: 2500520 NR Description: Eukaryotic initiation factor 4A-14 (eIF-4A-14)
  misc_feature (1)..(286): Homolog of NCBI NO: 2119938 NR Description: translation initiation factor eIF-4A.14 - common
  misc_feature (1)..(286): Homolog of NCBI NO: 1170506 NR Description: Eukaryotic initiation factor 4A-2 (eIF-4A-2)
  misc_feature (1)..(286): Homolog of NCBI NO: 15221761 NR Description: eukaryotic translation initiation factor 4A-2
  misc_feature (1)..(286): Homolog of NCBI NO: 21555870 NR Description: Eukaryotic initiation factor 4A, putative
  misc_feature (1)..(286): Homolog of NCBI NO: 19698881 NR Description: eukaryotic translation initiation factor
  misc_feature (1)..(286): Homolog of NCBI NO: 18400210 NR Description: eukaryotic translation initiation factor 4A-1
MRALGDYLGVKVHACVGGTSVREDQRILQAGVHVVVGTPGRVFDMLKRQSLRADNIKMFVLDEADEMLSRGFKDQIYDIFQLLPPKIQVGVFSATMPPEALEITRKFMSKPVRILVKRDELTLEGIKQFYVNVEKEEWKLETLCDLYETLAITQSVIFVNTRRKVDWLTDKMRSRDHTVSATHGDMDQNTRDIIMREFRSGSSRVLITTDLLARGIDVQQVSLVINFDLPTQPENYLHRIGRSGRFGRKGVAINFVTRDDERMLFDIQKFYNVVVEELPSNVADLL

SEQ ID NO: 21231 - DNA, 1175 bp, Arabidopsis thaliana
  misc_feature (1)..(1175): Ceres Seq. ID no. 13487882
  misc_feature: MA Experiment ID: 108434 Result: Up-regulated in Transcription
  misc_feature: MA Experiment 108434 PARAMETER Experiment Name: At_Root_Tips_cDNA_P Parameter: Tissue Value: Root Tips
  misc_feature: MA Experiment ID: 108461 Result: Down-regulated in Transcription
  misc_feature: MA Experiment 108461 PARAMETER Experiment Name: At_Germinating_Seeds_cDNA_P Parameter: Age (day) Value: 1 vs. 0
  misc_feature: MA Experiment 108461 PARAMETER Experiment Name: At_Germinating_Seeds_cDNA_P Parameter: Tissue Value: Germinating Seeds
  misc_feature: MA Experiment ID: 108462 Result: Down-regulated in Transcription
  misc_feature: MA Experiment 108462 PARAMETER Experiment Name: At_Germinating_Seeds_cDNA_P Parameter: Age (day) Value: 2 vs. 0
  misc_feature: MA Experiment 108462 PARAMETER Experiment Name: At_Germinating_Seeds_cDNA_P Parameter: Tissue Value: Germinating Seeds
  misc_feature: MA Experiment ID: 108463 Result: Down-regulated in Transcription
  misc_feature: MA Experiment 108463 PARAMETER Experiment Name: At_Germinating_Seeds_cDNA_P Parameter: Age (day) Value: 3 vs. 0
  misc_feature: MA Experiment 108463 PARAMETER Experiment Name: At_Germinating_Seeds_cDNA_P Parameter: Tissue Value: Germinating Seeds
  misc_feature: MA Experiment ID: 108464 Result: Down-regulated in Transcription
  misc_feature: MA Experiment 108464 PARAMETER Experiment Name: At_Germinating_Seeds_cDNA_P Parameter: Age (day) Value: 4 vs. 0
  misc_feature: MA Experiment 108464 PARAMETER Experiment Name: At_Germinating_Seeds_cDNA_P Parameter: Tissue Value: Germinating Seeds
  misc_feature: MA Experiment ID: 108607 Result: Down-regulated in Transcription
  misc_feature: MA Experiment 108607 PARAMETER Experiment Name: At_100uM_ABA_cDNA_P Parameter: Timepoint (hr) Value: 4
  misc_feature: MA Experiment 108607 PARAMETER Experiment Name: At_100uM_ABA_cDNA_P Parameter: Tissue Value: Aerial
  misc_feature: MA Experiment 108607 PARAMETER Experiment Name: At_100uM_ABA_cDNA_P Parameter: Treatment Value: 100uM ABA vs. No Treatment
  misc_feature: MA Experiment ID: 20000111 Result: Up-regulated in Transcription
  misc_feature: MA Experiment 20000111 PARAMETER Experiment Name: At_42deg_Heat_cDNA_P Parameter: Temperature (deg C) Value: 42 vs. 22
  misc_feature: MA Experiment 20000111 PARAMETER Experiment Name: At_42deg_Heat_cDNA_P Parameter: Timepoint (hr) Value: 6
  misc_feature: MA Experiment 20000111 PARAMETER Experiment Name: At_42deg_Heat_cDNA_P Parameter: Tissue Value: Aerial
  misc_feature: MA Experiment ID: 20000173 Result: Up-regulated in Transcription
  misc_feature: MA Experiment 20000173 PARAMETER Experiment Name: At_42deg_Heat_P Parameter: Age (day) Value: 14
  misc_feature: MA Experiment 20000173 PARAMETER Experiment Name: At_42deg_Heat_P Parameter: Organism Value: A. thaliana
  misc_feature: MA Experiment 20000173 PARAMETER Experiment Name: At_42deg_Heat_P Parameter: Plant Line Value: WS
  misc_feature: MA Experiment 20000173 PARAMETER Experiment Name: At_42deg_Heat_P Parameter: Temperature (deg C) Value: 42 vs. 22
  misc_feature: MA Experiment 20000173 PARAMETER Experiment Name: At_42deg_Heat_P Parameter: Timepoint (hr) Value: 6
  misc_feature: MA Experiment 20000173 PARAMETER Experiment Name: At_42deg_Heat_P Parameter: Tissue Value: Aerial
  misc_feature: MA Experiment ID: 20000180 Result: Down-regulated in Transcription
  misc_feature: MA Experiment 20000180 PARAMETER Experiment Name: At_Germinating_Seeds_P Parameter: Age (hr) Value: 24 vs. 0
  misc_feature: MA Experiment 20000180 PARAMETER Experiment Name: At_Germinating_Seeds_P Parameter: Tissue Value: Germinating Seeds
  misc_feature: MA Experiment ID: 20000456 Result: Up-regulated in Transcription
  misc_feature: MA Experiment 20000456 PARAMETER Experiment Name: At_100uM_BA_P Parameter: Age (day) Value: 14
  misc_feature: MA Experiment 20000456 PARAMETER Experiment Name: At_100uM_BA_P Parameter: Organism Value: A. thaliana
  misc_feature: MA Experiment 20000456 PARAMETER Experiment Name: At_100uM_BA_P Parameter: Plant Line Value: WS
  misc_feature: MA Experiment 20000456 PARAMETER Experiment Name: At_100uM_BA_P Parameter: Timepoint (hr) Value: 6
  misc_feature: MA Experiment 20000456 PARAMETER Experiment Name: At_100uM_BA_P Parameter: Tissue Value: Aerial
  misc_feature: MA Experiment 20000456 PARAMETER Experiment Name: At_100uM_BA_P Parameter: Treatment Value: 100uM BA vs. No Treatment
  misc_feature: MA Experiment ID: 20000794 Result: Down-regulated in Transcription
  misc_feature: MA Experiment 20000794 PARAMETER Experiment Name: At_Petals_P Parameter: Age (day) Value: 23-25 days
  misc_feature: MA Experiment 20000794 PARAMETER Experiment Name: At_Petals_P Parameter: Plant Line Value: WS
  misc_feature: MA Experiment 20000794 PARAMETER Experiment Name: At_Petals_P Parameter: Tissue Value: Petals vs. Whole plant
  misc_feature: MA Experiment ID: 20001248 Result: Up-regulated in Transcription
  misc_feature: MA Experiment 20001248 PARAMETER Experiment Name: At_Far-red-induction_P Parameter: Age (day) Value: 7
  misc_feature: MA Experiment 20001248 PARAMETER Experiment Name: At_Far-red-induction_P Parameter: Light Value: Far-red vs. White
  misc_feature: MA Experiment 20001248 PARAMETER Experiment Name: At_Far-red-induction_P Parameter: Organism Value: A. thaliana
  misc_feature: MA Experiment 20001248 PARAMETER Experiment Name: At_Far-red-induction_P Parameter: Plant Line Value: Columbia
  misc_feature: MA Experiment 20001248 PARAMETER Experiment Name: At_Far-red-induction_P Parameter: Timepoint (hr) Value: 4
  misc_feature: MA Experiment 20001248 PARAMETER Experiment Name: At_Far-red-induction_P Parameter: Tissue Value: Whole Plant
  misc_feature: MA Experiment ID: 20001558 Result: Up-regulated in Transcription
  misc_feature: MA Experiment 20001558 PARAMETER Experiment Name: At_Drought_Soil_Dry_P Parameter: Age (day) Value: 27
  misc_feature: MA Experiment 20001558 PARAMETER Experiment Name: At_Drought_Soil_Dry_P Parameter: Organism Value: A. thaliana
  misc_feature: MA Experiment 20001558 PARAMETER Experiment Name: At_Drought_Soil_Dry_P Parameter: Plant Line Value: WS
  misc_feature: MA Experiment 20001558 PARAMETER Experiment Name: At_Drought_Soil_Dry_P Parameter: Post Timepoint (hr) Value: 6
  misc_feature: MA Experiment 20001558 PARAMETER Experiment Name: At_Drought_Soil_Dry_P Parameter: Post-Treatment Value: Re-Water vs. No Drought
  misc_feature: MA Experiment 20001558 PARAMETER Experiment Name: At_Drought_Soil_Dry_P Parameter: Timepoint (day) Value: 13
  misc_feature: MA Experiment 20001558 PARAMETER Experiment Name: At_Drought_Soil_Dry_P Parameter: Treatment Value: Drought vs. No Drought
  misc_feature: MA Experiment ID: 20001757 Result: Up-regulated in Transcription
  misc_feature: MA Experiment 20001757 PARAMETER Experiment Name: At_50mM_NH4NO3_L-to-H_P Parameter: Timepoint (hr) Value: 6
  misc_feature: MA Experiment 20001757 PARAMETER Experiment Name: At_50mM_NH4NO3_L-to-H_P Parameter: Tissue Value: Leaf
  misc_feature: MA Experiment 20001757 PARAMETER Experiment Name: At_50mM_NH4NO3_L-to-H_P Parameter: Treatment Value: 50mM NH4NO3 vs 100mM Mannitol
agccaccaccgcacatctctctcctttgccctcgttttttttcggttctcgtctttcgttcttcacttttagacaagcaaatatgagacccccagttacaggaggacgtggtggtggaggattcagaggtggaagagatggtggtggaagaggttttggaggtggaagaagctttggaggaggccgtagtggtgacagaggccgtagtgggcctcgcggcagaggacgtggtgcgcctcgtggtcgtcgaggaccacctcgtggaggaatgaaaggaggaagcaaagtgattgttgagcctcacagacatgcgggagtgtttattgctaaaggtaaagaagatgctcttgtcactaagaatttggttcctggtgaagctgtttacaatgagaagagaatctctgttcagaatgaagatggaactaaggttgaatacagagtttggaatccgtttagatctaagttagctgctgcaattcttggtggtgtcgacaacatttggatcaaacctggtgccaaagttctttacttgggtgctgcttctgggaccactgtctctcatgtttctgacctcgttggccctgagggatgtgtttatgctgttgagttttctcatagaagtggtagagatttggtgaacatggccaagaagagaactaacgttattccaatcattgaagatgctagacatccggctaagtacagaatgctcgtgggcatggttgatgtcatattctctgatgttgctcagccagatcaggcaagaatcttggccctgaatgcctcatttttcctcaaaactggtggacactttgttatctcaatcaaggccaactgtatcgactctacagttgcagcagaagcagtcttccagagcgaggtgaagaagttgcaacaagagcagtttaaaccagcagaacaggtgactctcgagccgtttgagcgtgaccatgcctgtgttgttggtggttaccgcatgcccaagaaacaaaaagccccagcctcatagaggaactgtggacagtagtacctgtgtattaagacttatttactgggttttgtttttatctcttcgcttgttgtattaagctagagatggataatgcttttatgtctcatttggaaattttattctcgtttaagaactaatatatattgatgcaacattttcgtcc

SEQ ID NO: 21232 - protein, 335 aa, Arabidopsis thaliana
  peptide (1)..(335): Ceres Seq. ID no. 15219230
  misc_feature (94)..(326): Pfam Name: Fibrillarin Pfam Description: Fibrillarin
  misc_feature (34)..(331): Homolog of NCBI NO: 31982373 NR Description: fibrillarin [Mus musculus]
  misc_feature (34)..(331): Homolog of NCBI NO: 34855407 NR Description: similar to fibrillarin [Rattus norvegicus]
  misc_feature (34)..(331): Homolog of NCBI NO: 27924365 NR Description: Unknown (protein for IMAGE:5543421) [Xenopus
  misc_feature (34)..(331): Homolog of NCBI NO: 30353806 NR Description: Unknown (protein for MGC:56145) [Danio rerio]
  misc_feature (34)..(332): Homolog of NCBI NO: 31200907 NR Description: ENSANGP00000015622 [Anopheles gambiae]
  misc_feature (34)..(331): Homolog of NCBI NO: 38566188 NR Description: Fibrillarin [Silurana tropicalis]
  misc_feature (28)..(332): Homolog of NCBI NO: 15028155 NR Description: putative fibrillarin 2 protein AtFib2
  misc_feature (28)..(332): Homolog of NCBI NO: 18416588 NR Description: fibrillarin 2 (AtFib2) [Arabidopsis thaliana]
  misc_feature (28)..(335): Homolog of NCBI NO: 6003681 NR Description: fibrillarin homolog [Arabidopsis thaliana]
  misc_feature (28)..(335): Homolog of NCBI NO: 30696189 NR Description: fibrillarin 1 (Fib1) (SKIP7) [Arabidopsis
ATTAHLSPLPSFFFGSRLSFFTFRQANMRPPVTGGRGGGGFRGGRDGGGRGFGGGRSFGGGRSGDRGRSGPRGRGRGAPRGRRGPPRGGMKGGSKVIVEPHRHAGVFIAKGKEDALVTKNLVPGEAVYNEKRISVQNEDGTKVEYRVWNPFRSKLAAAILGGVDNIWIKPGAKVLYLGAASGTTVSHVSDLVGPEGCVYAVEFSHRSGRDLVNMAKKRTNVIPIIEDARHPAKYRMLVGMVDVIFSDVAQPDQARILALNASFFLKTGGHFVISIKANCIDSTVAAEAVFQSEVKKLQQEQFKPAEQVTLEPFERDHACVVGGYRMPKKQKAPAS

SEQ ID NO: 21233 - protein, 308 aa, Arabidopsis thaliana
  peptide (1)..(308): Ceres Seq. ID no. 15219231
  misc_feature (67)..(299): Pfam Name: Fibrillarin Pfam Description: Fibrillarin
  misc_feature (7)..(304): Homolog of NCBI NO: 31982373 NR Description: fibrillarin [Mus musculus]
  misc_feature (7)..(304): Homolog of NCBI NO: 34855407 NR Description: similar to fibrillarin [Rattus norvegicus]
  misc_feature (7)..(304): Homolog of NCBI NO: 27924365 NR Description: Unknown (protein for IMAGE:5543421) [Xenopus
  misc_feature (7)..(304): Homolog of NCBI NO: 30353806 NR Description: Unknown (protein for MGC:56145) [Danio rerio]
  misc_feature (7)..(305): Homolog of NCBI NO: 31200907 NR Description: ENSANGP00000015622 [Anopheles gambiae]
  misc_feature (7)..(304): Homolog of NCBI NO: 38566188 NR Description: Fibrillarin [Silurana tropicalis]
  misc_feature (1)..(305): Homolog of NCBI NO: 15028155 NR Description: putative fibrillarin 2 protein AtFib2
  misc_feature (1)..(305): Homolog of NCBI NO: 18416588 NR Description: fibrillarin 2 (AtFib2) [Arabidopsis thaliana]
  misc_feature (1)..(308): Homolog of NCBI NO: 6003681 NR Description: fibrillarin homolog [Arabidopsis thaliana]
  misc_feature (1)..(308): Homolog of NCBI NO: 30696189 NR Description: fibrillarin 1 (Fib1) (SKIP7) [Arabidopsis
MRPPVTGGRGGGGFRGGRDGGGRGFGGGRSFGGGRSGDRGRSGPRGRGRGAPRGRRGPPRGGMKGGSKVIVEPHRHAGVFIAKGKEDALVTKNLVPGEAVYNEKRISVQNEDGTKVEYRVWNPFRSKLAAAILGGVDNIWIKPGAKVLYLGAASGTTVSHVSDLVGPEGCVYAVEFSHRSGRDLVNMAKKRTNVIPIIEDARHPAKYRMLVGMVDVIFSDVAQPDQARILALNASFFLKTGGHFVISIKANCIDSTVAAEAVFQSEVKKLQQEQFKPAEQVTLEPFERDHACVVGGYRMPKKQKAPAS

SEQ ID NO: 21234 - protein, 246 aa, Arabidopsis thaliana
  peptide (1)..(246): Ceres Seq. ID no. 15219232
  misc_feature (5)..(237): Pfam Name: Fibrillarin Pfam Description: Fibrillarin
  misc_feature (1)..(242): Homolog of NCBI NO: 31982373 NR Description: fibrillarin [Mus musculus]
  misc_feature (1)..(242): Homolog of NCBI NO: 34855407 NR Description: similar to fibrillarin [Rattus norvegicus]
  misc_feature (1)..(242): Homolog of NCBI NO: 27924365 NR Description: Unknown (protein for IMAGE:5543421) [Xenopus
  misc_feature (1)..(242): Homolog of NCBI NO: 30353806 NR Description: Unknown (protein for MGC:56145) [Danio rerio]
  misc_feature (1)..(243): Homolog of NCBI NO: 31200907 NR Description: ENSANGP00000015622 [Anopheles gambiae]
  misc_feature (1)..(242): Homolog of NCBI NO: 38566188 NR Description: Fibrillarin [Silurana tropicalis]
  misc_feature (1)..(243): Homolog of NCBI NO: 15028155 NR Description: putative fibrillarin 2 protein AtFib2
  misc_feature (1)..(243): Homolog of NCBI NO: 18416588 NR Description: fibrillarin 2 (AtFib2) [Arabidopsis thaliana]
  misc_feature (1)..(246): Homolog of NCBI NO: 6003681 NR Description: fibrillarin homolog [Arabidopsis thaliana]
  misc_feature (1)..(246): Homolog of NCBI NO: 30696189 NR Description: fibrillarin 1 (Fib1) (SKIP7) [Arabidopsis
MKGGSKVIVEPHRHAGVFIAKGKEDALVTKNLVPGEAVYNEKRISVQNEDGTKVEYRVWNPFRSKLAAAILGGVDNIWIKPGAKVLYLGAASGTTVSHVSDLVGPEGCVYAVEFSHRSGRDLVNMAKKRTNVIPIIEDARHPAKYRMLVGMVDVIFSDVAQPDQARILALNASFFLKTGGHFVISIKANCIDSTVAAEAVFQSEVKKLQQEQFKPAEQVTLEPFERDHACVVGGYRMPKKQKAPAS

SEQ ID NO: 21235 - DNA, 1207 bp, Arabidopsis thaliana
  misc_feature (1)..(1207): Ceres Seq. ID no. 12324520
  misc_feature: MA Experiment ID: 20000184 Result: Down-regulated in Transcription
  misc_feature: MA Experiment 20000184 PARAMETER Experiment Name: At_Shoots__P Parameter: Age (day) Value: 7
  misc_feature: MA Experiment 20000184 PARAMETER Experiment Name: At_Shoots__P Parameter: Tissue Value: Shoots vs. Whole Plant
  misc_feature: MA Experiment ID: 20000234 Result: Up-regulated in Transcription
  misc_feature: MA Experiment 20000234 PARAMETER Experiment Name: At_Siliques_P Parameter: Age (day) Value: 21
  misc_feature: MA Experiment 20000234 PARAMETER Experiment Name: At_Siliques_P Parameter: Organism Value: A. thaliana
  misc_feature: MA Experiment 20000234 PARAMETER Experiment Name: At_Siliques_P Parameter: Plant Line Value: WS
  misc_feature: MA Experiment 20000234 PARAMETER Experiment Name: At_Siliques_P Parameter: Tissue Value: Less Than 5mm Siliques vs. Whole Plant
  misc_feature: MA Experiment ID: 20000264 Result: Up-regulated in Transcription
  misc_feature: MA Experiment 20000264 PARAMETER Experiment Name: At_Open_Flower_P Parameter: Age (day) Value: 21
  misc_feature: MA Experiment 20000264 PARAMETER Experiment Name: At_Open_Flower_P Parameter: Plant Line Value: WS
  misc_feature: MA Experiment 20000264 PARAMETER Experiment Name: At_Open_Flower_P Parameter: Tissue Value: Open Flower vs. Whole Plant
  misc_feature: MA Experiment ID: 20000265 Result: Up-regulated in Transcription
  misc_feature: MA Experiment 20000265 PARAMETER Experiment Name: At_Open_Flower_P Parameter: Age (day) Value: 21
  misc_feature: MA Experiment 20000265 PARAMETER Experiment Name: At_Open_Flower_P Parameter: Plant Line Value: WS
  misc_feature: MA Experiment 20000265 PARAMETER Experiment Name: At_Open_Flower_P Parameter: Tissue Value: Closed Flower vs. Whole Plant
  misc_feature: MA Experiment ID: 20000286 Result: Up-regulated in Transcription
  misc_feature: MA Experiment 20000286 PARAMETER Experiment Name: At_Open_Flower_P Parameter: Age (day) Value: 21
  misc_feature: MA Experiment 20000286 PARAMETER Experiment Name: At_Open_Flower_P Parameter: Plant Line Value: WS
  misc_feature: MA Experiment 20000286 PARAMETER Experiment Name: At_Open_Flower_P Parameter: Tissue Value: Half Open vs. Whole Plant
  misc_feature: MA Experiment ID: 20000439 Result: Down-regulated in Transcription
  misc_feature: MA Experiment 20000439 PARAMETER Experiment Name: At_Roots__P Parameter: Age (day) Value: 14 vs. 21
  misc_feature: MA Experiment 20000439 PARAMETER Experiment Name: At_Roots__P Parameter: Organism Value: A. thaliana
  misc_feature: MA Experiment 20000439 PARAMETER Experiment Name: At_Roots__P Parameter: Tissue Value: Roots vs. Whole Plant
  misc_feature: MA Experiment ID: 20000495 Result: Up-regulated in Transcription
  misc_feature: MA Experiment 20000495 PARAMETER Experiment Name: At_Guard_Cells_P Parameter: Harvest Date Value: 8/2/2002
  misc_feature: MA Experiment 20000495 PARAMETER Experiment Name: At_Guard_Cells_P Parameter: Organism Value: A. thaliana
  misc_feature: MA Experiment 20000495 PARAMETER Experiment Name: At_Guard_Cells_P Parameter: Tissue Value: Guard Cells vs. Leaves
  misc_feature: MA Experiment ID: 20000794 Result: Up-regulated in Transcription
  misc_feature: MA Experiment 20000794 PARAMETER Experiment Name: At_Petals_P Parameter: Age (day) Value: 23-25 days
  misc_feature: MA Experiment 20000794 PARAMETER Experiment Name: At_Petals_P Parameter: Plant Line Value: WS
  misc_feature: MA Experiment 20000794 PARAMETER Experiment Name: At_Petals_P Parameter: Tissue Value: Petals vs. Whole plant
  misc_feature: MA Experiment ID: 20001757 Result: Down-regulated in Transcription
  misc_feature: MA Experiment 20001757 PARAMETER Experiment Name: At_50mM_NH4NO3_L-to-H_P Parameter: Timepoint (hr) Value: 6
  misc_feature: MA Experiment 20001757 PARAMETER Experiment Name: At_50mM_NH4NO3_L-to-H_P Parameter: Tissue Value: Leaf
  misc_feature: MA Experiment 20001757 PARAMETER Experiment Name: At_50mM_NH4NO3_L-to-H_P Parameter: Treatment Value: 50mM NH4NO3 vs 100mM Mannitol
  misc_feature: MA Experiment ID: 20001905 Result: Up-regulated in Transcription
  misc_feature: MA Experiment 20001905 PARAMETER Experiment Name: At_Drought_Reproduction_P Parameter: Age (day) Value: 40
  misc_feature: MA Experiment 20001905 PARAMETER Experiment Name: At_Drought_Reproduction_P Parameter: Organism Value: A. thaliana
  misc_feature: MA Experiment 20001905 PARAMETER Experiment Name: At_Drought_Reproduction_P Parameter: Plant Line Value: WS
  misc_feature: MA Experiment 20001905 PARAMETER Experiment Name: At_Drought_Reproduction_P Parameter: Timepoint (day) Value: 10
  misc_feature: MA Experiment 20001905 PARAMETER Experiment Name: At_Drought_Reproduction_P Parameter: Tissue Value: Rosettes
  misc_feature: MA Experiment 20001905 PARAMETER Experiment Name: At_Drought_Reproduction_P Parameter: Treatment Value: Drought vs. No Drought
aaattgcccaaaaagaaacagaaacttttctccgagaatcctcatttctccgttgaaaaaaggaccttgagaggaaatgtttcacttttctagggttcttataatccacttccgcatcattggagaatggaaaatctcctcttctctttgatatttcttcggatttcgcttatgtcctgaatctcttgaagacccaattgaaaaaatctcactttttttctcccggcgtttccggcgatatacaatgcggattctcgtgaatctcattctcttctccttgattcctctggcgttctccaatgaaaactccagctcgtatctcattgcgcgaccattgatcttcgaaacccagctcaagaacataaacgacaatgtcaatctacattgcacgagctggagattcgcggcggagacaaacaatctcgctccatggaaaaccattccagctgaatgcgccgattacgtgaaagattacctgatgggtgaaggttacgtcgtcgatgtggagagagtctccgaagaagctaaggtttacgcgagcagcttcgaatctaacggtgacgggaaagacatttggattttcgatattgatgagacgttattgtcgaatcttccttattacatggaacacggttgtgggttggaagtttttgatcattcaaagtttgatatgtgggtagagaaagggatagcacctgctatagcaccaagcttgaagctttaccaaaaggttatacatttggggtacaaagttatcttgcttacagggcgtagagagaaccaccgggttatcactgtcgaaaacctgcgcaatgccggtttccataactgggacaagcttattctgagatcgttggatgatcggaacaaaacagcgaccatgtacaagtcagagaagagagaggagatggtgaaagaagggtataggatcagaggcaattcaggtgaccaatggagtgatttgttgggttctgcaatgtcagaaagatccttcaaacttccaaatccaatgtattatatcccctgaaggggatcaactagaatcaggaggcaattcaggttactaattggagcaacctactgttttggaagtttgggttgcaataaatatatgtactaatgactgcatcggcttgagtgtctaaatttgtaacttattgaaaactttttgtggttgaagacaaatccagttaaccgacatgagttt

SEQ ID NO: 21236 - protein, 260 aa, Arabidopsis thaliana
  peptide (1)..(260): Ceres Seq. ID no. 12324521
  misc_feature (32)..(260): Pfam Name: HAD superfamily, subfamily IIIB (Acid phosphatase) Pfam Description: HAD superfamily, subfamily IIIB (Acid
  misc_feature (53)..(226): Homolog of NCBI NO: 7705154 NR Description: acid phosphatase-1(1); Apase-1(1) [Lycopersicon
  misc_feature (37)..(259): Homolog of NCBI NO: 15233526 NR Description: acid phosphatase-like protein
  misc_feature (47)..(260): Homolog of NCBI NO: 15233504 NR Description: acid phosphatase-like protein
  misc_feature (1)..(259): Homolog of NCBI NO: 130718 NR Description: Acid phosphatase precursor 1
  misc_feature (1)..(259): Homolog of NCBI NO: 445113 NR Description: acid phosphatase 1
  misc_feature (1)..(260): Homolog of NCBI NO: 15241412 NR Description: acid phosphatase; protein id: At5g51260.1
  misc_feature (1)..(260): Homolog of NCBI NO: 15234949 NR Description: acid phosphatase - like protein
MRILVNLILFSLIPLAFSNENSSSYLIARPLIFETQLKNINDNVNLHCTSWRFAAETNNLAPWKTIPAECADYVKDYLMGEGYVVDVERVSEEAKVYASSFESNGDGKDIWIFDIDETLLSNLPYYMEHGCGLEVFDHSKFDMWVEKGIAPAIAPSLKLYQKVIHLGYKVILLTGRRENHRVITVENLRNAGFHNWDKLILRSLDDRNKTATMYKSEKREEMVKEGYRIRGNSGDQWSDLLGSAMSERSFKLPNPMYYIP

SEQ ID NO: 21237 - protein, 182 aa, Arabidopsis thaliana
  peptide (1)..(182): Ceres Seq. ID no. 12324522
  misc_feature (1)..(182): Pfam Name: HAD superfamily, subfamily IIIB (Acid phosphatase) Pfam Description: HAD superfamily, subfamily IIIB (Acid
  misc_feature (1)..(148): Homolog of NCBI NO: 7705154 NR Description: acid phosphatase-1(1); Apase-1(1) [Lycopersicon
  misc_feature (1)..(181): Homolog of NCBI NO: 15233526 NR Description: acid phosphatase-like protein
  misc_feature (1)..(182): Homolog of NCBI NO: 15233504 NR Description: acid phosphatase-like protein
  misc_feature (1)..(181): Homolog of NCBI NO: 130718 NR Description: Acid phosphatase precursor 1
  misc_feature (1)..(181): Homolog of NCBI NO: 445113 NR Description: acid phosphatase 1
  misc_feature (1)..(182): Homolog of NCBI NO: 15241412 NR Description: acid phosphatase; protein id: At5g51260.1
  misc_feature (1)..(182): Homolog of NCBI NO: 15234949 NR Description: acid phosphatase - like protein
MGEGYVVDVERVSEEAKVYASSFESNGDGKDIWIFDIDETLLSNLPYYMEHGCGLEVFDHSKFDMWVEKGIAPAIAPSLKLYQKVIHLGYKVILLTGRRENHRVITVENLRNAGFHNWDKLILRSLDDRNKTATMYKSEKREEMVKEGYRIRGNSGDQWSDLLGSAMSERSFKLPNPMYYIP

SEQ ID NO: 21238 - protein, 134 aa, Arabidopsis thaliana
  peptide (1)..(134): Ceres Seq. ID no. 12324523
  misc_feature (1)..(134): Pfam Name: HAD superfamily, subfamily IIIB (Acid phosphatase) Pfam Description: HAD superfamily, subfamily IIIB (Acid
  misc_feature (1)..(100): Homolog of NCBI NO: 7705154 NR Description: acid phosphatase-1(1); Apase-1(1) [Lycopersicon
  misc_feature (1)..(133): Homolog of NCBI NO: 15233526 NR Description: acid phosphatase-like protein
  misc_feature (1)..(134): Homolog of NCBI NO: 15233504 NR Description: acid phosphatase-like protein
  misc_feature (1)..(133): Homolog of NCBI NO: 130718 NR Description: Acid phosphatase precursor 1
  misc_feature (1)..(133): Homolog of NCBI NO: 445113 NR Description: acid phosphatase 1
  misc_feature (1)..(134): Homolog of NCBI NO: 15241412 NR Description: acid phosphatase; protein id: At5g51260.1
  misc_feature (1)..(134): Homolog of NCBI NO: 15234949 NR Description: acid phosphatase - like protein
MEHGCGLEVFDHSKFDMWVEKGIAPAIAPSLKLYQKVIHLGYKVILLTGRRENHRVITVENLRNAGFHNWDKLILRSLDDRNKTATMYKSEKREEMVKEGYRIRGNSGDQWSDLLGSAMSERSFKLPNPMYYIP

SEQ ID NO: 21239 - DNA, 1282 bp, Arabidopsis thaliana
  misc_feature (1)..(1282): Ceres Seq. ID no. 12674392
  misc_feature: MA Experiment ID: 108473 Result: Down-regulated in Transcription
  misc_feature: MA Experiment 108473 PARAMETER Experiment Name: At_Drought_Flowers_cDNA_P Parameter: Timepoint (hr) Value: 7 d
  misc_feature: MA Experiment 108473 PARAMETER Experiment Name: At_Drought_Flowers_cDNA_P Parameter: Tissue Value: Flower
  misc_feature: MA Experiment 108473 PARAMETER Experiment Name: At_Drought_Flowers_cDNA_P Parameter: Treatment Value: Drought vs. No Drought
  misc_feature: MA Experiment ID: 108501 Result: Down-regulated in Transcription
  misc_feature: MA Experiment 108501 PARAMETER Experiment Name: At_ap2_floral_buds_cDNA_P Parameter: Plant Line Value: ap2 (Ler.)
  misc_feature: MA Experiment 108501 PARAMETER Experiment Name: At_ap2_floral_buds_cDNA_P Parameter: Tissue Value: Closed Flower
  misc_feature: MA Experiment ID: 108569 Result: Up-regulated in Transcription
  misc_feature: MA Experiment 108569 PARAMETER Experiment Name: At_0.001%_MeJA__cDNA_P Parameter: Timepoint (hr) Value: 6
  misc_feature: MA Experiment 108569 PARAMETER Experiment Name: At_0.001%_MeJA__cDNA_P Parameter: Tissue Value: Aerial
  misc_feature: MA Experiment 108569 PARAMETER Experiment Name: At_0.001%_MeJA__cDNA_P Parameter: Treatment Value: 0.001% MeJA vs. No Treatment
  misc_feature: MA Experiment ID: 108573 Result: Up-regulated in Transcription
  misc_feature: MA Experiment 108573 PARAMETER Experiment Name: At_Drought_cDNA_P Parameter: Timepoint (hr) Value: 6
  misc_feature: MA Experiment 108573 PARAMETER Experiment Name: At_Drought_cDNA_P Parameter: Tissue Value: Aerial
  misc_feature: MA Experiment 108573 PARAMETER Experiment Name: At_Drought_cDNA_P Parameter: Treatment Value: Drought vs. No Drought
  misc_feature: MA Experiment ID: 108576 Result: Up-regulated in Transcription
  misc_feature: MA Experiment 108576 PARAMETER Experiment Name: At_42deg_Heat_cDNA_P Parameter: Temperature (deg C) Value: 42 vs. 22
  misc_feature: MA Experiment 108576 PARAMETER Experiment Name: At_42deg_Heat_cDNA_P Parameter: Timepoint (hr) Value: 1
  misc_feature: MA Experiment 108576 PARAMETER Experiment Name: At_42deg_Heat_cDNA_P Parameter: Tissue Value: Aerial
  misc_feature: MA Experiment ID: 20000093 Result: Up-regulated in Transcription
  misc_feature: MA Experiment 20000093 PARAMETER Experiment Name: At_42deg_Heat_cDNA_P Parameter: Temperature (deg C) Value: 42 vs. 22
  misc_feature: MA Experiment 20000093 PARAMETER Experiment Name: At_42deg_Heat_cDNA_P Parameter: Timepoint (hr) Value: 0.5
  misc_feature: MA Experiment 20000093 PARAMETER Experiment Name: At_42deg_Heat_cDNA_P Parameter: Tissue Value: Aerial
  misc_feature: MA Experiment ID: 20000112 Result: Up-regulated in Transcription
  misc_feature: MA Experiment 20000112 PARAMETER Experiment Name: At_42deg_Heat_cDNA_P Parameter: Temperature (deg C) Value: 42 vs. 22
  misc_feature: MA Experiment 20000112 PARAMETER Experiment Name: At_42deg_Heat_cDNA_P Parameter: Timepoint (hr) Value: 2
  misc_feature: MA Experiment 20000112 PARAMETER Experiment Name: At_42deg_Heat_cDNA_P Parameter: Tissue Value: Aerial
  misc_feature: MA Experiment ID: 20000113 Result: Up-regulated in Transcription
  misc_feature: MA Experiment 20000113 PARAMETER Experiment Name: At_42deg_Heat_cDNA_P Parameter: Temperature (deg C) Value: 42 vs. 22
  misc_feature: MA Experiment 20000113 PARAMETER Experiment Name: At_42deg_Heat_cDNA_P Parameter: Timepoint (hr) Value: 8
  misc_feature: MA Experiment 20000113 PARAMETER Experiment Name: At_42deg_Heat_cDNA_P Parameter: Tissue Value: Aerial
  misc_feature: MA Experiment ID: 20000144 Result: Up-regulated in Transcription
  misc_feature: MA Experiment 20000144 PARAMETER Experiment Name: At_42deg_Heat_cDNA_P Parameter: Temperature (deg C) Value: 42 vs. 22
  misc_feature: MA Experiment 20000144 PARAMETER Experiment Name: At_42deg_Heat_cDNA_P Parameter: Timepoint (hr) Value: 1
  misc_feature: MA Experiment 20000144 PARAMETER Experiment Name: At_42deg_Heat_cDNA_P Parameter: Tissue Value: Aerial
  misc_feature: MA Experiment ID: 20000171 Result: Up-regulated in Transcription
  misc_feature: MA Experiment 20000171 PARAMETER Experiment Name: At_42deg_Heat_P Parameter: Age (day) Value: 14
  misc_feature: MA Experiment 20000171 PARAMETER Experiment Name: At_42deg_Heat_P Parameter: Organism Value: A. thaliana
  misc_feature: MA Experiment 20000171 PARAMETER Experiment Name: At_42deg_Heat_P Parameter: Plant Line Value: WS
  misc_feature: MA Experiment 20000171 PARAMETER Experiment Name: At_42deg_Heat_P Parameter: Temperature (deg C) Value: 42 vs. 22
  misc_feature: MA Experiment 20000171 PARAMETER Experiment Name: At_42deg_Heat_P Parameter: Timepoint (hr) Value: 1
  misc_feature: MA Experiment 20000171 PARAMETER Experiment Name: At_42deg_Heat_P Parameter: Tissue Value: Aerial
  misc_feature: MA Experiment ID: 20000173 Result: Up-regulated in Transcription
  misc_feature: MA Experiment 20000173 PARAMETER Experiment Name: At_42deg_Heat_P Parameter: Age (day) Value: 14
  misc_feature: MA Experiment 20000173 PARAMETER Experiment Name: At_42deg_Heat_P Parameter: Organism Value: A. thaliana
  misc_feature: MA Experiment 20000173 PARAMETER Experiment Name: At_42deg_Heat_P Parameter: Plant Line Value: WS
  misc_feature: MA Experiment 20000173 PARAMETER Experiment Name: At_42deg_Heat_P Parameter: Temperature (deg C) Value: 42 vs. 22
  misc_feature: MA Experiment 20000173 PARAMETER Experiment Name: At_42deg_Heat_P Parameter: Timepoint (hr) Value: 6
  misc_feature: MA Experiment 20000173 PARAMETER Experiment Name: At_42deg_Heat_P Parameter: Tissue Value: Aerial
  misc_feature: MA Experiment ID: 20000265 Result: Up-regulated in Transcription
  misc_feature: MA Experiment 20000265 PARAMETER Experiment Name: At_Open_Flower_P Parameter: Age (day) Value: 21
  misc_feature: MA Experiment 20000265 PARAMETER Experiment Name: At_Open_Flower_P Parameter: Plant Line Value: WS
  misc_feature: MA Experiment 20000265 PARAMETER Experiment Name: At_Open_Flower_P Parameter: Tissue Value: Closed Flower vs. Whole Plant
  misc_feature: MA Experiment ID: 20000286 Result: Up-regulated in Transcription
  misc_feature: MA Experiment 20000286 PARAMETER Experiment Name: At_Open_Flower_P Parameter: Age (day) Value: 21
  misc_feature: MA Experiment 20000286 PARAMETER Experiment Name: At_Open_Flower_P Parameter: Plant Line Value: WS
  misc_feature: MA Experiment 20000286 PARAMETER Experiment Name: At_Open_Flower_P Parameter: Tissue Value: Half Open vs. Whole Plant
  misc_feature: MA Experiment ID: 20001248 Result: Down-regulated in Transcription
  misc_feature: MA Experiment 20001248 PARAMETER Experiment Name: At_Far-red-induction_P Parameter: Age (day) Value: 7
  misc_feature: MA Experiment 20001248 PARAMETER Experiment Name: At_Far-red-induction_P Parameter: Light Value: Far-red vs. White
  misc_feature: MA Experiment 20001248 PARAMETER Experiment Name: At_Far-red-induction_P Parameter: Organism Value: A. thaliana
  misc_feature: MA Experiment 20001248 PARAMETER Experiment Name: At_Far-red-induction_P Parameter: Plant Line Value: Columbia
  misc_feature: MA Experiment 20001248 PARAMETER Experiment Name: At_Far-red-induction_P Parameter: Timepoint (hr) Value: 4
  misc_feature: MA Experiment 20001248 PARAMETER Experiment Name: At_Far-red-induction_P Parameter: Tissue Value: Whole Plant
aagaccttgcgctagaagaacagtttcggctttgttttgttcaattctcacctcaccccggacagagtccaaaacaacggtttatttcttgcgtttgtcgggaaatcagagttgagtataataaacacccttcacgacattctttgcttgtccaccttggtatctgaaattgggggactcttattataaaagatatgatgatttgttactctccaattacaacatgttctaggaatgctatcagtatcaagaggcatttaggctctcgcctctacggcgttgtggctcacggatcatctaaattctcctgctacagtcttttatcaggactttcaagaagacattataccggttttcgtgtatcggtctctaatagaccttctagttggcacgataaaggactttttgggtcagtattgatcaatcgaccaactgttgctcctaaggaaaagcttgaagtttctttcttgtcccctgaggctaatatgaaatgctcgaagatagaatctaacatgagaaatctctattgttattcaagatttgcatatacaggtgtgattgttagcttgcttgtttgttattcttcgacttcccaatcagcgtacgcagattcttcaagggataaagatgctaacaacgtgcatcatcattcgtctgatggtaaattccacaatgggaaaagagtttatactgattactctatcattggtattccgggggatggcagatgtttgtttcgttctgtagctcacggattctgcttacgctctgggaaactagctccaggcgagaagatgcagagagaactcgctgacgaattacgtaccagggttgctgatgagtttatccaaagaagacaggaaacagaatggttcgtggaaggagatttcgacacctacgtcagacaaattcgggatccacacgtgtggggaggtgaacctgaactcttcatggcttcacacgttctccagatgccaatcacagtgtatatgaaagacgataaagctggaggactgataagtattgcagaatatggtcaagaatacggtaaagacgacccaatccgagtcctataccatggttttggtcattacgatgcccttttgcttcacgagagtaaagcttcgattccaaaatctaaactttagtatacttagttttgcatctttgacttttgtcaggtgttgatgatgtttttgtttactgacacaaccactatctgtatgccttgtagaatgtaacctttttttaccttttactttgaataaaaattttcagtttc

SEQ ID NO: 21240 - protein, 317 aa, Arabidopsis thaliana
  peptide (1)..(317): Ceres Seq. ID no. 12674393
  misc_feature (174)..(300): Pfam Name: OTU-like cysteine protease Pfam Description: OTU-like cysteine protease
  misc_feature (171)..(213): Homolog of NCBI NO: 34907704 NR Description: P0035F12.12 [Oryza sativa (japonica
  misc_feature (168)..(287): Homolog of NCBI NO: 34902010 NR Description: unknown protein [Oryza sativa (japonica
  misc_feature (1)..(317): Homolog of NCBI NO: 11280708 NR Description: hypothetical protein T10K17.20 - Arabidopsis
  misc_feature (1)..(317): Homolog of NCBI NO: 18410816 NR Description: auxin-regulated protein
MMICYSPITTCSRNAISIKRHLGSRLYGVVAHGSSKFSCYSLLSGLSRRHYTGFRVSVSNRPSSWHDKGLFGSVLINRPTVAPKEKLEVSFLSPEANMKCSKIESNMRNLYCYSRFAYTGVIVSLLVCYSSTSQSAYADSSRDKDANNVHHHSSDGKFHNGKRVYTDYSIIGIPGDGRCLFRSVAHGFCLRSGKLAPGEKMQRELADELRTRVADEFIQRRQETEWFVEGDFDTYVRQIRDPHVWGGEPELFMASHVLQMPITVYMKDDKAGGLISIAEYGQEYGKDDPIRVLYHGFGHYDALLLHESKASIPKSKL

SEQ ID NO: 21241 - protein, 316 aa, Arabidopsis thaliana
  peptide (1)..(316): Ceres Seq. ID no. 12674394
  misc_feature (173)..(299): Pfam Name: OTU-like cysteine protease Pfam Description: OTU-like cysteine protease
  misc_feature (170)..(212): Homolog of NCBI NO: 34907704 NR Description: P0035F12.12 [Oryza sativa (japonica
  misc_feature (167)..(286): Homolog of NCBI NO: 34902010 NR Description: unknown protein [Oryza sativa (japonica
  misc_feature (1)..(316): Homolog of NCBI NO: 11280708 NR Description: hypothetical protein T10K17.20 - Arabidopsis
  misc_feature (1)..(316): Homolog of NCBI NO: 18410816 NR Description: auxin-regulated protein
MICYSPITTCSRNAISIKRHLGSRLYGVVAHGSSKFSCYSLLSGLSRRHYTGFRVSVSNRPSSWHDKGLFGSVLINRPTVAPKEKLEVSFLSPEANMKCSKIESNMRNLYCYSRFAYTGVIVSLLVCYSSTSQSAYADSSRDKDANNVHHHSSDGKFHNGKRVYTDYSIIGIPGDGRCLFRSVAHGFCLRSGKLAPGEKMQRELADELRTRVADEFIQRRQETEWFVEGDFDTYVRQIRDPHVWGGEPELFMASHVLQMPITVYMKDDKAGGLISIAEYGQEYGKDDPIRVLYHGFGHYDALLLHESKASIPKSKL

SEQ ID NO: 21242 - protein, 220 aa, Arabidopsis thaliana
  peptide (1)..(220): Ceres Seq. ID no. 12674395
  misc_feature (77)..(203): Pfam Name: OTU-like cysteine protease Pfam Description: OTU-like cysteine protease
  misc_feature (74)..(116): Homolog of NCBI NO: 34907704 NR Description: P0035F12.12 [Oryza sativa (japonica
  misc_feature (71)..(190): Homolog of NCBI NO: 34902010 NR Description: unknown protein [Oryza sativa (japonica
  misc_feature (1)..(220): Homolog of NCBI NO: 11280708 NR Description: hypothetical protein T10K17.20 - Arabidopsis
  misc_feature (1)..(220): Homolog of NCBI NO: 18410816 NR Description: auxin-regulated protein
MKCSKIESNMRNLYCYSRFAYTGVIVSLLVCYSSTSQSAYADSSRDKDANNVHHHSSDGKFHNGKRVYTDYSIIGIPGDGRCLFRSVAHGFCLRSGKLAPGEKMQRELADELRTRVADEFIQRRQETEWFVEGDFDTYVRQIRDPHVWGGEPELFMASHVLQMPITVYMKDDKAGGLISIAEYGQEYGKDDPIRVLYHGFGHYDALLLHESKASIPKSKL

SEQ ID NO: 21243 - DNA, 1639 bp, Arabidopsis thaliana
  misc_feature (1)..(1639): Ceres Seq. ID no. 12334814
  misc_feature: MA Experiment ID: 108488 Result: Up-regulated in Transcription
  misc_feature: MA Experiment ID: 108572 Result: Up-regulated in Transcription
  misc_feature: MA Experiment 108572 PARAMETER Experiment Name: At_Drought_cDNA_P Parameter: Timepoint (hr) Value: 1
  misc_feature: MA Experiment 108572 PARAMETER Experiment Name: At_Drought_cDNA_P Parameter: Tissue Value: Aerial
  misc_feature: MA Experiment 108572 PARAMETER Experiment Name: At_Drought_cDNA_P Parameter: Treatment Value: Drought vs. No Drought
  misc_feature: MA Experiment ID: 108573 Result: Up-regulated in Transcription
  misc_feature: MA Experiment 108573 PARAMETER Experiment Name: At_Drought_cDNA_P Parameter: Timepoint (hr) Value: 6
  misc_feature: MA Experiment 108573 PARAMETER Experiment Name: At_Drought_cDNA_P Parameter: Tissue Value: Aerial
  misc_feature: MA Experiment 108573 PARAMETER Experiment Name: At_Drought_cDNA_P Parameter: Treatment Value: Drought vs. No Drought
  misc_feature: MA Experiment ID: 108595 Result: Down-regulated in Transcription
  misc_feature: MA Experiment 108595 PARAMETER Experiment Name: At_Ler-pi_Ovule_cDNA_P Parameter: Plant Line Value: null
  misc_feature: MA Experiment ID: 20000070 Result: Down-regulated in Transcription
  misc_feature: MA Experiment 20000070 PARAMETER Experiment Name: At_100uM_ABA_Mutants_cDNA_P Parameter: Plant Line Value: CS24
  misc_feature: MA Experiment 20000070 PARAMETER Experiment Name: At_100uM_ABA_Mutants_cDNA_P Parameter: Timepoint (hr) Value: 6
  misc_feature: MA Experiment 20000070 PARAMETER Experiment Name: At_100uM_ABA_Mutants_cDNA_P Parameter: Tissue Value: Aerial
  misc_feature: MA Experiment 20000070 PARAMETER Experiment Name: At_100uM_ABA_Mutants_cDNA_P Parameter: Treatment Value: 100uM ABA vs. No Treatment
  misc_feature: MA Experiment ID: 20000072 Result: Down-regulated in Transcription
  misc_feature: MA Experiment 20000072 PARAMETER Experiment Name: At_100uM_ABA_Mutants_cDNA_P Parameter: Plant Line Value: CS8105
  misc_feature: MA Experiment 20000072 PARAMETER Experiment Name: At_100uM_ABA_Mutants_cDNA_P Parameter: Timepoint (hr) Value: 6
  misc_feature: MA Experiment 20000072 PARAMETER Experiment Name: At_100uM_ABA_Mutants_cDNA_P Parameter: Tissue Value: Aerial
  misc_feature: MA Experiment 20000072 PARAMETER Experiment Name: At_100uM_ABA_Mutants_cDNA_P Parameter: Treatment Value: 100uM ABA vs. No Treatment
  misc_feature: MA Experiment ID: 20000086 Result: Down-regulated in Transcription
  misc_feature: MA Experiment 20000086 PARAMETER Experiment Name: At_100uM_ABA_Mutants_cDNA_P Parameter: Plant Line Value: CS22
  misc_feature: MA Experiment 20000086 PARAMETER Experiment Name: At_100uM_ABA_Mutants_cDNA_P Parameter: Timepoint (hr) Value: 6
  misc_feature: MA Experiment 20000086 PARAMETER Experiment Name: At_100uM_ABA_Mutants_cDNA_P Parameter: Tissue Value: Aerial
  misc_feature: MA Experiment 20000086 PARAMETER Experiment Name: At_100uM_ABA_Mutants_cDNA_P Parameter: Treatment Value: 100uM ABA vs. No Treatment
  misc_feature: MA Experiment ID: 20000087 Result: Down-regulated in Transcription
  misc_feature: MA Experiment 20000087 PARAMETER Experiment Name: At_100uM_ABA_Mutants_cDNA_P Parameter: Plant Line Value: WS
  misc_feature: MA Experiment 20000087 PARAMETER Experiment Name: At_100uM_ABA_Mutants_cDNA_P Parameter: Timepoint (hr) Value: 6
  misc_feature: MA Experiment 20000087 PARAMETER Experiment Name: At_100uM_ABA_Mutants_cDNA_P Parameter: Tissue Value: Aerial
  misc_feature: MA Experiment 20000087 PARAMETER Experiment Name: At_100uM_ABA_Mutants_cDNA_P Parameter: Treatment Value: 100uM ABA vs. No Treatment
  misc_feature: MA Experiment ID: 20000088 Result: Down-regulated in Transcription
  misc_feature: MA Experiment 20000088 PARAMETER Experiment Name: At_100uM_ABA_Mutants_cDNA_P Parameter: Plant Line Value: Landsberg
  misc_feature: MA Experiment 20000088 PARAMETER Experiment Name: At_100uM_ABA_Mutants_cDNA_P Parameter: Timepoint (hr) Value: 6
  misc_feature: MA Experiment 20000088 PARAMETER Experiment Name: At_100uM_ABA_Mutants_cDNA_P Parameter: Tissue Value: Aerial
  misc_feature: MA Experiment 20000088 PARAMETER Experiment Name: At_100uM_ABA_Mutants_cDNA_P Parameter: Treatment Value: 100uM ABA vs. No Treatment
  misc_feature: MA Experiment ID: 20000090 Result: Down-regulated in Transcription
  misc_feature: MA Experiment ID: 20000113 Result: Up-regulated in Transcription
  misc_feature: MA Experiment 20000113 PARAMETER Experiment Name: At_42deg_Heat_cDNA_P Parameter: Temperature (deg C) Value: 42 vs. 22
  misc_feature: MA Experiment 20000113 PARAMETER Experiment Name: At_42deg_Heat_cDNA_P Parameter: Timepoint (hr) Value: 8
  misc_feature: MA Experiment 20000113 PARAMETER Experiment Name: At_42deg_Heat_cDNA_P Parameter: Tissue Value: Aerial
  misc_feature: MA Experiment ID: 20000117 Result: Down-regulated in Transcription
  misc_feature: MA Experiment 20000117 PARAMETER Experiment Name: At_100uM_ABA_Mutants_cDNA_P Parameter: Plant Line Value: Columbia
  misc_feature: MA Experiment 20000117 PARAMETER Experiment Name: At_100uM_ABA_Mutants_cDNA_P Parameter: Timepoint (hr) Value: 6
  misc_feature: MA Experiment 20000117 PARAMETER Experiment Name: At_100uM_ABA_Mutants_cDNA_P Parameter: Tissue Value: Aerial
  misc_feature: MA Experiment 20000117 PARAMETER Experiment Name: At_100uM_ABA_Mutants_cDNA_P Parameter: Treatment Value: 100uM ABA vs. No Treatment
attaaagaaatgggtaatggtagtcgtgtatagaatcgagagagaggtgtgtatagaaacgagaggcgaagattgcatcgaacggcgaaatcgggcctacagtaatcccaaattctaatccttatcctcttctctctcgtttttattctccttcttcttcaatctcttggtcttctcgactcctcccagcgcttcaatatctcccaagacccaaccatcggagggagggggcgagatgatgggattgagttccttggtctttaccgagtttcacagcctcggcttctctgaccttatagtttttgttgcgccactctggattgctgtggctgccggtgttttggttggttgggtttggaggcccaagtgggcttatctcgattctaaactcttgtccaattcacctaaattcctcaatcttcagcttcccacttccatcctcaaaacttcttctcaccacgttaaccccagcctttcttccaaagagaaaactgggtttgtaacggacgatgattttaggcatctatggaagttggttgaggtcaaagatggcggtccttgttggattcaaatgatggaccgatcaaccccaaccttctcatatcaagcttggaggcgagatcctgagaatgggcctccccagtaccgtagcagaactgtgtttgaggatgccactcccgagatggtcagggacttcttttgggatgatgagttccgttccaagtgggatgatatgcttttgtattcttctactctcgagcgttgcaaggacacgggcactatggttgtgcaatgggtgcgaaagttccccttcttttgtagcgacagggagtatattataggccgtcgtatatgggatgctggccgagtcttttactgcattactaagggagtacaatacccgtctgtacctagacaaaacaagccaaggcgagtcgacttgtactattcaagctggtgtatccgtgcagttgaatcaaaaagaggcgatggtgagatgacatcatgtgaggtactactatttcaccatgaagatatgggaataccgtgggagattgcaaagcttggggtgagacagggtatgtggggtgcagtcaagaagattgagccaggcctacgtgcatatcagagggctaaagcagcgggagcaggtttatccccgagtgccataatggctcacatcaacaccaaagtgagtgcagaggagttcatgaatgagaggggttcgatagcagaggttacagaagacaagccgacggggaaaaacataccaaagatactagtggtaggaggggcgattgcacttgcatgtacattggacaaagggctgttgacaaaggcggtgatattcggagtagccagaagatttgcaagaatgggaaaaaggatgtaggagagagtgtacatgtaagtagacagagaacgaatgagggaatgagagacgtgaaaagggtctctcctttcacaagttgaatagagaaaggctatctctttagtcattgtcttggtggatgtatcaatcatgtaatagtaaagagaaaaagaagcgagagttattctttcagtgttgaatttctgagagcgcggaaagatagttccaccgcgctgtgctaataaacatctccgtcttttcttgtcc

SEQ ID NO: 21244 - protein, 385 aa, Arabidopsis thaliana
  peptide (1)..(385): Ceres Seq. ID no. 12334815
  misc_feature (137)..(216): Pfam Name: START domain Pfam Description: START domain
  misc_feature (89)..(384): Homolog of NCBI NO: 21593272 NR Description: membrane related protein-like [Arabidopsis
  misc_feature (28)..(67): Homolog of NCBI NO: 18423599 NR Description: membrane related protein-like
  misc_feature (82)..(384): Homolog of NCBI NO: 18423599 NR Description: membrane related protein-like
  misc_feature (28)..(384): Homolog of NCBI NO: 10178166 NR Description: membrane related protein-like [Arabidopsis
  misc_feature (19)..(384): Homolog of NCBI NO: 38344869 NR Description: OSJNBa0020P07.12 [Oryza sativa (japonica
  misc_feature (16)..(68): Homolog of NCBI NO: 18033654 NR Description: putative nodule membrane protein [Medicago sativa]
  misc_feature (48)..(384): Homolog of NCBI NO: 18033654 NR Description: putative nodule membrane protein [Medicago sativa]
  misc_feature (1)..(385): Homolog of NCBI NO: 4741929 NR Description: membrane related protein CP5 [Arabidopsis
  misc_feature (1)..(385): Homolog of NCBI NO: 15217736 NR Description: membrane related protein CP5, putative
  misc_feature (1)..(385): Homolog of NCBI NO: 22135902 NR Description: membrane related protein CP5, putative
MMGLSSLVFTEFHSLGFSDLIVFVAPLWIAVAAGVLVGWVWRPKWAYLDSKLLSNSPKFLNLQLPTSILKTSSHHVNPSLSSKEKTGFVTDDDFRHLWKLVEVKDGGPCWIQMMDRSTPTFSYQAWRRDPENGPPQYRSRTVFEDATPEMVRDFFWDDEFRSKWDDMLLYSSTLERCKDTGTMVVQWVRKFPFFCSDREYIIGRRIWDAGRVFYCITKGVQYPSVPRQNKPRRVDLYYSSWCIRAVESKRGDGEMTSCEVLLFHHEDMGIPWEIAKLGVRQGMWGAVKKIEPGLRAYQRAKAAGAGLSPSAIMAHINTKVSAEEFMNERGSIAEVTEDKPTGKNIPKILVVGGAIALACTLDKGLLTKAVIFGVARRFARMGKRM

SEQ ID NO: 21245 - protein, 384 aa, Arabidopsis thaliana
  peptide (1)..(384): Ceres Seq. ID no. 12334816
  misc_feature (136)..(215): Pfam Name: START domain Pfam Description: START domain
  misc_feature (88)..(383): Homolog of NCBI NO: 21593272 NR Description: membrane related protein-like [Arabidopsis
  misc_feature (27)..(66): Homolog of NCBI NO: 18423599 NR Description: membrane related protein-like
  misc_feature (81)..(383): Homolog of NCBI NO: 18423599 NR Description: membrane related protein-like
  misc_feature (27)..(383): Homolog of NCBI NO: 10178166 NR Description: membrane related protein-like [Arabidopsis
  misc_feature (18)..(383): Homolog of NCBI NO: 38344869 NR Description: OSJNBa0020P07.12 [Oryza sativa (japonica
  misc_feature (15)..(67): Homolog of NCBI NO: 18033654 NR Description: putative nodule membrane protein [Medicago sativa]
  misc_feature (47)..(383): Homolog of NCBI NO: 18033654 NR Description: putative nodule membrane protein [Medicago sativa]
  misc_feature (1)..(384): Homolog of NCBI NO: 4741929 NR Description: membrane related protein CP5 [Arabidopsis
  misc_feature (1)..(384): Homolog of NCBI NO: 15217736 NR Description: membrane related protein CP5, putative
  misc_feature (1)..(384): Homolog of NCBI NO: 22135902 NR Description: membrane related protein CP5, putative
MGLSSLVFTEFHSLGFSDLIVFVAPLWIAVAAGVLVGWVWRPKWAYLDSKLLSNSPKFLNLQLPTSILKTSSHHVNPSLSSKEKTGFVTDDDFRHLWKLVEVKDGGPCWIQMMDRSTPTFSYQAWRRDPENGPPQYRSRTVFEDATPEMVRDFFWDDEFRSKWDDMLLYSSTLERCKDTGTMVVQWVRKFPFFCSDREYIIGRRIWDAGRVFYCITKGVQYPSVPRQNKPRRVDLYYSSWCIRAVESKRGDGEMTSCEVLLFHHEDMGIPWEIAKLGVRQGMWGAVKKIEPGLRAYQRAKAAGAGLSPSAIMAHINTKVSAEEFMNERGSIAEVTEDKPTGKNIPKILVVGGAIALACTLDKGLLTKAVIFGVARRFARMGKRM

SEQ ID NO: 21246 - protein, 273 aa, Arabidopsis thaliana
  peptide (1)..(273): Ceres Seq. ID no. 12334817
  misc_feature (25)..(104): Pfam Name: START domain Pfam Description: START domain
  misc_feature (1)..(268): Homolog of NCBI NO: 15810257 NR Description: unknown protein [Arabidopsis thaliana]
  misc_feature (1)..(268): Homolog of NCBI NO: 18414239 NR Description: expressed protein
  misc_feature (1)..(272): Homolog of NCBI NO: 21593272 NR Description: membrane related protein-like [Arabidopsis
  misc_feature (1)..(272): Homolog of NCBI NO: 18423599 NR Description: membrane related protein-like
  misc_feature (1)..(272): Homolog of NCBI NO: 10178166 NR Description: membrane related protein-like [Arabidopsis
  misc_feature (1)..(272): Homolog of NCBI NO: 38344869 NR Description: OSJNBa0020P07.12 [Oryza sativa (japonica
  misc_feature (1)..(272): Homolog of NCBI NO: 18033654 NR Description: putative nodule membrane protein [Medicago sativa]
  misc_feature (1)..(273): Homolog of NCBI NO: 4741929 NR Description: membrane related protein CP5 [Arabidopsis
  misc_feature (1)..(273): Homolog of NCBI NO: 15217736 NR Description: membrane related protein CP5, putative
  misc_feature (1)..(273): Homolog of NCBI NO: 22135902 NR Description: membrane related protein CP5, putative
MMDRSTPTFSYQAWRRDPENGPPQYRSRTVFEDATPEMVRDFFWDDEFRSKWDDMLLYSSTLERCKDTGTMVVQWVRKFPFFCSDREYIIGRRIWDAGRVFYCITKGVQYPSVPRQNKPRRVDLYYSSWCIRAVESKRGDGEMTSCEVLLFHHEDMGIPWEIAKLGVRQGMWGAVKKIEPGLRAYQRAKAAGAGLSPSAIMAHINTKVSAEEFMNERGSIAEVTEDKPTGKNIPKILVVGGAIALACTLDKGLLTKAVIFGVARRFARMGKRM

SEQ ID NO: 21247 - DNA, 1104 bp, Arabidopsis thaliana
  misc_feature (1)..(1104): Ceres Seq. ID no. 12324554
  misc_feature: MA Experiment ID: 108461 Result: Up-regulated in Transcription
  misc_feature: MA Experiment 108461 PARAMETER Experiment Name: At_Germinating_Seeds_cDNA_P Parameter: Age (day) Value: 1 vs. 0
  misc_feature: MA Experiment 108461 PARAMETER Experiment Name: At_Germinating_Seeds_cDNA_P Parameter: Tissue Value: Germinating Seeds
  misc_feature: MA Experiment ID: 108463 Result: Up-regulated in Transcription
  misc_feature: MA Experiment 108463 PARAMETER Experiment Name: At_Germinating_Seeds_cDNA_P Parameter: Age (day) Value: 3 vs. 0
  misc_feature: MA Experiment 108463 PARAMETER Experiment Name: At_Germinating_Seeds_cDNA_P Parameter: Tissue Value: Germinating Seeds
  misc_feature: MA Experiment ID: 108464 Result: Up-regulated in Transcription
  misc_feature: MA Experiment 108464 PARAMETER Experiment Name: At_Germinating_Seeds_cDNA_P Parameter: Age (day) Value: 4 vs. 0
  misc_feature: MA Experiment 108464 PARAMETER Experiment Name: At_Germinating_Seeds_cDNA_P Parameter: Tissue Value: Germinating Seeds
  misc_feature: MA Experiment ID: 108488 Result: Down-regulated in Transcription
  misc_feature: MA Experiment ID: 108579 Result: Down-regulated in Transcription
  misc_feature: MA Experiment 108579 PARAMETER Experiment Name: At_4deg_Cold_cDNA_P Parameter: Temperature (deg C) Value: 4 vs. 22
  misc_feature: MA Experiment 108579 PARAMETER Experiment Name: At_4deg_Cold_cDNA_P Parameter: Timepoint (hr) Value: 6
  misc_feature: MA Experiment 108579 PARAMETER Experiment Name: At_4deg_Cold_cDNA_P Parameter: Tissue Value: Aerial
  misc_feature: MA Experiment ID: 20000069 Result: Up-regulated in Transcription
  misc_feature: MA Experiment 20000069 PARAMETER Experiment Name: At_100uM_ABA_Mutants_cDNA_P Parameter: Plant Line Value: CS23
  misc_feature: MA Experiment 20000069 PARAMETER Experiment Name: At_100uM_ABA_Mutants_cDNA_P Parameter: Timepoint (hr) Value: 6
  misc_feature: MA Experiment 20000069 PARAMETER Experiment Name: At_100uM_ABA_Mutants_cDNA_P Parameter: Tissue Value: Aerial
  misc_feature: MA Experiment 20000069 PARAMETER Experiment Name: At_100uM_ABA_Mutants_cDNA_P Parameter: Treatment Value: 100uM ABA vs. No Treatment
  misc_feature: MA Experiment ID: 20000071 Result: Up-regulated in Transcription
  misc_feature: MA Experiment 20000071 PARAMETER Experiment Name: At_100uM_ABA_Mutants_cDNA_P Parameter: Plant Line Value: CS8104
  misc_feature: MA Experiment 20000071 PARAMETER Experiment Name: At_100uM_ABA_Mutants_cDNA_P Parameter: Timepoint (hr) Value: 6
  misc_feature: MA Experiment 20000071 PARAMETER Experiment Name: At_100uM_ABA_Mutants_cDNA_P Parameter: Tissue Value: Aerial
  misc_feature: MA Experiment 20000071 PARAMETER Experiment Name: At_100uM_ABA_Mutants_cDNA_P Parameter: Treatment Value: 100uM ABA vs. No Treatment
  misc_feature: MA Experiment ID: 20000072 Result: Up-regulated in Transcription
  misc_feature: MA Experiment 20000072 PARAMETER Experiment Name: At_100uM_ABA_Mutants_cDNA_P Parameter: Plant Line Value: CS8105
  misc_feature: MA Experiment 20000072 PARAMETER Experiment Name: At_100uM_ABA_Mutants_cDNA_P Parameter: Timepoint (hr) Value: 6
  misc_feature: MA Experiment 20000072 PARAMETER Experiment Name: At_100uM_ABA_Mutants_cDNA_P Parameter: Tissue Value: Aerial
  misc_feature: MA Experiment 20000072 PARAMETER Experiment Name: At_100uM_ABA_Mutants_cDNA_P Parameter: Treatment Value: 100uM ABA vs. No Treatment
  misc_feature: MA Experiment ID: 20000086 Result: Up-regulated in Transcription
  misc_feature: MA Experiment 20000086 PARAMETER Experiment Name: At_100uM_ABA_Mutants_cDNA_P Parameter: Plant Line Value: CS22
  misc_feature: MA Experiment 20000086 PARAMETER Experiment Name: At_100uM_ABA_Mutants_cDNA_P Parameter: Timepoint (hr) Value: 6
  misc_feature: MA Experiment 20000086 PARAMETER Experiment Name: At_100uM_ABA_Mutants_cDNA_P Parameter: Tissue Value: Aerial
  misc_feature: MA Experiment 20000086 PARAMETER Experiment Name: At_100uM_ABA_Mutants_cDNA_P Parameter: Treatment Value: 100uM ABA vs. No Treatment
  misc_feature: MA Experiment ID: 20000180 Result: Up-regulated in Transcription
  misc_feature: MA Experiment 20000180 PARAMETER Experiment Name: At_Germinating_Seeds_P Parameter: Age (hr) Value: 24 vs. 0
  misc_feature: MA Experiment 20000180 PARAMETER Experiment Name: At_Germinating_Seeds_P Parameter: Tissue Value: Germinating Seeds
  misc_feature: MA Experiment ID: 20000184 Result: Down-regulated in Transcription
  misc_feature: MA Experiment 20000184 PARAMETER Experiment Name: At_Shoots__P Parameter: Age (day) Value: 7
  misc_feature: MA Experiment 20000184 PARAMETER Experiment Name: At_Shoots__P Parameter: Tissue Value: Shoots vs. Whole Plant
  misc_feature: MA Experiment ID: 20000438 Result: Down-regulated in Transcription
  misc_feature: MA Experiment 20000438 PARAMETER Experiment Name: At_Shoots__P Parameter: Age (day) Value: 14
  misc_feature: MA Experiment 20000438 PARAMETER Experiment Name: At_Shoots__P Parameter: Tissue Value: Shoots vs. Whole Plant
  misc_feature: MA Experiment ID: 20001904 Result: Up-regulated in Transcription
  misc_feature: MA Experiment 20001904 PARAMETER Experiment Name: At_Drought_Reproduction_P Parameter: Age (day) Value: 37
  misc_feature: MA Experiment 20001904 PARAMETER Experiment Name: At_Drought_Reproduction_P Parameter: Organism Value: A. thaliana
  misc_feature: MA Experiment 20001904 PARAMETER Experiment Name: At_Drought_Reproduction_P Parameter: Plant Line Value: WS
  misc_feature: MA Experiment 20001904 PARAMETER Experiment Name: At_Drought_Reproduction_P Parameter: Timepoint (day) Value: 7
  misc_feature: MA Experiment 20001904 PARAMETER Experiment Name: At_Drought_Reproduction_P Parameter: Tissue Value: Rosettes
  misc_feature: MA Experiment 20001904 PARAMETER Experiment Name: At_Drought_Reproduction_P Parameter: Treatment Value: Drought vs. No Drought
  misc_feature: MA Experiment ID: 20001905 Result: Up-regulated in Transcription
  misc_feature: MA Experiment 20001905 PARAMETER Experiment Name: At_Drought_Reproduction_P Parameter: Age (day) Value: 40
  misc_feature: MA Experiment 20001905 PARAMETER Experiment Name: At_Drought_Reproduction_P Parameter: Organism Value: A. thaliana
  misc_feature: MA Experiment 20001905 PARAMETER Experiment Name: At_Drought_Reproduction_P Parameter: Plant Line Value: WS
  misc_feature: MA Experiment 20001905 PARAMETER Experiment Name: At_Drought_Reproduction_P Parameter: Timepoint (day) Value: 10
  misc_feature: MA Experiment 20001905 PARAMETER Experiment Name: At_Drought_Reproduction_P Parameter: Tissue Value: Rosettes
  misc_feature: MA Experiment 20001905 PARAMETER Experiment Name: At_Drought_Reproduction_P Parameter: Treatment Value: Drought vs. No Drought
atagacagctaatctcgatgtgtgattctttttttttcaactaatttttgactattttttttctgttttctttatttaacaaaaatctcacttggcgtgtctgatcttgttccccgtcgtcgtctctaacttacacatttccattctccgaatctctatctctccttttgcttcatcggtgtgatctctgagacgaaagaagaagaagatggtggttattgagcagaagaagaggtttgctttgtttttagcgacgtgtgattcagagttcgtgaagaagacttacggtggttacttcaatgtcttcgtttcaactttcggcgaagaaggtgagcaatgggatctattccgagtcatcgacggacaatttcccgacgagaatgatttagacaagtacgacggtttcgttatcagtggtagtccacatgatgctttcggagacgccgattggattgttaagctttgcgaagtttgtcagaaacttgatcacatgaagaagaaagttctcggcatctgcttcggccaccagataattactagagttaaaggtgggaagataggaagagcactcaaaggtgcagatatgggacttagaagcataaccatagcgaaagacaatgaaaaactacgaggttactttggagacgttgaggtcccagcatatttagctattataaaatgtcatcaggatgaagtgttggaacttcctgagtctgctacactacttgcttcttctgaggtatgtaacgtcgagatgttctctattggagatcattttttctgtattcaagggcatccagagtataacaaagagattctgtttgagattgtggaccgagtccttaatatgaagctgatggagcaagagtttgcggataaggcaaagagtacgatggagactgcgcaaccagacaggattctatggcagaagctctgcaaaaacttcctgaaaggttgatgatccgagactatgttatctctgtatgaacttatcaaaaactatgtcatctctcaataaacctgcagtatctttcatattttatcttcaggaaacagaaagaaacacatataaaacaaatcacaatcacaaataatcttttatgc

SEQ ID NO: 21248 - protein, 249 aa, Arabidopsis thaliana
  peptide (1)..(249): Ceres Seq. ID no. 12324555
  misc_feature (21)..(211): Pfam Name: Glutamine amidotransferase class-I Pfam Description: Glutamine amidotransferase class-I
  misc_feature (18)..(249): Homolog of NCBI NO: 13174241 NR Description: putative glutamine synthetase [Oryza sativa]
  misc_feature (5)..(212): Homolog of NCBI NO: 15224078 NR Description: unknown protein; protein id: At2g23960.1
  misc_feature (3)..(249): Homolog of NCBI NO: 15234765 NR Description: putative protein; protein id: At4g30540.1
  misc_feature (3)..(249): Homolog of NCBI NO: 14009290 NR Description: defense-related protein [Brassica carinata]
  misc_feature (3)..(248): Homolog of NCBI NO: 21593315 NR Description: defense-related protein [Arabidopsis thaliana]
  misc_feature (3)..(249): Homolog of NCBI NO: 15234763 NR Description: putative protein
  misc_feature (3)..(249): Homolog of NCBI NO: 15224079 NR Description: unknown protein; protein id: At2g23970.1
  misc_feature (1)..(249): Homolog of NCBI NO: 21555885 NR Description: unknown [Arabidopsis thaliana]
  misc_feature (1)..(249): Homolog of NCBI NO: 15234767 NR Description: putative protein
  misc_feature (1)..(249): Homolog of NCBI NO: 17381294 NR Description: AT4g30550/F17I23_110 [Arabidopsis thaliana]
MVVIEQKKRFALFLATCDSEFVKKTYGGYFNVFVSTFGEEGEQWDLFRVIDGQFPDENDLDKYDGFVISGSPHDAFGDADWIVKLCEVCQKLDHMKKKVLGICFGHQIITRVKGGKIGRALKGADMGLRSITIAKDNEKLRGYFGDVEVPAYLAIIKCHQDEVLELPESATLLASSEVCNVEMFSIGDHFFCIQGHPEYNKEILFEIVDRVLNMKLMEQEFADKAKSTMETAQPDRILWQKLCKNFLKG

SEQ ID NO: 21249 - protein, 155 aa, Arabidopsis thaliana
  peptide (1)..(155): Ceres Seq. ID no. 12324556
  misc_feature (1)..(117): Pfam Name: Glutamine amidotransferase class-I Pfam Description: Glutamine amidotransferase class-I
  misc_feature (1)..(155): Homolog of NCBI NO: 13174241 NR Description: putative glutamine synthetase [Oryza sativa]
  misc_feature (1)..(118): Homolog of NCBI NO: 15224078 NR Description: unknown protein; protein id: At2g23960.1
  misc_feature (1)..(155): Homolog of NCBI NO: 15234765 NR Description: putative protein; protein id: At4g30540.1
  misc_feature (1)..(155): Homolog of NCBI NO: 14009290 NR Description: defense-related protein [Brassica carinata]
  misc_feature (1)..(154): Homolog of NCBI NO: 21593315 NR Description: defense-related protein [Arabidopsis thaliana]
  misc_feature (1)..(155): Homolog of NCBI NO: 15234763 NR Description: putative protein
  misc_feature (1)..(155): Homolog of NCBI NO: 15224079 NR Description: unknown protein; protein id: At2g23970.1
  misc_feature (1)..(155): Homolog of NCBI NO: 21555885 NR Description: unknown [Arabidopsis thaliana]
  misc_feature (1)..(155): Homolog of NCBI NO: 15234767 NR Description: putative protein
  misc_feature (1)..(155): Homolog of NCBI NO: 17381294 NR Description: AT4g30550/F17I23_110 [Arabidopsis thaliana]
MKKKVLGICFGHQIITRVKGGKIGRALKGADMGLRSITIAKDNEKLRGYFGDVEVPAYLAIIKCHQDEVLELPESATLLASSEVCNVEMFSIGDHFFCIQGHPEYNKEILFEIVDRVLNMKLMEQEFADKAKSTMETAQPDRILWQKLCKNFLKG

SEQ ID NO: 21250 - protein, 124 aa, Arabidopsis thaliana
  peptide (1)..(124): Ceres Seq. ID no. 12324557
  misc_feature (1)..(86): Pfam Name: Glutamine amidotransferase class-I Pfam Description: Glutamine amidotransferase class-I
  misc_feature (1)..(124): Homolog of NCBI NO: 13174241 NR Description: putative glutamine synthetase [Oryza sativa]
  misc_feature (1)..(87): Homolog of NCBI NO: 15224078 NR Description: unknown protein; protein id: At2g23960.1
  misc_feature (1)..(124): Homolog of NCBI NO: 15234765 NR Description: putative protein; protein id: At4g30540.1
  misc_feature (1)..(124): Homolog of NCBI NO: 14009290 NR Description: defense-related protein [Brassica carinata]
  misc_feature (1)..(123): Homolog of NCBI NO: 21593315 NR Description: defense-related protein [Arabidopsis thaliana]
  misc_feature (1)..(124): Homolog of NCBI NO: 15234763 NR Description: putative protein
  misc_feature (1)..(124): Homolog of NCBI NO: 15224079 NR Description: unknown protein; protein id: At2g23970.1
  misc_feature (1)..(124): Homolog of NCBI NO: 21555885 NR Description: unknown [Arabidopsis thaliana]
  misc_feature (1)..(124): Homolog of NCBI NO: 15234767 NR Description: putative protein
  misc_feature (1)..(124): Homolog of NCBI NO: 17381294 NR Description: AT4g30550/F17I23_110 [Arabidopsis thaliana]
MGLRSITIAKDNEKLRGYFGDVEVPAYLAIIKCHQDEVLELPESATLLASSEVCNVEMFSIGDHFFCIQGHPEYNKEILFEIVDRVLNMKLMEQEFADKAKSTMETAQPDRILWQKLCKNFLKG

SEQ ID NO: 21251 - DNA, 1476 bp, Arabidopsis thaliana
  misc_feature (1)..(1476): Ceres Seq. ID no. 13497511
  misc_feature: MA Experiment ID: 20000184 Result: Down-regulated in Transcription
  misc_feature: MA Experiment 20000184 PARAMETER Experiment Name: At_Shoots__P Parameter: Age (day) Value: 7
  misc_feature: MA Experiment 20000184 PARAMETER Experiment Name: At_Shoots__P Parameter: Tissue Value: Shoots vs. Whole Plant
  misc_feature: MA Experiment ID: 20000185 Result: Down-regulated in Transcription
  misc_feature: MA Experiment 20000185 PARAMETER Experiment Name: At_Roots__P Parameter: Age (day) Value: 7 vs. 21
  misc_feature: MA Experiment 20000185 PARAMETER Experiment Name: At_Roots__P Parameter: Organism Value: A. thaliana
  misc_feature: MA Experiment 20000185 PARAMETER Experiment Name: At_Roots__P Parameter: Tissue Value: Roots vs. Whole Plant
  misc_feature: MA Experiment ID: 20000224 Result: Up-regulated in Transcription
  misc_feature: MA Experiment ID: 20000439 Result: Down-regulated in Transcription
  misc_feature: MA Experiment 20000439 PARAMETER Experiment Name: At_Roots__P Parameter: Age (day) Value: 14 vs. 21
  misc_feature: MA Experiment 20000439 PARAMETER Experiment Name: At_Roots__P Parameter: Organism Value: A. thaliana
  misc_feature: MA Experiment 20000439 PARAMETER Experiment Name: At_Roots__P Parameter: Tissue Value: Roots vs. Whole Plant
gtactcagtacttacatcttcttcatctgacgatagcaaaaatgacaagcaatccctaatttcgcctcaaaaaatcccaaaaagcttcgttcttttttagtcatcatcatcttcttcttttcttcttcttcggttgctaaatcgaagatggcgactgctctggtttctcctcttacttcacaactcaaccatgaagctgtctgttccaagtttgtgttacccaaatcgccgttcatgtcgggatctaagctcttttcatcgaacatgccttgctctactgttcctagacgcacaagaagatcacactgctttgcttctgctaaagatatgagctttgaccatatccctaaacaatttcgtggagacaatctcaaagacggagtgatgcagaacttcaagaacgtaccacaatatttttacgggcttaattcagctcaaatggatatgttcatgacagaagatagccctgtccgtaggcaagcggaaaaagttacagaggaaagcatctcgtctagaaataactatttgaacaatggaggaatatggagtatgtccggtatgaatgcagcagatgctagaagatatagcatgagtgtccagatgtacagaggtggaggtggcggcggaggatctgaaagaccaagaactgctcctccagatttgccttctttgctattggatgctcgcatatgctaccttggcatgccaatcgtacctgcagttactgagttactcgttgctcaatttatgtggttagactatgataacccaacaaagcccatctacttatatataaattcacccgggacccagaatgagaagatggaaactgttggatcagaaacagaggcttatgccatagccgatactatttcttattgcaaatcagatgtatacactatcaattgtggcatggcttttggtcaagcagcaatgcttctttctctcgggaaaaaaggttatcgtgccgtacaaccacattcatcaacaaaattatatctgccaaaagtaaacagatcgagtggagctgccatagacatgtggataaaggccaaggaacttgatgcaaataccgagtactacatcgagctgttagctaagggaacagggaaatccaaagagcagatcaacgaggacatcaagcgacctaaatatctccaagctcaagcagccattgactatggaattgcagacaagatagctgactcgcaggacagttctttcgagaaacgggattacgatgggacccttgcccagagagctatgagacctggaggaggcagtccagcagctccagccggactaagatgatcaattcccaccagaaagaaagaggttgaatcctaatttcctagtcactctggaatatgtagctcttacaatctataagcaaacacatgtggtagtaacatacaaaaaagtgttggcaaaagggaaataacatcaaagttatctaggtggaaagttatttgtatt

SEQ ID NO: 21252 - protein, 387 aa, Arabidopsis thaliana
  peptide (1)..(387): Ceres Seq. ID no. 13497512
  misc_feature (160)..(355): Pfam Name: Clp protease Pfam Description: Clp protease
  misc_feature (1)..(387): Homolog of NCBI NO: 18402863 NR Description: ATP-dependent Clp protease proteolytic subunit
  misc_feature (160)..(355): Homolog of NCBI NO: 33866182 NR Description: ATP-dependent Clp protease proteolytic subunit 4
  misc_feature (160)..(355): Homolog of NCBI NO: 33862588 NR Description: Clp protease proteolytic subunit
  misc_feature (161)..(356): Homolog of NCBI NO: 23126723 NR Description: hypothetical protein [Nostoc punctiforme]
  misc_feature (160)..(355): Homolog of NCBI NO: 33861869 NR Description: Clp protease proteolytic subunit
  misc_feature (161)..(356): Homolog of NCBI NO: 17231850 NR Description: ATP-dependent Clp protease proteolytic subunit
  misc_feature (160)..(355): Homolog of NCBI NO: 33240836 NR Description: Protease subunit of ATP-dependent Clp protease
  misc_feature (164)..(351): Homolog of NCBI NO: 18390982 NR Description: ATP-dependent Clp protease proteolytic subunit
  misc_feature (166)..(355): Homolog of NCBI NO: 22299302 NR Description: ATP-dependent Clp protease proteolytic subunit 3
  misc_feature (169)..(364): Homolog of NCBI NO: 13812146 NR Description: ATP-dependent Clp protease proteolytic subunit
MATALVSPLTSQLNHEAVCSKFVLPKSPFMSGSKLFSSNMPCSTVPRRTRRSHCFASAKDMSFDHIPKQFRGDNLKDGVMQNFKNVPQYFYGLNSAQMDMFMTEDSPVRRQAEKVTEESISSRNNYLNNGGIWSMSGMNAADARRYSMSVQMYRGGGGGGGSERPRTAPPDLPSLLLDARICYLGMPIVPAVTELLVAQFMWLDYDNPTKPIYLYINSPGTQNEKMETVGSETEAYAIADTISYCKSDVYTINCGMAFGQAAMLLSLGKKGYRAVQPHSSTKLYLPKVNRSSGAAIDMWIKAKELDANTEYYIELLAKGTGKSKEQINEDIKRPKYLQAQAAIDYGIADKIADSQDSSFEKRDYDGTLAQRAMRPGGGSPAAPAGLR

SEQ ID NO: 21253 - protein, 358 aa, Arabidopsis thaliana
  peptide (1)..(358): Ceres Seq. ID no. 13497513
  misc_feature (131)..(326): Pfam Name: Clp protease Pfam Description: Clp protease
  misc_feature (131)..(326): Homolog of NCBI NO: 33866182 NR Description: ATP-dependent Clp protease proteolytic subunit 4
  misc_feature (131)..(326): Homolog of NCBI NO: 33862588 NR Description: Clp protease proteolytic subunit
  misc_feature (132)..(327): Homolog of NCBI NO: 23126723 NR Description: hypothetical protein [Nostoc punctiforme]
  misc_feature (131)..(326): Homolog of NCBI NO: 33861869 NR Description: Clp protease proteolytic subunit
  misc_feature (132)..(327): Homolog of NCBI NO: 17231850 NR Description: ATP-dependent Clp protease proteolytic subunit
  misc_feature (131)..(326): Homolog of NCBI NO: 33240836 NR Description: Protease subunit of ATP-dependent Clp protease
  misc_feature (135)..(322): Homolog of NCBI NO: 18390982 NR Description: ATP-dependent Clp protease proteolytic subunit
  misc_feature (137)..(326): Homolog of NCBI NO: 22299302 NR Description: ATP-dependent Clp protease proteolytic subunit 3
  misc_feature (140)..(335): Homolog of NCBI NO: 13812146 NR Description: ATP-dependent Clp protease proteolytic subunit
  misc_feature (1)..(358): Homolog of NCBI NO: 18402863 NR Description: ATP-dependent Clp protease proteolytic subunit
MSGSKLFSSNMPCSTVPRRTRRSHCFASAKDMSFDHIPKQFRGDNLKDGVMQNFKNVPQYFYGLNSAQMDMFMTEDSPVRRQAEKVTEESISSRNNYLNNGGIWSMSGMNAADARRYSMSVQMYRGGGGGGGSERPRTAPPDLPSLLLDARICYLGMPIVPAVTELLVAQFMWLDYDNPTKPIYLYINSPGTQNEKMETVGSETEAYAIADTISYCKSDVYTINCGMAFGQAAMLLSLGKKGYRAVQPHSSTKLYLPKVNRSSGAAIDMWIKAKELDANTEYYIELLAKGTGKSKEQINEDIKRPKYLQAQAAIDYGIADKIADSQDSSFEKRDYDGTLAQRAMRPGGGSPAAPAGLR

SEQ ID NO: 21254 - protein, 348 aa, Arabidopsis thaliana
  peptide (1)..(348): Ceres Seq. ID no. 13497514
  misc_feature (121)..(316): Pfam Name: Clp protease Pfam Description: Clp protease
  misc_feature (121)..(316): Homolog of NCBI NO: 33866182 NR Description: ATP-dependent Clp protease proteolytic subunit 4
  misc_feature (121)..(316): Homolog of NCBI NO: 33862588 NR Description: Clp protease proteolytic subunit
  misc_feature (122)..(317): Homolog of NCBI NO: 23126723 NR Description: hypothetical protein [Nostoc punctiforme]
  misc_feature (121)..(316): Homolog of NCBI NO: 33861869 NR Description: Clp protease proteolytic subunit
  misc_feature (122)..(317): Homolog of NCBI NO: 17231850 NR Description: ATP-dependent Clp protease proteolytic subunit
  misc_feature (121)..(316): Homolog of NCBI NO: 33240836 NR Description: Protease subunit of ATP-dependent Clp protease
  misc_feature (125)..(312): Homolog of NCBI NO: 18390982 NR Description: ATP-dependent Clp protease proteolytic subunit
  misc_feature (127)..(316): Homolog of NCBI NO: 22299302 NR Description: ATP-dependent Clp protease proteolytic subunit 3
  misc_feature (130)..(325): Homolog of NCBI NO: 13812146 NR Description: ATP-dependent Clp protease proteolytic subunit
  misc_feature (1)..(348): Homolog of NCBI NO: 18402863 NR Description: ATP-dependent Clp protease proteolytic subunit
MPCSTVPRRTRRSHCFASAKDMSFDHIPKQFRGDNLKDGVMQNFKNVPQYFYGLNSAQMDMFMTEDSPVRRQAEKVTEESISSRNNYLNNGGIWSMSGMNAADARRYSMSVQMYRGGGGGGGSERPRTAPPDLPSLLLDARICYLGMPIVPAVTELLVAQFMWLDYDNPTKPIYLYINSPGTQNEKMETVGSETEAYAIADTISYCKSDVYTINCGMAFGQAAMLLSLGKKGYRAVQPHSSTKLYLPKVNRSSGAAIDMWIKAKELDANTEYYIELLAKGTGKSKEQINEDIKRPKYLQAQAAIDYGIADKIADSQDSSFEKRDYDGTLAQRAMRPGGGSPAAPAGLR

SEQ ID NO: 21255 - DNA, 1302 bp, Arabidopsis thaliana
  misc_feature (1)..(1302): Ceres Seq. ID no. 12334951
  misc_feature: MA Experiment ID: 108434 Result: Down-regulated in Transcription
  misc_feature: MA Experiment 108434 PARAMETER Experiment Name: At_Root_Tips_cDNA_P Parameter: Tissue Value: Root Tips
  misc_feature: MA Experiment ID: 108464 Result: Up-regulated in Transcription
  misc_feature: MA Experiment 108464 PARAMETER Experiment Name: At_Germinating_Seeds_cDNA_P Parameter: Age (day) Value: 4 vs. 0
  misc_feature: MA Experiment 108464 PARAMETER Experiment Name: At_Germinating_Seeds_cDNA_P Parameter: Tissue Value: Germinating Seeds
  misc_feature: MA Experiment ID: 108474 Result: Down-regulated in Transcription
  misc_feature: MA Experiment 108474 PARAMETER Experiment Name: At_Drought_Flowers_cDNA_P Parameter: Timepoint (hr) Value: null
  misc_feature: MA Experiment 108474 PARAMETER Experiment Name: At_Drought_Flowers_cDNA_P Parameter: Treatment Value: Drought vs. No Drought
  misc_feature: MA Experiment ID: 108488 Result: Down-regulated in Transcription
  misc_feature: MA Experiment ID: 108489 Result: Up-regulated in Transcription
  misc_feature: MA Experiment ID: 108561 Result: Up-regulated in Transcription
  misc_feature: MA Experiment 108561 PARAMETER Experiment Name: At_100uM_ABA_cDNA_P Parameter: Timepoint (hr) Value: 6
  misc_feature: MA Experiment 108561 PARAMETER Experiment Name: At_100uM_ABA_cDNA_P Parameter: Tissue Value: Aerial
  misc_feature: MA Experiment 108561 PARAMETER Experiment Name: At_100uM_ABA_cDNA_P Parameter: Treatment Value: 100uM ABA vs. No Treatment
  misc_feature: MA Experiment ID: 108569 Result: Up-regulated in Transcription
  misc_feature: MA Experiment 108569 PARAMETER Experiment Name: At_0.001%_MeJA__cDNA_P Parameter: Timepoint (hr) Value: 6
  misc_feature: MA Experiment 108569 PARAMETER Experiment Name: At_0.001%_MeJA__cDNA_P Parameter: Tissue Value: Aerial
  misc_feature: MA Experiment 108569 PARAMETER Experiment Name: At_0.001%_MeJA__cDNA_P Parameter: Treatment Value: 0.001% MeJA vs. No Treatment
  misc_feature: MA Experiment ID: 108572 Result: Up-regulated in Transcription
  misc_feature: MA Experiment 108572 PARAMETER Experiment Name: At_Drought_cDNA_P Parameter: Timepoint (hr) Value: 1
  misc_feature: MA Experiment 108572 PARAMETER Experiment Name: At_Drought_cDNA_P Parameter: Tissue Value: Aerial
  misc_feature: MA Experiment 108572 PARAMETER Experiment Name: At_Drought_cDNA_P Parameter: Treatment Value: Drought vs. No Drought
  misc_feature: MA Experiment ID: 108573 Result: Up-regulated in Transcription
  misc_feature: MA Experiment 108573 PARAMETER Experiment Name: At_Drought_cDNA_P Parameter: Timepoint (hr) Value: 6
  misc_feature: MA Experiment 108573 PARAMETER Experiment Name: At_Drought_cDNA_P Parameter: Tissue Value: Aerial
  misc_feature: MA Experiment 108573 PARAMETER Experiment Name: At_Drought_cDNA_P Parameter: Treatment Value: Drought vs. No Drought
  misc_feature: MA Experiment ID: 108585 Result: Up-regulated in Transcription
  misc_feature: MA Experiment 108585 PARAMETER Experiment Name: At_5mM_NaNP_cDNA_P Parameter: Timepoint (hr) Value: 6
  misc_feature: MA Experiment 108585 PARAMETER Experiment Name: At_5mM_NaNP_cDNA_P Parameter: Tissue Value: Aerial
  misc_feature: MA Experiment 108585 PARAMETER Experiment Name: At_5mM_NaNP_cDNA_P Parameter: Treatment Value: null
  misc_feature: MA Experiment ID: 108605 Result: Up-regulated in Transcription
  misc_feature: MA Experiment 108605 PARAMETER Experiment Name: At_100uM_ABA_cDNA_P Parameter: Timepoint (hr) Value: 6
  misc_feature: MA Experiment 108605 PARAMETER Experiment Name: At_100uM_ABA_cDNA_P Parameter: Tissue Value: Aerial
  misc_feature: MA Experiment 108605 PARAMETER Experiment Name: At_100uM_ABA_cDNA_P Parameter: Treatment Value: 100uM ABA vs. No Treatment
  misc_feature: MA Experiment ID: 108607 Result: Up-regulated in Transcription
  misc_feature: MA Experiment 108607 PARAMETER Experiment Name: At_100uM_ABA_cDNA_P Parameter: Timepoint (hr) Value: 4
  misc_feature: MA Experiment 108607 PARAMETER Experiment Name: At_100uM_ABA_cDNA_P Parameter: Tissue Value: Aerial
  misc_feature: MA Experiment 108607 PARAMETER Experiment Name: At_100uM_ABA_cDNA_P Parameter: Treatment Value: 100uM ABA vs. No Treatment
  misc_feature: MA Experiment ID: 108608 Result: Up-regulated in Transcription
  misc_feature: MA Experiment 108608 PARAMETER Experiment Name: At_100uM_ABA_cDNA_P Parameter: Timepoint (hr) Value: 1
  misc_feature: MA Experiment 108608 PARAMETER Experiment Name: At_100uM_ABA_cDNA_P Parameter: Tissue Value: Aerial
  misc_feature: MA Experiment 108608 PARAMETER Experiment Name: At_100uM_ABA_cDNA_P Parameter: Treatment Value: 100uM ABA vs. No Treatment
  misc_feature: MA Experiment ID: 20000069 Result: Up-regulated in Transcription
  misc_feature: MA Experiment 20000069 PARAMETER Experiment Name: At_100uM_ABA_Mutants_cDNA_P Parameter: Plant Line Value: CS23
  misc_feature: MA Experiment 20000069 PARAMETER Experiment Name: At_100uM_ABA_Mutants_cDNA_P Parameter: Timepoint (hr) Value: 6
  misc_feature: MA Experiment 20000069 PARAMETER Experiment Name: At_100uM_ABA_Mutants_cDNA_P Parameter: Tissue Value: Aerial
  misc_feature: MA Experiment 20000069 PARAMETER Experiment Name: At_100uM_ABA_Mutants_cDNA_P Parameter: Treatment Value: 100uM ABA vs. No Treatment
  misc_feature: MA Experiment ID: 20000070 Result: Up-regulated in Transcription
  misc_feature: MA Experiment 20000070 PARAMETER Experiment Name: At_100uM_ABA_Mutants_cDNA_P Parameter: Plant Line Value: CS24
  misc_feature: MA Experiment 20000070 PARAMETER Experiment Name: At_100uM_ABA_Mutants_cDNA_P Parameter: Timepoint (hr) Value: 6
  misc_feature: MA Experiment 20000070 PARAMETER Experiment Name: At_100uM_ABA_Mutants_cDNA_P Parameter: Tissue Value: Aerial
  misc_feature: MA Experiment 20000070 PARAMETER Experiment Name: At_100uM_ABA_Mutants_cDNA_P Parameter: Treatment Value: 100uM ABA vs. No Treatment
  misc_feature: MA Experiment ID: 20000071 Result: Up-regulated in Transcription
  misc_feature: MA Experiment 20000071 PARAMETER Experiment Name: At_100uM_ABA_Mutants_cDNA_P Parameter: Plant Line Value: CS8104
  misc_feature: MA Experiment 20000071 PARAMETER Experiment Name: At_100uM_ABA_Mutants_cDNA_P Parameter: Timepoint (hr) Value: 6
  misc_feature: MA Experiment 20000071 PARAMETER Experiment Name: At_100uM_ABA_Mutants_cDNA_P Parameter: Tissue Value: Aerial
  misc_feature: MA Experiment 20000071 PARAMETER Experiment Name: At_100uM_ABA_Mutants_cDNA_P Parameter: Treatment Value: 100uM ABA vs. No Treatment
  misc_feature: MA Experiment ID: 20000072 Result: Up-regulated in Transcription
  misc_feature: MA Experiment 20000072 PARAMETER Experiment Name: At_100uM_ABA_Mutants_cDNA_P Parameter: Plant Line Value: CS8105
  misc_feature: MA Experiment 20000072 PARAMETER Experiment Name: At_100uM_ABA_Mutants_cDNA_P Parameter: Timepoint (hr) Value: 6
  misc_feature: MA Experiment 20000072 PARAMETER Experiment Name: At_100uM_ABA_Mutants_cDNA_P Parameter: Tissue Value: Aerial
  misc_feature: MA Experiment 20000072 PARAMETER Experiment Name: At_100uM_ABA_Mutants_cDNA_P Parameter: Treatment Value: 100uM ABA vs. No Treatment
  misc_feature: MA Experiment ID: 20000086 Result: Up-regulated in Transcription
  misc_feature: MA Experiment 20000086 PARAMETER Experiment Name: At_100uM_ABA_Mutants_cDNA_P Parameter: Plant Line Value: CS22
  misc_feature: MA Experiment 20000086 PARAMETER Experiment Name: At_100uM_ABA_Mutants_cDNA_P Parameter: Timepoint (hr) Value: 6
  misc_feature: MA Experiment 20000086 PARAMETER Experiment Name: At_100uM_ABA_Mutants_cDNA_P Parameter: Tissue Value: Aerial
  misc_feature: MA Experiment 20000086 PARAMETER Experiment Name: At_100uM_ABA_Mutants_cDNA_P Parameter: Treatment Value: 100uM ABA vs. No Treatment
  misc_feature: MA Experiment ID: 20000088 Result: Up-regulated in Transcription
  misc_feature: MA Experiment 20000088 PARAMETER Experiment Name: At_100uM_ABA_Mutants_cDNA_P Parameter: Plant Line Value: Landsberg
  misc_feature: MA Experiment 20000088 PARAMETER Experiment Name: At_100uM_ABA_Mutants_cDNA_P Parameter: Timepoint (hr) Value: 6
  misc_feature: MA Experiment 20000088 PARAMETER Experiment Name: At_100uM_ABA_Mutants_cDNA_P Parameter: Tissue Value: Aerial
  misc_feature: MA Experiment 20000088 PARAMETER Experiment Name: At_100uM_ABA_Mutants_cDNA_P Parameter: Treatment Value: 100uM ABA vs. No Treatment
  misc_feature: MA Experiment ID: 20000090 Result: Down-regulated in Transcription
  misc_feature: MA Experiment ID: 20000117 Result: Up-regulated in Transcription
  misc_feature: MA Experiment 20000117 PARAMETER Experiment Name: At_100uM_ABA_Mutants_cDNA_P Parameter: Plant Line Value: Columbia
  misc_feature: MA Experiment 20000117 PARAMETER Experiment Name: At_100uM_ABA_Mutants_cDNA_P Parameter: Timepoint (hr) Value: 6
  misc_feature: MA Experiment 20000117 PARAMETER Experiment Name: At_100uM_ABA_Mutants_cDNA_P Parameter: Tissue Value: Aerial
  misc_feature: MA Experiment 20000117 PARAMETER Experiment Name: At_100uM_ABA_Mutants_cDNA_P Parameter: Treatment Value: 100uM ABA vs. No Treatment
  misc_feature: MA Experiment ID: 20000166 Result: Up-regulated in Transcription
  misc_feature: MA Experiment 20000166 PARAMETER Experiment Name: At_100uM_ABA_P Parameter: Age (day) Value: 14
  misc_feature: MA Experiment 20000166 PARAMETER Experiment Name: At_100uM_ABA_P Parameter: Organism Value: A. thaliana
  misc_feature: MA Experiment 20000166 PARAMETER Experiment Name: At_100uM_ABA_P Parameter: Plant Line Value: WS
  misc_feature: MA Experiment 20000166 PARAMETER Experiment Name: At_100uM_ABA_P Parameter: Timepoint (hr) Value: 1
  misc_feature: MA Experiment 20000166 PARAMETER Experiment Name: At_100uM_ABA_P Parameter: Tissue Value: Aerial
  misc_feature: MA Experiment 20000166 PARAMETER Experiment Name: At_100uM_ABA_P Parameter: Treatment Value: 100uM ABA vs. No Treatment
  misc_feature: MA Experiment ID: 20000169 Result: Up-regulated in Transcription
  misc_feature: MA Experiment 20000169 PARAMETER Experiment Name: At_100uM_ABA_P Parameter: Age (day) Value: 14
  misc_feature: MA Experiment 20000169 PARAMETER Experiment Name: At_100uM_ABA_P Parameter: Organism Value: A. thaliana
  misc_feature: MA Experiment 20000169 PARAMETER Experiment Name: At_100uM_ABA_P Parameter: Plant Line Value: WS
  misc_feature: MA Experiment 20000169 PARAMETER Experiment Name: At_100uM_ABA_P Parameter: Timepoint (hr) Value: 6
  misc_feature: MA Experiment 20000169 PARAMETER Experiment Name: At_100uM_ABA_P Parameter: Tissue Value: Aerial
  misc_feature: MA Experiment 20000169 PARAMETER Experiment Name: At_100uM_ABA_P Parameter: Treatment Value: 100uM ABA vs. No Treatment
  misc_feature: MA Experiment ID: 20000182 Result: Up-regulated in Transcription
  misc_feature: MA Experiment 20000182 PARAMETER Experiment Name: At_2mM_SA_P Parameter: Age (day) Value: 14
  misc_feature: MA Experiment 20000182 PARAMETER Experiment Name: At_2mM_SA_P Parameter: Organism Value: A. thaliana
  misc_feature: MA Experiment 20000182 PARAMETER Experiment Name: At_2mM_SA_P Parameter: Plant Line Value: WS
  misc_feature: MA Experiment 20000182 PARAMETER Experiment Name: At_2mM_SA_P Parameter: Timepoint (hr) Value: 6
  misc_feature: MA Experiment 20000182 PARAMETER Experiment Name: At_2mM_SA_P Parameter: Tissue Value: Aerial
  misc_feature: MA Experiment 20000182 PARAMETER Experiment Name: At_2mM_SA_P Parameter: Treatment Value: 2mM SA vs. No Treatment
  misc_feature: MA Experiment ID: 20000184 Result: Down-regulated in Transcription
  misc_feature: MA Experiment 20000184 PARAMETER Experiment Name: At_Shoots__P Parameter: Age (day) Value: 7
  misc_feature: MA Experiment 20000184 PARAMETER Experiment Name: At_Shoots__P Parameter: Tissue Value: Shoots vs. Whole Plant
  misc_feature: MA Experiment ID: 20000185 Result: Down-regulated in Transcription
  misc_feature: MA Experiment 20000185 PARAMETER Experiment Name: At_Roots__P Parameter: Age (day) Value: 7 vs. 21
  misc_feature: MA Experiment 20000185 PARAMETER Experiment Name: At_Roots__P Parameter: Organism Value: A. thaliana
  misc_feature: MA Experiment 20000185 PARAMETER Experiment Name: At_Roots__P Parameter: Tissue Value: Roots vs. Whole Plant
  misc_feature: MA Experiment ID: 20000227 Result: Down-regulated in Transcription
  misc_feature: MA Experiment 20000227 PARAMETER Experiment Name: At_Root-Tips-vs-Tops_P Parameter: Tissue Value: Root Tips vs. Root Tops
  misc_feature: MA Experiment ID: 20000234 Result: Down-regulated in Transcription
  misc_feature: MA Experiment 20000234 PARAMETER Experiment Name: At_Siliques_P Parameter: Age (day) Value: 21
  misc_feature: MA Experiment 20000234 PARAMETER Experiment Name: At_Siliques_P Parameter: Organism Value: A. thaliana
  misc_feature: MA Experiment 20000234 PARAMETER Experiment Name: At_Siliques_P Parameter: Plant Line Value: WS
  misc_feature: MA Experiment 20000234 PARAMETER Experiment Name: At_Siliques_P Parameter: Tissue Value: Less Than 5mm Siliques vs. Whole Plant
  misc_feature: MA Experiment ID: 20000437 Result: Up-regulated in Transcription
  misc_feature: MA Experiment 20000437 PARAMETER Experiment Name: At_Drought_P Parameter: Age (day) Value: 8
  misc_feature: MA Experiment 20000437 PARAMETER Experiment Name: At_Drought_P Parameter: Organism Value: A. thaliana
  misc_feature: MA Experiment 20000437 PARAMETER Experiment Name: At_Drought_P Parameter: Plant Line Value: WS
  misc_feature: MA Experiment 20000437 PARAMETER Experiment Name: At_Drought_P Parameter: Timepoint (hr) Value: 24
  misc_feature: MA Experiment 20000437 PARAMETER Experiment Name: At_Drought_P Parameter: Tissue Value: Whole Plant
  misc_feature: MA Experiment 20000437 PARAMETER Experiment Name: At_Drought_P Parameter: Treatment Value: Drought vs. No Drought
  misc_feature: MA Experiment ID: 20000438 Result: Down-regulated in Transcription
  misc_feature: MA Experiment 20000438 PARAMETER Experiment Name: At_Shoots__P Parameter: Age (day) Value: 14
  misc_feature: MA Experiment 20000438 PARAMETER Experiment Name: At_Shoots__P Parameter: Tissue Value: Shoots vs. Whole Plant
  misc_feature: MA Experiment ID: 20000439 Result: Down-regulated in Transcription
  misc_feature: MA Experiment 20000439 PARAMETER Experiment Name: At_Roots__P Parameter: Age (day) Value: 14 vs. 21
  misc_feature: MA Experiment 20000439 PARAMETER Experiment Name: At_Roots__P Parameter: Organism Value: A. thaliana
  misc_feature: MA Experiment 20000439 PARAMETER Experiment Name: At_Roots__P Parameter: Tissue Value: Roots vs. Whole Plant
  misc_feature: MA Experiment ID: 20000527 Result: Down-regulated in Transcription
  misc_feature: MA Experiment 20000527 PARAMETER Experiment Name: At_10percent_PEG_P Parameter: Age (day) Value: 20
  misc_feature: MA Experiment 20000527 PARAMETER Experiment Name: At_10percent_PEG_P Parameter: Organism Value: A. thaliana
  misc_feature: MA Experiment 20000527 PARAMETER Experiment Name: At_10percent_PEG_P Parameter: Plant Line Value: WS
  misc_feature: MA Experiment 20000527 PARAMETER Experiment Name: At_10percent_PEG_P Parameter: Timepoint (day) Value: 20
  misc_feature: MA Experiment 20000527 PARAMETER Experiment Name: At_10percent_PEG_P Parameter: Tissue Value: Whole Plant
  misc_feature: MA Experiment 20000527 PARAMETER Experiment Name: At_10percent_PEG_P Parameter: Treatment Value: 10percent PEG vs. No Treatment
  misc_feature: MA Experiment ID: 20000794 Result: Up-regulated in Transcription
  misc_feature: MA Experiment 20000794 PARAMETER Experiment Name: At_Petals_P Parameter: Age (day) Value: 23-25 days
  misc_feature: MA Experiment 20000794 PARAMETER Experiment Name: At_Petals_P Parameter: Plant Line Value: WS
  misc_feature: MA Experiment 20000794 PARAMETER Experiment Name: At_Petals_P Parameter: Tissue Value: Petals vs. Whole plant
  misc_feature: MA Experiment ID: 20001451 Result: Up-regulated in Transcription
  misc_feature: MA Experiment 20001451 PARAMETER Experiment Name: At_Far-red-induction_P Parameter: Age (day) Value: 7
  misc_feature: MA Experiment 20001451 PARAMETER Experiment Name: At_Far-red-induction_P Parameter: Light Value: Far-red vs. White
  misc_feature: MA Experiment 20001451 PARAMETER Experiment Name: At_Far-red-induction_P Parameter: Organism Value: A. thaliana
  misc_feature: MA Experiment 20001451 PARAMETER Experiment Name: At_Far-red-induction_P Parameter: Plant Line Value: Columbia
  misc_feature: MA Experiment 20001451 PARAMETER Experiment Name: At_Far-red-induction_P Parameter: Timepoint (hr) Value: 24
  misc_feature: MA Experiment 20001451 PARAMETER Experiment Name: At_Far-red-induction_P Parameter: Tissue Value: Whole Plant
  misc_feature: MA Experiment ID: 20001554 Result: Up-regulated in Transcription
  misc_feature: MA Experiment 20001554 PARAMETER Experiment Name: At_Drought_Soil_Dry_P Parameter: Age (day) Value: 21
  misc_feature: MA Experiment 20001554 PARAMETER Experiment Name: At_Drought_Soil_Dry_P Parameter: Organism Value: A. thaliana
  misc_feature: MA Experiment 20001554 PARAMETER Experiment Name: At_Drought_Soil_Dry_P Parameter: Plant Line Value: WS
  misc_feature: MA Experiment 20001554 PARAMETER Experiment Name: At_Drought_Soil_Dry_P Parameter: Post Timepoint (hr) Value: None
  misc_feature: MA Experiment 20001554 PARAMETER Experiment Name: At_Drought_Soil_Dry_P Parameter: Post-Treatment Value: None
  misc_feature: MA Experiment 20001554 PARAMETER Experiment Name: At_Drought_Soil_Dry_P Parameter: Timepoint (day) Value: 7
  misc_feature: MA Experiment 20001554 PARAMETER Experiment Name: At_Drought_Soil_Dry_P Parameter: Treatment Value: Drought vs. No Drought
  misc_feature: MA Experiment ID: 20001555 Result: Up-regulated in Transcription
  misc_feature: MA Experiment 20001555 PARAMETER Experiment Name: At_Drought_Soil_Dry_P Parameter: Age (day) Value: 24
  misc_feature: MA Experiment 20001555 PARAMETER Experiment Name: At_Drought_Soil_Dry_P Parameter: Organism Value: A. thaliana
  misc_feature: MA Experiment 20001555 PARAMETER Experiment Name: At_Drought_Soil_Dry_P Parameter: Plant Line Value: WS
  misc_feature: MA Experiment 20001555 PARAMETER Experiment Name: At_Drought_Soil_Dry_P Parameter: Post Timepoint (hr) Value: None
  misc_feature: MA Experiment 20001555 PARAMETER Experiment Name: At_Drought_Soil_Dry_P Parameter: Post-Treatment Value: None
  misc_feature: MA Experiment 20001555 PARAMETER Experiment Name: At_Drought_Soil_Dry_P Parameter: Timepoint (day) Value: 10
  misc_feature: MA Experiment 20001555 PARAMETER Experiment Name: At_Drought_Soil_Dry_P Parameter: Treatment Value: Drought vs. No Drought
  misc_feature: MA Experiment ID: 20001558 Result: Down-regulated in Transcription
  misc_feature: MA Experiment 20001558 PARAMETER Experiment Name: At_Drought_Soil_Dry_P Parameter: Age (day) Value: 27
  misc_feature: MA Experiment 20001558 PARAMETER Experiment Name: At_Drought_Soil_Dry_P Parameter: Organism Value: A. thaliana
  misc_feature: MA Experiment 20001558 PARAMETER Experiment Name: At_Drought_Soil_Dry_P Parameter: Plant Line Value: WS
  misc_feature: MA Experiment 20001558 PARAMETER Experiment Name: At_Drought_Soil_Dry_P Parameter: Post Timepoint (hr) Value: 6
  misc_feature: MA Experiment 20001558 PARAMETER Experiment Name: At_Drought_Soil_Dry_P Parameter: Post-Treatment Value: Re-Water vs. No Drought
  misc_feature: MA Experiment 20001558 PARAMETER Experiment Name: At_Drought_Soil_Dry_P Parameter: Timepoint (day) Value: 13
  misc_feature: MA Experiment 20001558 PARAMETER Experiment Name: At_Drought_Soil_Dry_P Parameter: Treatment Value: Drought vs. No Drought
  misc_feature: MA Experiment ID: 20001757 Result: Down-regulated in Transcription
  misc_feature: MA Experiment 20001757 PARAMETER Experiment Name: At_50mM_NH4NO3_L-to-H_P Parameter: Timepoint (hr) Value: 6
  misc_feature: MA Experiment 20001757 PARAMETER Experiment Name: At_50mM_NH4NO3_L-to-H_P Parameter: Tissue Value: Leaf
  misc_feature: MA Experiment 20001757 PARAMETER Experiment Name: At_50mM_NH4NO3_L-to-H_P Parameter: Treatment Value: 50mM NH4NO3 vs 100mM Mannitol
aagaaccaactcaatacgcatcacaaagaaccctaaattcctggaagatctcaaaaggaaaattcaaaaccaaagcttcaagcaatcatcaagcaaaggaaaagctcaaattttgggtcttttatatatttatttcataaagttacaatctttttgattgtggtttcagtgtacgaacacgcaagaactcgcgtgaaaaaattgtatccaagcttcgtgaaaggagtctctctgtatttagtggcgttttgttctgttgttatttctgaaatattgaagcttttgatttgggtttcaagagagcagagatgtgtagtttgtcggcgattatgttgttaccaacgaagctgaaaccagcttattcagacaaacggagtaacagtagcagcagcagctcactcttcttcaacaatagaagatccaagaagaagaaccaatcgattgttcccgttgcaaggttgtttggaccggcgattttcgaatcatccaaattgaaagtactcttcttaggggttgatgagaagaagcatccttcaacgctccctaggacttacacactcactcacagtgacattacagctaaactaaccttagctatttctcaatccataaacaactctcagttgcaaggatgggcaaataggctataccgggatgaagttgtggcagaatggaagaaagtgaaagggaaaatgtcgcttcacgttcattgtcacataagcggtggccatttccttttagatctctttgcaaagtttcgatatttcatcttttgcaaagaactacctgtggtgttgaaggcttttgtgcatggagatgggaacttgttgaacaactatcctgagctacaagaagctcttgtttgggtctatttccattctaatgtcaatgagttcaacaaagtcgagtgttggggtccgctttgggaagctgtttcgcctgatggtcacaagactgagactcttcccgaggctcggtgtgcggacgagtgtagttgttgttttccaaccgttagctcgattccatggtctcatagtcttagtaatgaaggtgtaaatggttactctgggactcagactgagggaattgctactccaaatccggagaaactctagtgactaaatatcaaattacaagtttttcttttggtagtttgtacaaagtgaaaaggaaatggcaggactttccttttggtggatctaaatattggtttggtttggtgtacataatgtggtataggaaaataatgattatttgtaggttaaatacagattttaaagtttcaaatggtattttgtgtct

SEQ ID NO: 21256 - protein, 268 aa, Arabidopsis thaliana
  peptide (1)..(268): Ceres Seq. ID no. 12334952
  misc_feature (56)..(210): Homolog of NCBI NO: 18311568 NR Description: hypothetical protein [Clostridium perfringens]
  misc_feature (56)..(203): Homolog of NCBI NO: 15896657 NR Description: Uncharacterized protein, homolog of YYBI fused to uncharacterized domain similar to A.thaliana (gi:3292817
  misc_feature (49)..(183): Homolog of NCBI NO: 38567838 NR Description: OSJNBb0020J19.16 [Oryza sativa (japonica
  misc_feature (42)..(208): Homolog of NCBI NO: 18401163 NR Description: expressed protein
  misc_feature (42)..(208): Homolog of NCBI NO: 8778672 NR Description: F9C16.20 [Arabidopsis thaliana]
  misc_feature (48)..(243): Homolog of NCBI NO: 15234348 NR Description: putative protein; protein id: At4g11910.1
  misc_feature (1)..(238): Homolog of NCBI NO: 15234348 NR Description: putative protein; protein id: At4g11910.1
  misc_feature (1)..(268): Homolog of NCBI NO: 21592527 NR Description: unknown [Arabidopsis thaliana]
  misc_feature (1)..(268): Homolog of NCBI NO: 18416035 NR Description: expressed protein
MCSLSAIMLLPTKLKPAYSDKRSNSSSSSSLFFNNRRSKKKNQSIVPVARLFGPAIFESSKLKVLFLGVDEKKHPSTLPRTYTLTHSDITAKLTLAISQSINNSQLQGWANRLYRDEVVAEWKKVKGKMSLHVHCHISGGHFLLDLFAKFRYFIFCKELPVVLKAFVHGDGNLLNNYPELQEALVWVYFHSNVNEFNKVECWGPLWEAVSPDGHKTETLPEARCADECSCCFPTVSSIPWSHSLSNEGVNGYSGTQTEGIATPNPEKL

SEQ ID NO: 21257 - protein, 261 aa, Arabidopsis thaliana
  peptide (1)..(261): Ceres Seq. ID no. 12334953
  misc_feature (49)..(203): Homolog of NCBI NO: 18311568 NR Description: hypothetical protein [Clostridium perfringens]
  misc_feature (49)..(196): Homolog of NCBI NO: 15896657 NR Description: Uncharacterized protein, homolog of YYBI fused to uncharacterized domain similar to A.thaliana (gi:3292817
  misc_feature (42)..(176): Homolog of NCBI NO: 38567838 NR Description: OSJNBb0020J19.16 [Oryza sativa (japonica
  misc_feature (35)..(201): Homolog of NCBI NO: 18401163 NR Description: expressed protein
  misc_feature (35)..(201): Homolog of NCBI NO: 8778672 NR Description: F9C16.20 [Arabidopsis thaliana]
  misc_feature (41)..(236): Homolog of NCBI NO: 15234348 NR Description: putative protein; protein id: At4g11910.1
  misc_feature (1)..(231): Homolog of NCBI NO: 15234348 NR Description: putative protein; protein id: At4g11910.1
  misc_feature (1)..(261): Homolog of NCBI NO: 21592527 NR Description: unknown [Arabidopsis thaliana]
  misc_feature (1)..(261): Homolog of NCBI NO: 18416035 NR Description: expressed protein
MLLPTKLKPAYSDKRSNSSSSSSLFFNNRRSKKKNQSIVPVARLFGPAIFESSKLKVLFLGVDEKKHPSTLPRTYTLTHSDITAKLTLAISQSINNSQLQGWANRLYRDEVVAEWKKVKGKMSLHVHCHISGGHFLLDLFAKFRYFIFCKELPVVLKAFVHGDGNLLNNYPELQEALVWVYFHSNVNEFNKVECWGPLWEAVSPDGHKTETLPEARCADECSCCFPTVSSIPWSHSLSNEGVNGYSGTQTEGIATPNPEKL

SEQ ID NO: 21258 - protein, 140 aa, Arabidopsis thaliana
  peptide (1)..(140): Ceres Seq. ID no. 12334954
  misc_feature (1)..(82): Homolog of NCBI NO: 18311568 NR Description: hypothetical protein [Clostridium perfringens]
  misc_feature (1)..(75): Homolog of NCBI NO: 15896657 NR Description: Uncharacterized protein, homolog of YYBI fused to uncharacterized domain similar to A.thaliana (gi:3292817
  misc_feature (1)..(55): Homolog of NCBI NO: 38567838 NR Description: OSJNBb0020J19.16 [Oryza sativa (japonica
  misc_feature (1)..(80): Homolog of NCBI NO: 18401163 NR Description: expressed protein
  misc_feature (1)..(80): Homolog of NCBI NO: 8778672 NR Description: F9C16.20 [Arabidopsis thaliana]
  misc_feature (1)..(115): Homolog of NCBI NO: 15234348 NR Description: putative protein; protein id: At4g11910.1
  misc_feature (1)..(110): Homolog of NCBI NO: 15234348 NR Description: putative protein; protein id: At4g11910.1
  misc_feature (1)..(140): Homolog of NCBI NO: 21592527 NR Description: unknown [Arabidopsis thaliana]
  misc_feature (1)..(140): Homolog of NCBI NO: 18416035 NR Description: expressed protein
MSLHVHCHISGGHFLLDLFAKFRYFIFCKELPVVLKAFVHGDGNLLNNYPELQEALVWVYFHSNVNEFNKVECWGPLWEAVSPDGHKTETLPEARCADECSCCFPTVSSIPWSHSLSNEGVNGYSGTQTEGIATPNPEKL

SEQ ID NO: 21259 - DNA, 1755 bp, Arabidopsis thaliana
  misc_feature (1)..(1755): Ceres Seq. ID no. 13488508
  misc_feature: MA Experiment ID: 108434 Result: Up-regulated in Transcription
  misc_feature: MA Experiment 108434 PARAMETER Experiment Name: At_Root_Tips_cDNA_P Parameter: Tissue Value: Root Tips
  misc_feature: MA Experiment ID: 108461 Result: Down-regulated in Transcription
  misc_feature: MA Experiment 108461 PARAMETER Experiment Name: At_Germinating_Seeds_cDNA_P Parameter: Age (day) Value: 1 vs. 0
  misc_feature: MA Experiment 108461 PARAMETER Experiment Name: At_Germinating_Seeds_cDNA_P Parameter: Tissue Value: Germinating Seeds
  misc_feature: MA Experiment ID: 108573 Result: Up-regulated in Transcription
  misc_feature: MA Experiment 108573 PARAMETER Experiment Name: At_Drought_cDNA_P Parameter: Timepoint (hr) Value: 6
  misc_feature: MA Experiment 108573 PARAMETER Experiment Name: At_Drought_cDNA_P Parameter: Tissue Value: Aerial
  misc_feature: MA Experiment 108573 PARAMETER Experiment Name: At_Drought_cDNA_P Parameter: Treatment Value: Drought vs. No Drought
  misc_feature: MA Experiment ID: 108579 Result: Down-regulated in Transcription
  misc_feature: MA Experiment 108579 PARAMETER Experiment Name: At_4deg_Cold_cDNA_P Parameter: Temperature (deg C) Value: 4 vs. 22
  misc_feature: MA Experiment 108579 PARAMETER Experiment Name: At_4deg_Cold_cDNA_P Parameter: Timepoint (hr) Value: 6
  misc_feature: MA Experiment 108579 PARAMETER Experiment Name: At_4deg_Cold_cDNA_P Parameter: Tissue Value: Aerial
  misc_feature: MA Experiment ID: 108595 Result: Down-regulated in Transcription
  misc_feature: MA Experiment 108595 PARAMETER Experiment Name: At_Ler-pi_Ovule_cDNA_P Parameter: Plant Line Value: null
  misc_feature: MA Experiment ID: 20000089 Result: Down-regulated in Transcription
  misc_feature: MA Experiment ID: 20000224 Result: Down-regulated in Transcription
  misc_feature: MA Experiment ID: 20000234 Result: Down-regulated in Transcription
  misc_feature: MA Experiment 20000234 PARAMETER Experiment Name: At_Siliques_P Parameter: Age (day) Value: 21
  misc_feature: MA Experiment 20000234 PARAMETER Experiment Name: At_Siliques_P Parameter: Organism Value: A. thaliana
  misc_feature: MA Experiment 20000234 PARAMETER Experiment Name: At_Siliques_P Parameter: Plant Line Value: WS
  misc_feature: MA Experiment 20000234 PARAMETER Experiment Name: At_Siliques_P Parameter: Tissue Value: Less Than 5mm Siliques vs. Whole Plant
  misc_feature: MA Experiment ID: 20000264 Result: Down-regulated in Transcription
  misc_feature: MA Experiment 20000264 PARAMETER Experiment Name: At_Open_Flower_P Parameter: Age (day) Value: 21
  misc_feature: MA Experiment 20000264 PARAMETER Experiment Name: At_Open_Flower_P Parameter: Plant Line Value: WS
  misc_feature: MA Experiment 20000264 PARAMETER Experiment Name: At_Open_Flower_P Parameter: Tissue Value: Open Flower vs. Whole Plant
gtcgcgattactctctttgagctctctctctctcttctaacatcggtcttgtattggtgcttattggatatctccggcgaaggaaacgagtttcgcggttagatttttctttatcgcttaccggcgaggatgatcgtttcttcggtaaggtcgattaatcggttctgttttcgaagatgttgttgttagagttagatccgcatggttttggtgatcgttttggatcgaagacgtggttccacagacgcaaaaaatgccgtcgtctcttgctttgagatttggcttctgaaatctttcctctttcgttctcgttgaatcctaatttttgttttgtcttttttagaaatttttggtctttctaatcctggggataggttacagtctccgattgtaaatagaaatttgcggcgaggttaggaaaagttgtacagatagagattgagctctgaaacacatctcaggaacattttttgttccttgtttaaaaaagtttttttttttgtgtgtgtttctctgggttggttagaaagtggcgaagatgaatttgggtgcggccgaggaagaatcggctcaggagattcatttaccagctgatatcaattgggagatgcttgataaatccaagtttttcgttttaggcgctgctttgttttcaggggtatctggagctctttatcctgcggttttgatgaaaactcggcaacaagtgtgtcattcgcaaggttcttgtattaaaactgcgtttactcttgtgagacatgaaggtttaaggggattgtacagaggatttggaacttctttgatgggaactatccctgctcgtgctttgtacatgactgccttggaggttactaagagtaacgtaggctctgctgctgtcagcttggggttgacagaggctaaagctgctgctgttgctaatgcggttggaggtttgagtgctgcgatggctgcacagcttgtttggactcctgttgatgtggttagccaaaggcttatggttcaaggaagtgctggtcttgttaatgcatcaaggtgtaattatgttaacgggtttgatgcatttagaaagatcgttcgcgctgatggaccgaaggggttatacagagggtttgggatatcgattctgacttatgcgccgtctaatgctgtttggtgggcgtcttactctgttgcacagcggatggtttggggtggaattgggtgttatgtctgtaagaaagacgaagaaagcgggaacaatagtaccacgatgaaaccagattctaaaacgataatggctgttcaaggagttagtgctgcgattgctggaagtgtttctgctttgattacaatgccactcgacacaatcaagacgagattgcaggttcttgatggggaagatagtagtaacaacgggaagcgtggaccgagtattggacagactgtaagaaacttggttagagaaggtggatggacggcttgttatagaggattgggaccaagatgtgcttcaatgtcaatgtctgcaacaactatgatcactacctacgagttcttgaaacggctttctgctaagaaccatgacgggttttattctaaatcatagtgataacaactgggaatccacatagaagaatcttttatggaaatgtctctagttttcttacttatcttgttctttatctagctcttctgctatttcatttgtttccagtcatatgtaaggaatgtgttaaattcagttgtttttaaataaataaatgttctttccac

SEQ ID NO: 21260 - protein, 349 aa, Arabidopsis thaliana
  peptide (1)..(349): Ceres Seq. ID no. 13488509
  misc_feature (19)..(289): Homolog of NCBI NO: 18417739 NR Description: mitochondrial carrier protein family [Arabidopsis
  misc_feature (19)..(277): Homolog of NCBI NO: 12278522 NR Description: putative mitochondrial carrier protein
  misc_feature (14)..(277): Homolog of NCBI NO: 12061241 NR Description: 36I5.1 [Oryza sativa (japonica cultivar-group)]
  misc_feature (19)..(277): Homolog of NCBI NO: 18496651 NR Description: putative mitochondrial carrier protein [Triticum
  misc_feature (242)..(341): Homolog of NCBI NO: 37534064 NR Description: putative Tricarboxylate transport protein,
  misc_feature (4)..(222): Homolog of NCBI NO: 37534064 NR Description: putative Tricarboxylate transport protein,
  misc_feature (5)..(340): Homolog of NCBI NO: 7486721 NR Description: hypothetical protein F9D12.12 - Arabidopsis
  misc_feature (1)..(340): Homolog of NCBI NO: 15239622 NR Description: mitochondrial carrier protein family [Arabidopsis
  misc_feature (1)..(340): Homolog of NCBI NO: 21594326 NR Description: mitochondrial carrier-like protein [Arabidopsis
  misc_feature (1)..(349): Homolog of NCBI NO: 18410193 NR Description: mitochondrial carrier protein family [Arabidopsis
MNLGAAEEESAQEIHLPADINWEMLDKSKFFVLGAALFSGVSGALYPAVLMKTRQQVCHSQGSCIKTAFTLVRHEGLRGLYRGFGTSLMGTIPARALYMTALEVTKSNVGSAAVSLGLTEAKAAAVANAVGGLSAAMAAQLVWTPVDVVSQRLMVQGSAGLVNASRCNYVNGFDAFRKIVRADGPKGLYRGFGISILTYAPSNAVWWASYSVAQRMVWGGIGCYVCKKDEESGNNSTTMKPDSKTIMAVQGVSAAIAGSVSALITMPLDTIKTRLQVLDGEDSSNNGKRGPSIGQTVRNLVREGGWTACYRGLGPRCASMSMSATTMITTYEFLKRLSAKNHDGFYSKS

SEQ ID NO: 21261 - protein, 326 aa, Arabidopsis thaliana
  peptide (1)..(326): Ceres Seq. ID no. 13488510
  misc_feature (1)..(317): Homolog of NCBI NO: 7486721 NR Description: hypothetical protein F9D12.12 - Arabidopsis
  misc_feature (1)..(317): Homolog of NCBI NO: 15239622 NR Description: mitochondrial carrier protein family [Arabidopsis
  misc_feature (1)..(317): Homolog of NCBI NO: 21594326 NR Description: mitochondrial carrier-like protein [Arabidopsis
  misc_feature (1)..(326): Homolog of NCBI NO: 18410193 NR Description: mitochondrial carrier protein family [Arabidopsis
  misc_feature (1)..(266): Homolog of NCBI NO: 18417739 NR Description: mitochondrial carrier protein family [Arabidopsis
  misc_feature (1)..(254): Homolog of NCBI NO: 12278522 NR Description: putative mitochondrial carrier protein
  misc_feature (1)..(254): Homolog of NCBI NO: 12061241 NR Description: 36I5.1 [Oryza sativa (japonica cultivar-group)]
  misc_feature (1)..(254): Homolog of NCBI NO: 18496651 NR Description: putative mitochondrial carrier protein [Triticum
  misc_feature (219)..(318): Homolog of NCBI NO: 37534064 NR Description: putative Tricarboxylate transport protein,
  misc_feature (1)..(199): Homolog of NCBI NO: 37534064 NR Description: putative Tricarboxylate transport protein,
MLDKSKFFVLGAALFSGVSGALYPAVLMKTRQQVCHSQGSCIKTAFTLVRHEGLRGLYRGFGTSLMGTIPARALYMTALEVTKSNVGSAAVSLGLTEAKAAAVANAVGGLSAAMAAQLVWTPVDVVSQRLMVQGSAGLVNASRCNYVNGFDAFRKIVRADGPKGLYRGFGISILTYAPSNAVWWASYSVAQRMVWGGIGCYVCKKDEESGNNSTTMKPDSKTIMAVQGVSAAIAGSVSALITMPLDTIKTRLQVLDGEDSSNNGKRGPSIGQTVRNLVREGGWTACYRGLGPRCASMSMSATTMITTYEFLKRLSAKNHDGFYSKS

SEQ ID NO: 21262 - protein, 299 aa, Arabidopsis thaliana
  peptide (1)..(299): Ceres Seq. ID no. 13488511
  misc_feature (1)..(239): Homolog of NCBI NO: 18417739 NR Description: mitochondrial carrier protein family [Arabidopsis
  misc_feature (1)..(227): Homolog of NCBI NO: 12278522 NR Description: putative mitochondrial carrier protein
  misc_feature (1)..(227): Homolog of NCBI NO: 12061241 NR Description: 36I5.1 [Oryza sativa (japonica cultivar-group)]
  misc_feature (1)..(227): Homolog of NCBI NO: 18496651 NR Description: putative mitochondrial carrier protein [Triticum
  misc_feature (192)..(291): Homolog of NCBI NO: 37534064 NR Description: putative Tricarboxylate transport protein,
  misc_feature (1)..(172): Homolog of NCBI NO: 37534064 NR Description: putative Tricarboxylate transport protein,
  misc_feature (1)..(290): Homolog of NCBI NO: 7486721 NR Description: hypothetical protein F9D12.12 - Arabidopsis
  misc_feature (1)..(290): Homolog of NCBI NO: 15239622 NR Description: mitochondrial carrier protein family [Arabidopsis
  misc_feature (1)..(290): Homolog of NCBI NO: 21594326 NR Description: mitochondrial carrier-like protein [Arabidopsis
  misc_feature (1)..(299): Homolog of NCBI NO: 18410193 NR Description: mitochondrial carrier protein family [Arabidopsis
MKTRQQVCHSQGSCIKTAFTLVRHEGLRGLYRGFGTSLMGTIPARALYMTALEVTKSNVGSAAVSLGLTEAKAAAVANAVGGLSAAMAAQLVWTPVDVVSQRLMVQGSAGLVNASRCNYVNGFDAFRKIVRADGPKGLYRGFGISILTYAPSNAVWWASYSVAQRMVWGGIGCYVCKKDEESGNNSTTMKPDSKTIMAVQGVSAAIAGSVSALITMPLDTIKTRLQVLDGEDSSNNGKRGPSIGQTVRNLVREGGWTACYRGLGPRCASMSMSATTMITTYEFLKRLSAKNHDGFYSKS

SEQ ID NO: 21263 - DNA, 653 bp, Arabidopsis thaliana
  misc_feature (1)..(653): Ceres Seq. ID no. 13500154
  misc_feature: MA Experiment ID: 108462 Result: Down-regulated in Transcription
  misc_feature: MA Experiment 108462 PARAMETER Experiment Name: At_Germinating_Seeds_cDNA_P Parameter: Age (day) Value: 2 vs. 0
  misc_feature: MA Experiment 108462 PARAMETER Experiment Name: At_Germinating_Seeds_cDNA_P Parameter: Tissue Value: Germinating Seeds
  misc_feature: MA Experiment ID: 108463 Result: Down-regulated in Transcription
  misc_feature: MA Experiment 108463 PARAMETER Experiment Name: At_Germinating_Seeds_cDNA_P Parameter: Age (day) Value: 3 vs. 0
  misc_feature: MA Experiment 108463 PARAMETER Experiment Name: At_Germinating_Seeds_cDNA_P Parameter: Tissue Value: Germinating Seeds
  misc_feature: MA Experiment ID: 108464 Result: Down-regulated in Transcription
  misc_feature: MA Experiment 108464 PARAMETER Experiment Name: At_Germinating_Seeds_cDNA_P Parameter: Age (day) Value: 4 vs. 0
  misc_feature: MA Experiment 108464 PARAMETER Experiment Name: At_Germinating_Seeds_cDNA_P Parameter: Tissue Value: Germinating Seeds
  misc_feature: MA Experiment ID: 20000180 Result: Down-regulated in Transcription
  misc_feature: MA Experiment 20000180 PARAMETER Experiment Name: At_Germinating_Seeds_P Parameter: Age (hr) Value: 24 vs. 0
  misc_feature: MA Experiment 20000180 PARAMETER Experiment Name: At_Germinating_Seeds_P Parameter: Tissue Value: Germinating Seeds
  misc_feature: MA Experiment ID: 20000224 Result: Down-regulated in Transcription
tccgacaacaaaatcagcgacagctcaaacgttgatatttttctccggcttttctagggtttaaattttctttccgatcagagattaatggcgactctagactccgacgttaccatgattcctgccggagaagcctccagcagcgtagccgcgtcgtcttccaacaagaaagctaagcgattcgaaattaagaagtggagcgccgttgctctctgggcttgggatatcgttgttgacaactgtgcgatctgcagaaaccacatcatggatctttgtatcgagtgtcaggctaatcaggccagtgccacaagtgaagagtgcactgtagcttggggggtttgcaatcacgccttccactttcactgcatcagcagatggctaaagactcgtcaagtttgtccattggataacagtgagtgggagtttcagaaatatggtcactaaatcaacaaatggttccagcaagcatgtgtctaatcgtgaagacatcaggttcatttggttaccaccgcatatgataactaaagattgttcaagtttttgccctttttttggtactgtattttacaatttgtggaaacagagatttactgttcagtgttcactaaacctattatggttgtgctttgggtgacgtctttgatttcaaaatt

SEQ ID NO: 21264 - protein, 118 aa, Arabidopsis thaliana
  peptide (1)..(118): Ceres Seq. ID no. 13500155
  misc_feature (85)..(106): Pfam Name: Zinc finger, C3HC4 type (RING finger) Pfam Description: Zinc finger, C3HC4 type (RING finger)
  misc_feature (21)..(118): Homolog of NCBI NO: 12833653 NR Description: unnamed protein product [Mus musculus]
  misc_feature (30)..(118): Homolog of NCBI NO: 21466060 NR Description: Chain B, Structure Of The Cul1-Rbx1-Skp1-F
  misc_feature (24)..(118): Homolog of NCBI NO: 20502055 NR Description: ZYP protein [Homo sapiens]
  misc_feature (21)..(118): Homolog of NCBI NO: 7657508 NR Description: ring-box 1
  misc_feature (21)..(118): Homolog of NCBI NO: 37537963 NR Description: RING-box protein 1 (Rbx1) (Hyperosmotic protein
  misc_feature (15)..(118): Homolog of NCBI NO: 18543187 NR Description: CG16982-PA [Drosophila melanogaster]
  misc_feature (8)..(118): Homolog of NCBI NO: 19067884 NR Description: hyperosmotic protein 21 [Salmo salar]
  misc_feature (21)..(118): Homolog of NCBI NO: 19387246 NR Description: putative ring box-1 protein
  misc_feature (1)..(118): Homolog of NCBI NO: 15229164 NR Description: ring-box protein Roc1/Rbx1/Hrt1, putative
  misc_feature (1)..(118): Homolog of NCBI NO: 18420256 NR Description: ring-box protein - like [Arabidopsis thaliana]
MATLDSDVTMIPAGEASSSVAASSSNKKAKRFEIKKWSAVALWAWDIVVDNCAICRNHIMDLCIECQANQASATSEECTVAWGVCNHAFHFHCISRWLKTRQVCPLDNSEWEFQKYGH

SEQ ID NO: 21265 - protein, 109 aa, Arabidopsis thaliana
  peptide (1)..(109): Ceres Seq. ID no. 13500156
  misc_feature (76)..(97): Pfam Name: Zinc finger, C3HC4 type (RING finger) Pfam Description: Zinc finger, C3HC4 type (RING finger)
  misc_feature (12)..(109): Homolog of NCBI NO: 12833653 NR Description: unnamed protein product [Mus musculus]
  misc_feature (21)..(109): Homolog of NCBI NO: 21466060 NR Description: Chain B, Structure Of The Cul1-Rbx1-Skp1-F
  misc_feature (15)..(109): Homolog of NCBI NO: 20502055 NR Description: ZYP protein [Homo sapiens]
  misc_feature (12)..(109): Homolog of NCBI NO: 7657508 NR Description: ring-box 1
  misc_feature (12)..(109): Homolog of NCBI NO: 37537963 NR Description: RING-box protein 1 (Rbx1) (Hyperosmotic protein
  misc_feature (6)..(109): Homolog of NCBI NO: 18543187 NR Description: CG16982-PA [Drosophila melanogaster]
  misc_feature (1)..(109): Homolog of NCBI NO: 19067884 NR Description: hyperosmotic protein 21 [Salmo salar]
  misc_feature (12)..(109): Homolog of NCBI NO: 19387246 NR Description: putative ring box-1 protein
  misc_feature (1)..(109): Homolog of NCBI NO: 15229164 NR Description: ring-box protein Roc1/Rbx1/Hrt1, putative
  misc_feature (1)..(109): Homolog of NCBI NO: 18420256 NR Description: ring-box protein - like [Arabidopsis thaliana]
MIPAGEASSSVAASSSNKKAKRFEIKKWSAVALWAWDIVVDNCAICRNHIMDLCIECQANQASATSEECTVAWGVCNHAFHFHCISRWLKTRQVCPLDNSEWEFQKYGH

SEQ ID NO: 21266 - protein, 66 aa, Arabidopsis thaliana
  peptide (1)..(66): Ceres Seq. ID no. 13500157
MVTKSTNGSSKHVSNREDIRFIWLPPHMITKDCSSFCPFFGTVFYNLWKQRFTVQCSLNLLWLCFG

SEQ ID NO: 21267 - DNA, 1699 bp, Arabidopsis thaliana
  misc_feature (1)..(1699): Ceres Seq. ID no. 13499971
  misc_feature: MA Experiment ID: 108569 Result: Up-regulated in Transcription
  misc_feature: MA Experiment 108569 PARAMETER Experiment Name: At_0.001%_MeJA__cDNA_P Parameter: Timepoint (hr) Value: 6
  misc_feature: MA Experiment 108569 PARAMETER Experiment Name: At_0.001%_MeJA__cDNA_P Parameter: Tissue Value: Aerial
  misc_feature: MA Experiment 108569 PARAMETER Experiment Name: At_0.001%_MeJA__cDNA_P Parameter: Treatment Value: 0.001% MeJA vs. No Treatment
  misc_feature: MA Experiment ID: 108573 Result: Up-regulated in Transcription
  misc_feature: MA Experiment 108573 PARAMETER Experiment Name: At_Drought_cDNA_P Parameter: Timepoint (hr) Value: 6
  misc_feature: MA Experiment 108573 PARAMETER Experiment Name: At_Drought_cDNA_P Parameter: Tissue Value: Aerial
  misc_feature: MA Experiment 108573 PARAMETER Experiment Name: At_Drought_cDNA_P Parameter: Treatment Value: Drought vs. No Drought
  misc_feature: MA Experiment ID: 108595 Result: Down-regulated in Transcription
  misc_feature: MA Experiment 108595 PARAMETER Experiment Name: At_Ler-pi_Ovule_cDNA_P Parameter: Plant Line Value: null
tggattttctctatagacgcaatcaccgccgattctctctctctctctctcgagtctctcgacggtcgcatatcaaaagtccatttctttcttctctttggaggatcagcaactatggatgaagagtacgaagtcatagttctgggtactggtctcaaggagtgcatccttagtggtcttctctccgtcgatggtcttaaggtacttcacatggacaggaatgactactacggtggagagtcaacttctcttaatctcaatcagctgtggaagaagttcaggggagaagagaaggctcctgctcatttaggttctagcagagactacaatgttgacatgatgccaaagtttatgatggctaacggaaagcttgttcgtgtccttattcatacggatgtgaccaagtacttgtcttttaaagctgttgatggaagctatgtttttgtccaaggcaaggtccaaaaagtgccagcaactcccatggaggccctcaaatctcctcttatgggtatttttgagaaacgtcgagctggaaagtttttcagctatgttcaagaatacgacgagaaggacccaaaaacacatgatggaatggatttgaggagagttacaactaaggatttgattgcgaaattcggtcttaaagaagatactattgactttattggtcatgcagtggcacttcactgtaatgacaatcatctccatcaacctgcctatgatactgtaatgagaatgaagctctacgcagagtcccttgcacgttttcaaggaggttcaccatatatctatcctctctatgggttgggagaattgcctcaggcatttgcacgacttagtgctgtctatggtgggacgtatatgttgaacaaacctgagtgcaaggtagagtttgacgaggagggtaaggtttctggtgttacatctgagggagagactgccaaatgcaagaaagttgtctgcgatccttcttacctaaccaacaaggtcaggaagattggcagggttgctcgggcgattgccattatgagccaccctattccaaacaccaatgattctcagtcggtgcaagtcattctaccccaaaaacaattgggccgcaaatcagacatgtatgtcttctgttgttcatattcacacaacgttgctcccaagggaaagttcatagcatttgtgtcaacagacgctgaaactgataaccctcaaaccgagctccagcctggaatcgaccttcttggtcctgttgatgagctgttcttcgacatctatgatagatatgagcctgtcaacgaacccactttggacaactgcttcatatcaacgagttatgatgctacaacacactttgacacaactgttgttgatgtgttgaacatgtataaattgatcaccggaaaggaactggatctaagtgtggatcttaacgcagctagtgctgcagaggaggaatgatggaaaatattgcaagctctgtctctctctgttagtcaccaaatgatgtaaccggttctctttctccctcttcttaaaagttgtctcaccaaatgttctgttaaaatactaaatcaaaccgatctcatcatgcgtacctattcccggttatcgcagtctgtttttttcttctcaaaaaactaaaatgttggatttcgtggtttttgtttggagtgtctaatatatcatcatgctcttccgtttgaac

SEQ ID NO: 21268 - protein, 483 aa, Arabidopsis thaliana
  peptide (1)..(483): Ceres Seq. ID no. 13499972
  misc_feature (39)..(476): Pfam Name: GDP dissociation inhibitor Pfam Description: GDP dissociation inhibitor
  misc_feature (39)..(483): Homolog of NCBI NO: 33146460 NR Description: putative GDP dissociation inhibitor
  misc_feature (39)..(482): Homolog of NCBI NO: 7489479 NR Description: GDP dissociation inhibitor protein - rice
  misc_feature (39)..(482): Homolog of NCBI NO: 7489133 NR Description: GDP dissociation inhibitor - common tobacco
  misc_feature (39)..(482): Homolog of NCBI NO: 7489478 NR Description: GDP dissociation inhibitor protein - rice
  misc_feature (39)..(482): Homolog of NCBI NO: 3175990 NR Description: GDP dissociation inhibitor [Cicer arietinum]
  misc_feature (39)..(482): Homolog of NCBI NO: 15232210 NR Description: Rab GDP dissociation inhibitor [Arabidopsis
  misc_feature (39)..(483): Homolog of NCBI NO: 21592535 NR Description: GDP dissociation inhibitor [Arabidopsis thaliana]
  misc_feature (39)..(483): Homolog of NCBI NO: 17473582 NR Description: GDP dissociation inhibitor [Arabidopsis thaliana]
  misc_feature (39)..(483): Homolog of NCBI NO: 1550740 NR Description: GDP-associated inhibitor [Arabidopsis thaliana]
  misc_feature (39)..(483): Homolog of NCBI NO: 15224814 NR Description: GDP dissociation inhibitor [Arabidopsis thaliana]
WIFSIDAITADSLSLSLESLDGRISKVHFFLLFGGSATMDEEYEVIVLGTGLKECILSGLLSVDGLKVLHMDRNDYYGGESTSLNLNQLWKKFRGEEKAPAHLGSSRDYNVDMMPKFMMANGKLVRVLIHTDVTKYLSFKAVDGSYVFVQGKVQKVPATPMEALKSPLMGIFEKRRAGKFFSYVQEYDEKDPKTHDGMDLRRVTTKDLIAKFGLKEDTIDFIGHAVALHCNDNHLHQPAYDTVMRMKLYAESLARFQGGSPYIYPLYGLGELPQAFARLSAVYGGTYMLNKPECKVEFDEEGKVSGVTSEGETAKCKKVVCDPSYLTNKVRKIGRVARAIAIMSHPIPNTNDSQSVQVILPQKQLGRKSDMYVFCCSYSHNVAPKGKFIAFVSTDAETDNPQTELQPGIDLLGPVDELFFDIYDRYEPVNEPTLDNCFISTSYDATTHFDTTVVDVLNMYKLITGKELDLSVDLNAASAAEEE

SEQ ID NO: 21269 - protein, 445 aa, Arabidopsis thaliana
  peptide (1)..(445): Ceres Seq. ID no. 13499973
  misc_feature (1)..(438): Pfam Name: GDP dissociation inhibitor Pfam Description: GDP dissociation inhibitor
  misc_feature (1)..(445): Homolog of NCBI NO: 33146460 NR Description: putative GDP dissociation inhibitor
  misc_feature (1)..(444): Homolog of NCBI NO: 7489479 NR Description: GDP dissociation inhibitor protein - rice
  misc_feature (1)..(444): Homolog of NCBI NO: 7489133 NR Description: GDP dissociation inhibitor - common tobacco
  misc_feature (1)..(444): Homolog of NCBI NO: 7489478 NR Description: GDP dissociation inhibitor protein - rice
  misc_feature (1)..(444): Homolog of NCBI NO: 3175990 NR Description: GDP dissociation inhibitor [Cicer arietinum]
  misc_feature (1)..(444): Homolog of NCBI NO: 15232210 NR Description: Rab GDP dissociation inhibitor [Arabidopsis
  misc_feature (1)..(445): Homolog of NCBI NO: 21592535 NR Description: GDP dissociation inhibitor [Arabidopsis thaliana]
  misc_feature (1)..(445): Homolog of NCBI NO: 17473582 NR Description: GDP dissociation inhibitor [Arabidopsis thaliana]
  misc_feature (1)..(445): Homolog of NCBI NO: 1550740 NR Description: GDP-associated inhibitor [Arabidopsis thaliana]
  misc_feature (1)..(445): Homolog of NCBI NO: 15224814 NR Description: GDP dissociation inhibitor [Arabidopsis thaliana]
MDEEYEVIVLGTGLKECILSGLLSVDGLKVLHMDRNDYYGGESTSLNLNQLWKKFRGEEKAPAHLGSSRDYNVDMMPKFMMANGKLVRVLIHTDVTKYLSFKAVDGSYVFVQGKVQKVPATPMEALKSPLMGIFEKRRAGKFFSYVQEYDEKDPKTHDGMDLRRVTTKDLIAKFGLKEDTIDFIGHAVALHCNDNHLHQPAYDTVMRMKLYAESLARFQGGSPYIYPLYGLGELPQAFARLSAVYGGTYMLNKPECKVEFDEEGKVSGVTSEGETAKCKKVVCDPSYLTNKVRKIGRVARAIAIMSHPIPNTNDSQSVQVILPQKQLGRKSDMYVFCCSYSHNVAPKGKFIAFVSTDAETDNPQTELQPGIDLLGPVDELFFDIYDRYEPVNEPTLDNCFISTSYDATTHFDTTVVDVLNMYKLITGKELDLSVDLNAASAAEEE

SEQ ID NO: 21270 - protein, 413 aa, Arabidopsis thaliana
  peptide (1)..(413): Ceres Seq. ID no. 13499974
  misc_feature (1)..(406): Pfam Name: GDP dissociation inhibitor Pfam Description: GDP dissociation inhibitor
  misc_feature (1)..(413): Homolog of NCBI NO: 33146460 NR Description: putative GDP dissociation inhibitor
  misc_feature (1)..(412): Homolog of NCBI NO: 7489479 NR Description: GDP dissociation inhibitor protein - rice
  misc_feature (1)..(412): Homolog of NCBI NO: 7489133 NR Description: GDP dissociation inhibitor - common tobacco
  misc_feature (1)..(412): Homolog of NCBI NO: 7489478 NR Description: GDP dissociation inhibitor protein - rice
  misc_feature (1)..(412): Homolog of NCBI NO: 3175990 NR Description: GDP dissociation inhibitor [Cicer arietinum]
  misc_feature (1)..(412): Homolog of NCBI NO: 15232210 NR Description: Rab GDP dissociation inhibitor [Arabidopsis
  misc_feature (1)..(413): Homolog of NCBI NO: 21592535 NR Description: GDP dissociation inhibitor [Arabidopsis thaliana]
  misc_feature (1)..(413): Homolog of NCBI NO: 17473582 NR Description: GDP dissociation inhibitor [Arabidopsis thaliana]
  misc_feature (1)..(413): Homolog of NCBI NO: 1550740 NR Description: GDP-associated inhibitor [Arabidopsis thaliana]
  misc_feature (1)..(413): Homolog of NCBI NO: 15224814 NR Description: GDP dissociation inhibitor [Arabidopsis thaliana]
MDRNDYYGGESTSLNLNQLWKKFRGEEKAPAHLGSSRDYNVDMMPKFMMANGKLVRVLIHTDVTKYLSFKAVDGSYVFVQGKVQKVPATPMEALKSPLMGIFEKRRAGKFFSYVQEYDEKDPKTHDGMDLRRVTTKDLIAKFGLKEDTIDFIGHAVALHCNDNHLHQPAYDTVMRMKLYAESLARFQGGSPYIYPLYGLGELPQAFARLSAVYGGTYMLNKPECKVEFDEEGKVSGVTSEGETAKCKKVVCDPSYLTNKVRKIGRVARAIAIMSHPIPNTNDSQSVQVILPQKQLGRKSDMYVFCCSYSHNVAPKGKFIAFVSTDAETDNPQTELQPGIDLLGPVDELFFDIYDRYEPVNEPTLDNCFISTSYDATTHFDTTVVDVLNMYKLITGKELDLSVDLNAASAAEEE

SEQ ID NO: 21271 - DNA, 1110 bp, Arabidopsis thaliana
  misc_feature (1)..(1110): Ceres Seq. ID no. 12327364
  misc_feature: MA Experiment ID: 108435 Result: Down-regulated in Transcription
  misc_feature: MA Experiment 108435 PARAMETER Experiment Name: At_stm_Mutants_cDNA_P Parameter: Plant Line Value: wt Landsburg vs stm
  misc_feature: MA Experiment 108435 PARAMETER Experiment Name: At_stm_Mutants_cDNA_P Parameter: Tissue Value: Shoot Apical Meristem Region
  misc_feature: MA Experiment ID: 108461 Result: Up-regulated in Transcription
  misc_feature: MA Experiment 108461 PARAMETER Experiment Name: At_Germinating_Seeds_cDNA_P Parameter: Age (day) Value: 1 vs. 0
  misc_feature: MA Experiment 108461 PARAMETER Experiment Name: At_Germinating_Seeds_cDNA_P Parameter: Tissue Value: Germinating Seeds
  misc_feature: MA Experiment ID: 108462 Result: Up-regulated in Transcription
  misc_feature: MA Experiment 108462 PARAMETER Experiment Name: At_Germinating_Seeds_cDNA_P Parameter: Age (day) Value: 2 vs. 0
  misc_feature: MA Experiment 108462 PARAMETER Experiment Name: At_Germinating_Seeds_cDNA_P Parameter: Tissue Value: Germinating Seeds
  misc_feature: MA Experiment ID: 108463 Result: Up-regulated in Transcription
  misc_feature: MA Experiment 108463 PARAMETER Experiment Name: At_Germinating_Seeds_cDNA_P Parameter: Age (day) Value: 3 vs. 0
  misc_feature: MA Experiment 108463 PARAMETER Experiment Name: At_Germinating_Seeds_cDNA_P Parameter: Tissue Value: Germinating Seeds
  misc_feature: MA Experiment ID: 108464 Result: Up-regulated in Transcription
  misc_feature: MA Experiment 108464 PARAMETER Experiment Name: At_Germinating_Seeds_cDNA_P Parameter: Age (day) Value: 4 vs. 0
  misc_feature: MA Experiment 108464 PARAMETER Experiment Name: At_Germinating_Seeds_cDNA_P Parameter: Tissue Value: Germinating Seeds
  misc_feature: MA Experiment ID: 108573 Result: Up-regulated in Transcription
  misc_feature: MA Experiment 108573 PARAMETER Experiment Name: At_Drought_cDNA_P Parameter: Timepoint (hr) Value: 6
  misc_feature: MA Experiment 108573 PARAMETER Experiment Name: At_Drought_cDNA_P Parameter: Tissue Value: Aerial
  misc_feature: MA Experiment 108573 PARAMETER Experiment Name: At_Drought_cDNA_P Parameter: Treatment Value: Drought vs. No Drought
  misc_feature: MA Experiment ID: 108579 Result: Up-regulated in Transcription
  misc_feature: MA Experiment 108579 PARAMETER Experiment Name: At_4deg_Cold_cDNA_P Parameter: Temperature (deg C) Value: 4 vs. 22
  misc_feature: MA Experiment 108579 PARAMETER Experiment Name: At_4deg_Cold_cDNA_P Parameter: Timepoint (hr) Value: 6
  misc_feature: MA Experiment 108579 PARAMETER Experiment Name: At_4deg_Cold_cDNA_P Parameter: Tissue Value: Aerial
  misc_feature: MA Experiment ID: 108595 Result: Down-regulated in Transcription
  misc_feature: MA Experiment 108595 PARAMETER Experiment Name: At_Ler-pi_Ovule_cDNA_P Parameter: Plant Line Value: null
  misc_feature: MA Experiment ID: 20000113 Result: Up-regulated in Transcription
  misc_feature: MA Experiment 20000113 PARAMETER Experiment Name: At_42deg_Heat_cDNA_P Parameter: Temperature (deg C) Value: 42 vs. 22
  misc_feature: MA Experiment 20000113 PARAMETER Experiment Name: At_42deg_Heat_cDNA_P Parameter: Timepoint (hr) Value: 8
  misc_feature: MA Experiment 20000113 PARAMETER Experiment Name: At_42deg_Heat_cDNA_P Parameter: Tissue Value: Aerial
  misc_feature: MA Experiment ID: 20000180 Result: Up-regulated in Transcription
  misc_feature: MA Experiment 20000180 PARAMETER Experiment Name: At_Germinating_Seeds_P Parameter: Age (hr) Value: 24 vs. 0
  misc_feature: MA Experiment 20000180 PARAMETER Experiment Name: At_Germinating_Seeds_P Parameter: Tissue Value: Germinating Seeds
  misc_feature: MA Experiment ID: 20000265 Result: Down-regulated in Transcription
  misc_feature: MA Experiment 20000265 PARAMETER Experiment Name: At_Open_Flower_P Parameter: Age (day) Value: 21
  misc_feature: MA Experiment 20000265 PARAMETER Experiment Name: At_Open_Flower_P Parameter: Plant Line Value: WS
  misc_feature: MA Experiment 20000265 PARAMETER Experiment Name: At_Open_Flower_P Parameter: Tissue Value: Closed Flower vs. Whole Plant
  misc_feature: MA Experiment ID: 20000286 Result: Down-regulated in Transcription
  misc_feature: MA Experiment 20000286 PARAMETER Experiment Name: At_Open_Flower_P Parameter: Age (day) Value: 21
  misc_feature: MA Experiment 20000286 PARAMETER Experiment Name: At_Open_Flower_P Parameter: Plant Line Value: WS
  misc_feature: MA Experiment 20000286 PARAMETER Experiment Name: At_Open_Flower_P Parameter: Tissue Value: Half Open vs. Whole Plant
  misc_feature: MA Experiment ID: 20000439 Result: Down-regulated in Transcription
  misc_feature: MA Experiment 20000439 PARAMETER Experiment Name: At_Roots__P Parameter: Age (day) Value: 14 vs. 21
  misc_feature: MA Experiment 20000439 PARAMETER Experiment Name: At_Roots__P Parameter: Organism Value: A. thaliana
  misc_feature: MA Experiment 20000439 PARAMETER Experiment Name: At_Roots__P Parameter: Tissue Value: Roots vs. Whole Plant
  misc_feature: MA Experiment ID: 20000495 Result: Down-regulated in Transcription
  misc_feature: MA Experiment 20000495 PARAMETER Experiment Name: At_Guard_Cells_P Parameter: Harvest Date Value: 8/2/2002
  misc_feature: MA Experiment 20000495 PARAMETER Experiment Name: At_Guard_Cells_P Parameter: Organism Value: A. thaliana
  misc_feature: MA Experiment 20000495 PARAMETER Experiment Name: At_Guard_Cells_P Parameter: Tissue Value: Guard Cells vs. Leaves
  misc_feature: MA Experiment ID: 20001248 Result: Down-regulated in Transcription
  misc_feature: MA Experiment 20001248 PARAMETER Experiment Name: At_Far-red-induction_P Parameter: Age (day) Value: 7
  misc_feature: MA Experiment 20001248 PARAMETER Experiment Name: At_Far-red-induction_P Parameter: Light Value: Far-red vs. White
  misc_feature: MA Experiment 20001248 PARAMETER Experiment Name: At_Far-red-induction_P Parameter: Organism Value: A. thaliana
  misc_feature: MA Experiment 20001248 PARAMETER Experiment Name: At_Far-red-induction_P Parameter: Plant Line Value: Columbia
  misc_feature: MA Experiment 20001248 PARAMETER Experiment Name: At_Far-red-induction_P Parameter: Timepoint (hr) Value: 4
  misc_feature: MA Experiment 20001248 PARAMETER Experiment Name: At_Far-red-induction_P Parameter: Tissue Value: Whole Plant
  misc_feature: MA Experiment ID: 20001450 Result: Down-regulated in Transcription
  misc_feature: MA Experiment 20001450 PARAMETER Experiment Name: At_Far-red-induction_P Parameter: Age (day) Value: 7
  misc_feature: MA Experiment 20001450 PARAMETER Experiment Name: At_Far-red-induction_P Parameter: Light Value: Far-red vs. White
  misc_feature: MA Experiment 20001450 PARAMETER Experiment Name: At_Far-red-induction_P Parameter: Organism Value: A. thaliana
  misc_feature: MA Experiment 20001450 PARAMETER Experiment Name: At_Far-red-induction_P Parameter: Plant Line Value: Columbia
  misc_feature: MA Experiment 20001450 PARAMETER Experiment Name: At_Far-red-induction_P Parameter: Timepoint (hr) Value: 8
  misc_feature: MA Experiment 20001450 PARAMETER Experiment Name: At_Far-red-induction_P Parameter: Tissue Value: Whole Plant
  misc_feature: MA Experiment ID: 20001451 Result: Down-regulated in Transcription
  misc_feature: MA Experiment 20001451 PARAMETER Experiment Name: At_Far-red-induction_P Parameter: Age (day) Value: 7
  misc_feature: MA Experiment 20001451 PARAMETER Experiment Name: At_Far-red-induction_P Parameter: Light Value: Far-red vs. White
  misc_feature: MA Experiment 20001451 PARAMETER Experiment Name: At_Far-red-induction_P Parameter: Organism Value: A. thaliana
  misc_feature: MA Experiment 20001451 PARAMETER Experiment Name: At_Far-red-induction_P Parameter: Plant Line Value: Columbia
  misc_feature: MA Experiment 20001451 PARAMETER Experiment Name: At_Far-red-induction_P Parameter: Timepoint (hr) Value: 24
  misc_feature: MA Experiment 20001451 PARAMETER Experiment Name: At_Far-red-induction_P Parameter: Tissue Value: Whole Plant
  misc_feature: MA Experiment ID: 20001557 Result: Down-regulated in Transcription
  misc_feature: MA Experiment 20001557 PARAMETER Experiment Name: At_Drought_Soil_Dry_P Parameter: Age (day) Value: 27
  misc_feature: MA Experiment 20001557 PARAMETER Experiment Name: At_Drought_Soil_Dry_P Parameter: Organism Value: A. thaliana
  misc_feature: MA Experiment 20001557 PARAMETER Experiment Name: At_Drought_Soil_Dry_P Parameter: Plant Line Value: WS
  misc_feature: MA Experiment 20001557 PARAMETER Experiment Name: At_Drought_Soil_Dry_P Parameter: Post Timepoint (hr) Value: 3
  misc_feature: MA Experiment 20001557 PARAMETER Experiment Name: At_Drought_Soil_Dry_P Parameter: Post-Treatment Value: Re-Water vs. No Drought
  misc_feature: MA Experiment 20001557 PARAMETER Experiment Name: At_Drought_Soil_Dry_P Parameter: Timepoint (day) Value: 13
  misc_feature: MA Experiment 20001557 PARAMETER Experiment Name: At_Drought_Soil_Dry_P Parameter: Treatment Value: Drought vs. No Drought
  misc_feature: MA Experiment ID: 20001558 Result: Down-regulated in Transcription
  misc_feature: MA Experiment 20001558 PARAMETER Experiment Name: At_Drought_Soil_Dry_P Parameter: Age (day) Value: 27
  misc_feature: MA Experiment 20001558 PARAMETER Experiment Name: At_Drought_Soil_Dry_P Parameter: Organism Value: A. thaliana
  misc_feature: MA Experiment 20001558 PARAMETER Experiment Name: At_Drought_Soil_Dry_P Parameter: Plant Line Value: WS
  misc_feature: MA Experiment 20001558 PARAMETER Experiment Name: At_Drought_Soil_Dry_P Parameter: Post Timepoint (hr) Value: 6
  misc_feature: MA Experiment 20001558 PARAMETER Experiment Name: At_Drought_Soil_Dry_P Parameter: Post-Treatment Value: Re-Water vs. No Drought
  misc_feature: MA Experiment 20001558 PARAMETER Experiment Name: At_Drought_Soil_Dry_P Parameter: Timepoint (day) Value: 13
  misc_feature: MA Experiment 20001558 PARAMETER Experiment Name: At_Drought_Soil_Dry_P Parameter: Treatment Value: Drought vs. No Drought
  misc_feature: MA Experiment ID: 20001560 Result: Down-regulated in Transcription
  misc_feature: MA Experiment 20001560 PARAMETER Experiment Name: At_Drought_Soil_Dry_P Parameter: Age (day) Value: 28
  misc_feature: MA Experiment 20001560 PARAMETER Experiment Name: At_Drought_Soil_Dry_P Parameter: Organism Value: A. thaliana
  misc_feature: MA Experiment 20001560 PARAMETER Experiment Name: At_Drought_Soil_Dry_P Parameter: Plant Line Value: WS
  misc_feature: MA Experiment 20001560 PARAMETER Experiment Name: At_Drought_Soil_Dry_P Parameter: Post Timepoint (hr) Value: None
  misc_feature: MA Experiment 20001560 PARAMETER Experiment Name: At_Drought_Soil_Dry_P Parameter: Post-Treatment Value: None
  misc_feature: MA Experiment 20001560 PARAMETER Experiment Name: At_Drought_Soil_Dry_P Parameter: Timepoint (day) Value: 14
  misc_feature: MA Experiment 20001560 PARAMETER Experiment Name: At_Drought_Soil_Dry_P Parameter: Treatment Value: Drought vs. No Drought
ataattaaagtcttcttcttcttcttcttctctacaaattatctcactctcttcgtttttttttccttctcaacaatggcgacttcttctactttctcgtcactactaccttcaccaccagctcttctttccgaccaccgttctcctccaccatccatcagatactccttttctcccttaactactccaaaatcgtctcgtttgggtttcactgtaccggagaagagaaacctcgctgctaattcgtctctcgttgaagtatccattggcggagaaagtgacccaccaccatcatcatctggatcaggaggagacgacaagcaaattgcattactcaaactcaaattacttagtgtagtttcgggattaaacagaggacttgtggcgagtgttgatgatttagaaagagctgaagtggctgctaaagaacttgaaactgctgggggaccggttgatttaaccgatgatcttgataagcttcaagggaaatggaggctgttgtatagtagtgcgttctcttctcggtctttaggtggtagccgtcctggtctacctactggacgtttgatccctgttactcttggccaggtgtttcaacggattaatgtgtttagcaaagattttgataacatagcagaggtggaattaggagccccttggccatttccgccattagaagccactgcgacattggcacacaagtttgaactcttaggcacttgcaagatcaagataacatttgagaaaacaactgtgaagacatcgggaaacttgtcgcagattcctccgtttgatatcccgaggcttcccgacagtttcagaccatcgtcaaaccctggaactggggatttcgaagttacctatgttgatgataccatgcgcataactcgcggggacagaggtgaacttagggtattcgtcattgcttaattctcaaagctttgacatgtaaagataaataaatactttctgcttgatgcagtctcatgagttttgtacaaatcatgtgaacatataaatgcgctttataagtaaatgagtgtcttgttcaatgaatcatatgaaagaatttgtatgactcagaaaattggacaatgatatagaacttcc

SEQ ID NO: 21272 - protein, 309 aa, Arabidopsis thaliana
  peptide (1)..(309): Ceres Seq. ID no. 12327365
  misc_feature (110)..(307): Pfam Name: PAP_fibrillin Pfam Description: PAP_fibrillin
  misc_feature (69)..(173): Homolog of NCBI NO: 17065226 NR Description: Unknown protein [Arabidopsis thaliana]
  misc_feature (273)..(309): Homolog of NCBI NO: 30688146 NR Description: plastid-lipid associated protein PAP/fibrillin
  misc_feature (40)..(173): Homolog of NCBI NO: 30688146 NR Description: plastid-lipid associated protein PAP/fibrillin
  misc_feature (113)..(307): Homolog of NCBI NO: 23041005 NR Description: hypothetical protein [Trichodesmium erythraeum
  misc_feature (113)..(309): Homolog of NCBI NO: 5020103 NR Description: fibrillin [Nostoc sp. PCC 8009]
  misc_feature (111)..(309): Homolog of NCBI NO: 17231810 NR Description: fibrillin [Nostoc sp. PCC 7120]
  misc_feature (113)..(309): Homolog of NCBI NO: 16329838 NR Description: fibrillin [Synechocystis sp. PCC 6803]
  misc_feature (111)..(305): Homolog of NCBI NO: 22297962 NR Description: fibrillin [Thermosynechococcus elongatus BP-1]
  misc_feature (26)..(309): Homolog of NCBI NO: 18403751 NR Description: expressed protein
  misc_feature (26)..(309): Homolog of NCBI NO: 21592536 NR Description: unknown [Arabidopsis thaliana]
IIKVFFFFFFSTNYLTLFVFFSFSTMATSSTFSSLLPSPPALLSDHRSPPPSIRYSFSPLTTPKSSRLGFTVPEKRNLAANSSLVEVSIGGESDPPPSSSGSGGDDKQIALLKLKLLSVVSGLNRGLVASVDDLERAEVAAKELETAGGPVDLTDDLDKLQGKWRLLYSSAFSSRSLGGSRPGLPTGRLIPVTLGQVFQRINVFSKDFDNIAEVELGAPWPFPPLEATATLAHKFELLGTCKIKITFEKTTVKTSGNLSQIPPFDIPRLPDSFRPSSNPGTGDFEVTYVDDTMRITRGDRGELRVFVIA

SEQ ID NO: 21273 - protein, 284 aa, Arabidopsis thaliana
  peptide (1)..(284): Ceres Seq. ID no. 12327366
  misc_feature (85)..(282): Pfam Name: PAP_fibrillin Pfam Description: PAP_fibrillin
  misc_feature (248)..(284): Homolog of NCBI NO: 30688146 NR Description: plastid-lipid associated protein PAP/fibrillin
  misc_feature (15)..(148): Homolog of NCBI NO: 30688146 NR Description: plastid-lipid associated protein PAP/fibrillin
  misc_feature (88)..(282): Homolog of NCBI NO: 23041005 NR Description: hypothetical protein [Trichodesmium erythraeum
  misc_feature (88)..(284): Homolog of NCBI NO: 5020103 NR Description: fibrillin [Nostoc sp. PCC 8009]
  misc_feature (86)..(284): Homolog of NCBI NO: 17231810 NR Description: fibrillin [Nostoc sp. PCC 7120]
  misc_feature (44)..(148): Homolog of NCBI NO: 17065226 NR Description: Unknown protein [Arabidopsis thaliana]
  misc_feature (88)..(284): Homolog of NCBI NO: 16329838 NR Description: fibrillin [Synechocystis sp. PCC 6803]
  misc_feature (86)..(280): Homolog of NCBI NO: 22297962 NR Description: fibrillin [Thermosynechococcus elongatus BP-1]
  misc_feature (1)..(284): Homolog of NCBI NO: 18403751 NR Description: expressed protein
  misc_feature (1)..(284): Homolog of NCBI NO: 21592536 NR Description: unknown [Arabidopsis thaliana]
MATSSTFSSLLPSPPALLSDHRSPPPSIRYSFSPLTTPKSSRLGFTVPEKRNLAANSSLVEVSIGGESDPPPSSSGSGGDDKQIALLKLKLLSVVSGLNRGLVASVDDLERAEVAAKELETAGGPVDLTDDLDKLQGKWRLLYSSAFSSRSLGGSRPGLPTGRLIPVTLGQVFQRINVFSKDFDNIAEVELGAPWPFPPLEATATLAHKFELLGTCKIKITFEKTTVKTSGNLSQIPPFDIPRLPDSFRPSSNPGTGDFEVTYVDDTMRITRGDRGELRVFVIA

SEQ ID NO: 21274 - DNA, 683 bp, Arabidopsis thaliana
  misc_feature (1)..(683): Ceres Seq. ID no. 13497372
  misc_feature: MA Experiment ID: 108434 Result: Up-regulated in Transcription
  misc_feature: MA Experiment 108434 PARAMETER Experiment Name: At_Root_Tips_cDNA_P Parameter: Tissue Value: Root Tips
  misc_feature: MA Experiment ID: 108488 Result: Down-regulated in Transcription
  misc_feature: MA Experiment ID: 108595 Result: Up-regulated in Transcription
  misc_feature: MA Experiment 108595 PARAMETER Experiment Name: At_Ler-pi_Ovule_cDNA_P Parameter: Plant Line Value: null
  misc_feature: MA Experiment ID: 20000112 Result: Down-regulated in Transcription
  misc_feature: MA Experiment 20000112 PARAMETER Experiment Name: At_42deg_Heat_cDNA_P Parameter: Temperature (deg C) Value: 42 vs. 22
  misc_feature: MA Experiment 20000112 PARAMETER Experiment Name: At_42deg_Heat_cDNA_P Parameter: Timepoint (hr) Value: 2
  misc_feature: MA Experiment 20000112 PARAMETER Experiment Name: At_42deg_Heat_cDNA_P Parameter: Tissue Value: Aerial
  misc_feature: MA Experiment ID: 20000173 Result: Down-regulated in Transcription
  misc_feature: MA Experiment 20000173 PARAMETER Experiment Name: At_42deg_Heat_P Parameter: Age (day) Value: 14
  misc_feature: MA Experiment 20000173 PARAMETER Experiment Name: At_42deg_Heat_P Parameter: Organism Value: A. thaliana
  misc_feature: MA Experiment 20000173 PARAMETER Experiment Name: At_42deg_Heat_P Parameter: Plant Line Value: WS
  misc_feature: MA Experiment 20000173 PARAMETER Experiment Name: At_42deg_Heat_P Parameter: Temperature (deg C) Value: 42 vs. 22
  misc_feature: MA Experiment 20000173 PARAMETER Experiment Name: At_42deg_Heat_P Parameter: Timepoint (hr) Value: 6
  misc_feature: MA Experiment 20000173 PARAMETER Experiment Name: At_42deg_Heat_P Parameter: Tissue Value: Aerial
  misc_feature: MA Experiment ID: 20000437 Result: Down-regulated in Transcription
  misc_feature: MA Experiment 20000437 PARAMETER Experiment Name: At_Drought_P Parameter: Age (day) Value: 8
  misc_feature: MA Experiment 20000437 PARAMETER Experiment Name: At_Drought_P Parameter: Organism Value: A. thaliana
  misc_feature: MA Experiment 20000437 PARAMETER Experiment Name: At_Drought_P Parameter: Plant Line Value: WS
  misc_feature: MA Experiment 20000437 PARAMETER Experiment Name: At_Drought_P Parameter: Timepoint (hr) Value: 24
  misc_feature: MA Experiment 20000437 PARAMETER Experiment Name: At_Drought_P Parameter: Tissue Value: Whole Plant
  misc_feature: MA Experiment 20000437 PARAMETER Experiment Name: At_Drought_P Parameter: Treatment Value: Drought vs. No Drought
aaaaaacacaaaacttgatctcacgactccatcttctaaaattcagaatctttctttgaaacttttttcgtgtgaagaaaatggcaccaaaggcagagaagaagccggcagagaagaaaccagtggaagagaaatcaaaagccgagaaagctccggcggagaagaaaccaaaagccggcaagaaactcccgaaggaagccggtgccggcggcgataagaagaagaagatgaagaagaagagtgttgagacgtacaagatctacatcttcaaggttctgaaacaagttcatccagatattggtatttcaagcaaagctatggggattatgaacagtttcatcaacgacatcttcgagaaattggcatcggaatcttcgaagcttgctaggtataacaagaagccgacgattacctctagggagattcagactgctgttagacttgttcttcctggtgagcttgcgaaacatgctgtttctgaaggaaccaaggctgtgactaagtttactagctcttgaattgtggatcttgttgaaatcgatgtttgtaaaattagggttttttagatttgatggttgttgttgactcttcgatcgatttctgttttgttatcttgttgcgatgtaatcaaatcggatccgatttctttcttaaatcaaatctatcaagtaaaatcttttgcc

SEQ ID NO: 21275 - protein, 145 aa, Arabidopsis thaliana
  peptide (1)..(145): Ceres Seq. ID no. 13497373
  misc_feature (5)..(144): Pfam Name: Core histone H2A/H2B/H3/H4 Pfam Description: Core histone H2A/H2B/H3/H4
  misc_feature (1)..(145): Homolog of NCBI NO: 7387727 NR Description: Histone H2B (CaH2B)
  misc_feature (1)..(145): Homolog of NCBI NO: 15226943 NR Description: histone H2B, putative [Arabidopsis thaliana]
  misc_feature (1)..(145): Homolog of NCBI NO: 21617908 NR Description: histone H2B [Arabidopsis thaliana]
  misc_feature (1)..(145): Homolog of NCBI NO: 15223016 NR Description: histone H2B, putative [Arabidopsis thaliana]
  misc_feature (1)..(145): Homolog of NCBI NO: 7439756 NR Description: histone H2B - tomato
  misc_feature (1)..(145): Homolog of NCBI NO: 7387726 NR Description: Histone H2B
  misc_feature (1)..(145): Homolog of NCBI NO: 21554180 NR Description: histone H2B-like protein [Arabidopsis thaliana]
  misc_feature (1)..(145): Homolog of NCBI NO: 15238563 NR Description: histone H2B [Arabidopsis thaliana]
  misc_feature (1)..(145): Homolog of NCBI NO: 15231304 NR Description: histone H2B [Arabidopsis thaliana]
  misc_feature (1)..(145): Homolog of NCBI NO: 15231313 NR Description: histone H2B, putative [Arabidopsis thaliana]
MAPKAEKKPAEKKPVEEKSKAEKAPAEKKPKAGKKLPKEAGAGGDKKKKMKKKSVETYKIYIFKVLKQVHPDIGISSKAMGIMNSFINDIFEKLASESSKLARYNKKPTITSREIQTAVRLVLPGELAKHAVSEGTKAVTKFTSS

SEQ ID NO: 21276 - protein, 96 aa, Arabidopsis thaliana
  peptide (1)..(96): Ceres Seq. ID no. 13497374
  misc_feature (1)..(95): Pfam Name: Core histone H2A/H2B/H3/H4 Pfam Description: Core histone H2A/H2B/H3/H4
  misc_feature (1)..(96): Homolog of NCBI NO: 7387727 NR Description: Histone H2B (CaH2B)
  misc_feature (1)..(96): Homolog of NCBI NO: 15226943 NR Description: histone H2B, putative [Arabidopsis thaliana]
  misc_feature (1)..(96): Homolog of NCBI NO: 21617908 NR Description: histone H2B [Arabidopsis thaliana]
  misc_feature (1)..(96): Homolog of NCBI NO: 15223016 NR Description: histone H2B, putative [Arabidopsis thaliana]
  misc_feature (1)..(96): Homolog of NCBI NO: 7439756 NR Description: histone H2B - tomato
  misc_feature (1)..(96): Homolog of NCBI NO: 7387726 NR Description: Histone H2B
  misc_feature (1)..(96): Homolog of NCBI NO: 21554180 NR Description: histone H2B-like protein [Arabidopsis thaliana]
  misc_feature (1)..(96): Homolog of NCBI NO: 15238563 NR Description: histone H2B [Arabidopsis thaliana]
  misc_feature (1)..(96): Homolog of NCBI NO: 15231304 NR Description: histone H2B [Arabidopsis thaliana]
  misc_feature (1)..(96): Homolog of NCBI NO: 15231313 NR Description: histone H2B, putative [Arabidopsis thaliana]
MKKKSVETYKIYIFKVLKQVHPDIGISSKAMGIMNSFINDIFEKLASESSKLARYNKKPTITSREIQTAVRLVLPGELAKHAVSEGTKAVTKFTSS

SEQ ID NO: 21277 - DNA, 1360 bp, Arabidopsis thaliana
  misc_feature (1)..(1360): Ceres Seq. ID no. 13487763
  misc_feature: MA Experiment ID: 108434 Result: Up-regulated in Transcription
  misc_feature: MA Experiment 108434 PARAMETER Experiment Name: At_Root_Tips_cDNA_P Parameter: Tissue Value: Root Tips
  misc_feature: MA Experiment ID: 108435 Result: Down-regulated in Transcription
  misc_feature: MA Experiment 108435 PARAMETER Experiment Name: At_stm_Mutants_cDNA_P Parameter: Plant Line Value: wt Landsburg vs stm
  misc_feature: MA Experiment 108435 PARAMETER Experiment Name: At_stm_Mutants_cDNA_P Parameter: Tissue Value: Shoot Apical Meristem Region
  misc_feature: MA Experiment ID: 108462 Result: Up-regulated in Transcription
  misc_feature: MA Experiment 108462 PARAMETER Experiment Name: At_Germinating_Seeds_cDNA_P Parameter: Age (day) Value: 2 vs. 0
  misc_feature: MA Experiment 108462 PARAMETER Experiment Name: At_Germinating_Seeds_cDNA_P Parameter: Tissue Value: Germinating Seeds
  misc_feature: MA Experiment ID: 108463 Result: Up-regulated in Transcription
  misc_feature: MA Experiment 108463 PARAMETER Experiment Name: At_Germinating_Seeds_cDNA_P Parameter: Age (day) Value: 3 vs. 0
  misc_feature: MA Experiment 108463 PARAMETER Experiment Name: At_Germinating_Seeds_cDNA_P Parameter: Tissue Value: Germinating Seeds
  misc_feature: MA Experiment ID: 108464 Result: Up-regulated in Transcription
  misc_feature: MA Experiment 108464 PARAMETER Experiment Name: At_Germinating_Seeds_cDNA_P Parameter: Age (day) Value: 4 vs. 0
  misc_feature: MA Experiment 108464 PARAMETER Experiment Name: At_Germinating_Seeds_cDNA_P Parameter: Tissue Value: Germinating Seeds
  misc_feature: MA Experiment ID: 108561 Result: Down-regulated in Transcription
  misc_feature: MA Experiment 108561 PARAMETER Experiment Name: At_100uM_ABA_cDNA_P Parameter: Timepoint (hr) Value: 6
  misc_feature: MA Experiment 108561 PARAMETER Experiment Name: At_100uM_ABA_cDNA_P Parameter: Tissue Value: Aerial
  misc_feature: MA Experiment 108561 PARAMETER Experiment Name: At_100uM_ABA_cDNA_P Parameter: Treatment Value: 100uM ABA vs. No Treatment
  misc_feature: MA Experiment ID: 108572 Result: Down-regulated in Transcription
  misc_feature: MA Experiment 108572 PARAMETER Experiment Name: At_Drought_cDNA_P Parameter: Timepoint (hr) Value: 1
  misc_feature: MA Experiment 108572 PARAMETER Experiment Name: At_Drought_cDNA_P Parameter: Tissue Value: Aerial
  misc_feature: MA Experiment 108572 PARAMETER Experiment Name: At_Drought_cDNA_P Parameter: Treatment Value: Drought vs. No Drought
  misc_feature: MA Experiment ID: 108573 Result: Down-regulated in Transcription
  misc_feature: MA Experiment 108573 PARAMETER Experiment Name: At_Drought_cDNA_P Parameter: Timepoint (hr) Value: 6
  misc_feature: MA Experiment 108573 PARAMETER Experiment Name: At_Drought_cDNA_P Parameter: Tissue Value: Aerial
  misc_feature: MA Experiment 108573 PARAMETER Experiment Name: At_Drought_cDNA_P Parameter: Treatment Value: Drought vs. No Drought
  misc_feature: MA Experiment ID: 108577 Result: Down-regulated in Transcription
  misc_feature: MA Experiment 108577 PARAMETER Experiment Name: At_42deg_Heat_cDNA_P Parameter: Temperature (deg C) Value: 42 vs. 22
  misc_feature: MA Experiment 108577 PARAMETER Experiment Name: At_42deg_Heat_cDNA_P Parameter: Timepoint (hr) Value: 6
  misc_feature: MA Experiment 108577 PARAMETER Experiment Name: At_42deg_Heat_cDNA_P Parameter: Tissue Value: Aerial
  misc_feature: MA Experiment ID: 108579 Result: Down-regulated in Transcription
  misc_feature: MA Experiment 108579 PARAMETER Experiment Name: At_4deg_Cold_cDNA_P Parameter: Temperature (deg C) Value: 4 vs. 22
  misc_feature: MA Experiment 108579 PARAMETER Experiment Name: At_4deg_Cold_cDNA_P Parameter: Timepoint (hr) Value: 6
  misc_feature: MA Experiment 108579 PARAMETER Experiment Name: At_4deg_Cold_cDNA_P Parameter: Tissue Value: Aerial
  misc_feature: MA Experiment ID: 108585 Result: Down-regulated in Transcription
  misc_feature: MA Experiment 108585 PARAMETER Experiment Name: At_5mM_NaNP_cDNA_P Parameter: Timepoint (hr) Value: 6
  misc_feature: MA Experiment 108585 PARAMETER Experiment Name: At_5mM_NaNP_cDNA_P Parameter: Tissue Value: Aerial
  misc_feature: MA Experiment 108585 PARAMETER Experiment Name: At_5mM_NaNP_cDNA_P Parameter: Treatment Value: null
  misc_feature: MA Experiment ID: 108595 Result: Down-regulated in Transcription
  misc_feature: MA Experiment 108595 PARAMETER Experiment Name: At_Ler-pi_Ovule_cDNA_P Parameter: Plant Line Value: null
  misc_feature: MA Experiment ID: 108605 Result: Down-regulated in Transcription
  misc_feature: MA Experiment 108605 PARAMETER Experiment Name: At_100uM_ABA_cDNA_P Parameter: Timepoint (hr) Value: 6
  misc_feature: MA Experiment 108605 PARAMETER Experiment Name: At_100uM_ABA_cDNA_P Parameter: Tissue Value: Aerial
  misc_feature: MA Experiment 108605 PARAMETER Experiment Name: At_100uM_ABA_cDNA_P Parameter: Treatment Value: 100uM ABA vs. No Treatment
  misc_feature: MA Experiment ID: 108607 Result: Down-regulated in Transcription
  misc_feature: MA Experiment 108607 PARAMETER Experiment Name: At_100uM_ABA_cDNA_P Parameter: Timepoint (hr) Value: 4
  misc_feature: MA Experiment 108607 PARAMETER Experiment Name: At_100uM_ABA_cDNA_P Parameter: Tissue Value: Aerial
  misc_feature: MA Experiment 108607 PARAMETER Experiment Name: At_100uM_ABA_cDNA_P Parameter: Treatment Value: 100uM ABA vs. No Treatment
  misc_feature: MA Experiment ID: 108608 Result: Down-regulated in Transcription
  misc_feature: MA Experiment 108608 PARAMETER Experiment Name: At_100uM_ABA_cDNA_P Parameter: Timepoint (hr) Value: 1
  misc_feature: MA Experiment 108608 PARAMETER Experiment Name: At_100uM_ABA_cDNA_P Parameter: Tissue Value: Aerial
  misc_feature: MA Experiment 108608 PARAMETER Experiment Name: At_100uM_ABA_cDNA_P Parameter: Treatment Value: 100uM ABA vs. No Treatment
  misc_feature: MA Experiment ID: 108609 Result: Down-regulated in Transcription
  misc_feature: MA Experiment 108609 PARAMETER Experiment Name: At_100uM_ABA_cDNA_P Parameter: Timepoint (hr) Value: 24
  misc_feature: MA Experiment 108609 PARAMETER Experiment Name: At_100uM_ABA_cDNA_P Parameter: Tissue Value: Aerial
  misc_feature: MA Experiment 108609 PARAMETER Experiment Name: At_100uM_ABA_cDNA_P Parameter: Treatment Value: 100uM ABA vs. No Treatment
  misc_feature: MA Experiment ID: 108668 Result: Down-regulated in Transcription
  misc_feature: MA Experiment 108668 PARAMETER Experiment Name: At_2mM_SA_cDNA_P Parameter: Plant Line Value: WS
  misc_feature: MA Experiment 108668 PARAMETER Experiment Name: At_2mM_SA_cDNA_P Parameter: Timepoint (hr) Value: 6
  misc_feature: MA Experiment 108668 PARAMETER Experiment Name: At_2mM_SA_cDNA_P Parameter: Treatment Value: 2mM SA vs. No Treatment
  misc_feature: MA Experiment ID: 20000070 Result: Down-regulated in Transcription
  misc_feature: MA Experiment 20000070 PARAMETER Experiment Name: At_100uM_ABA_Mutants_cDNA_P Parameter: Plant Line Value: CS24
  misc_feature: MA Experiment 20000070 PARAMETER Experiment Name: At_100uM_ABA_Mutants_cDNA_P Parameter: Timepoint (hr) Value: 6
  misc_feature: MA Experiment 20000070 PARAMETER Experiment Name: At_100uM_ABA_Mutants_cDNA_P Parameter: Tissue Value: Aerial
  misc_feature: MA Experiment 20000070 PARAMETER Experiment Name: At_100uM_ABA_Mutants_cDNA_P Parameter: Treatment Value: 100uM ABA vs. No Treatment
  misc_feature: MA Experiment ID: 20000086 Result: Down-regulated in Transcription
  misc_feature: MA Experiment 20000086 PARAMETER Experiment Name: At_100uM_ABA_Mutants_cDNA_P Parameter: Plant Line Value: CS22
  misc_feature: MA Experiment 20000086 PARAMETER Experiment Name: At_100uM_ABA_Mutants_cDNA_P Parameter: Timepoint (hr) Value: 6
  misc_feature: MA Experiment 20000086 PARAMETER Experiment Name: At_100uM_ABA_Mutants_cDNA_P Parameter: Tissue Value: Aerial
  misc_feature: MA Experiment 20000086 PARAMETER Experiment Name: At_100uM_ABA_Mutants_cDNA_P Parameter: Treatment Value: 100uM ABA vs. No Treatment
  misc_feature: MA Experiment ID: 20000087 Result: Down-regulated in Transcription
  misc_feature: MA Experiment 20000087 PARAMETER Experiment Name: At_100uM_ABA_Mutants_cDNA_P Parameter: Plant Line Value: WS
  misc_feature: MA Experiment 20000087 PARAMETER Experiment Name: At_100uM_ABA_Mutants_cDNA_P Parameter: Timepoint (hr) Value: 6
  misc_feature: MA Experiment 20000087 PARAMETER Experiment Name: At_100uM_ABA_Mutants_cDNA_P Parameter: Tissue Value: Aerial
  misc_feature: MA Experiment 20000087 PARAMETER Experiment Name: At_100uM_ABA_Mutants_cDNA_P Parameter: Treatment Value: 100uM ABA vs. No Treatment
  misc_feature: MA Experiment ID: 20000088 Result: Down-regulated in Transcription
  misc_feature: MA Experiment 20000088 PARAMETER Experiment Name: At_100uM_ABA_Mutants_cDNA_P Parameter: Plant Line Value: Landsberg
  misc_feature: MA Experiment 20000088 PARAMETER Experiment Name: At_100uM_ABA_Mutants_cDNA_P Parameter: Timepoint (hr) Value: 6
  misc_feature: MA Experiment 20000088 PARAMETER Experiment Name: At_100uM_ABA_Mutants_cDNA_P Parameter: Tissue Value: Aerial
  misc_feature: MA Experiment 20000088 PARAMETER Experiment Name: At_100uM_ABA_Mutants_cDNA_P Parameter: Treatment Value: 100uM ABA vs. No Treatment
  misc_feature: MA Experiment ID: 20000144 Result: Down-regulated in Transcription
  misc_feature: MA Experiment 20000144 PARAMETER Experiment Name: At_42deg_Heat_cDNA_P Parameter: Temperature (deg C) Value: 42 vs. 22
  misc_feature: MA Experiment 20000144 PARAMETER Experiment Name: At_42deg_Heat_cDNA_P Parameter: Timepoint (hr) Value: 1
  misc_feature: MA Experiment 20000144 PARAMETER Experiment Name: At_42deg_Heat_cDNA_P Parameter: Tissue Value: Aerial
  misc_feature: MA Experiment ID: 20000166 Result: Down-regulated in Transcription
  misc_feature: MA Experiment 20000166 PARAMETER Experiment Name: At_100uM_ABA_P Parameter: Age (day) Value: 14
  misc_feature: MA Experiment 20000166 PARAMETER Experiment Name: At_100uM_ABA_P Parameter: Organism Value: A. thaliana
  misc_feature: MA Experiment 20000166 PARAMETER Experiment Name: At_100uM_ABA_P Parameter: Plant Line Value: WS
  misc_feature: MA Experiment 20000166 PARAMETER Experiment Name: At_100uM_ABA_P Parameter: Timepoint (hr) Value: 1
  misc_feature: MA Experiment 20000166 PARAMETER Experiment Name: At_100uM_ABA_P Parameter: Tissue Value: Aerial
  misc_feature: MA Experiment 20000166 PARAMETER Experiment Name: At_100uM_ABA_P Parameter: Treatment Value: 100uM ABA vs. No Treatment
  misc_feature: MA Experiment ID: 20000169 Result: Down-regulated in Transcription
  misc_feature: MA Experiment 20000169 PARAMETER Experiment Name: At_100uM_ABA_P Parameter: Age (day) Value: 14
  misc_feature: MA Experiment 20000169 PARAMETER Experiment Name: At_100uM_ABA_P Parameter: Organism Value: A. thaliana
  misc_feature: MA Experiment 20000169 PARAMETER Experiment Name: At_100uM_ABA_P Parameter: Plant Line Value: WS
  misc_feature: MA Experiment 20000169 PARAMETER Experiment Name: At_100uM_ABA_P Parameter: Timepoint (hr) Value: 6
  misc_feature: MA Experiment 20000169 PARAMETER Experiment Name: At_100uM_ABA_P Parameter: Tissue Value: Aerial
  misc_feature: MA Experiment 20000169 PARAMETER Experiment Name: At_100uM_ABA_P Parameter: Treatment Value: 100uM ABA vs. No Treatment
  misc_feature: MA Experiment ID: 20000171 Result: Down-regulated in Transcription
  misc_feature: MA Experiment 20000171 PARAMETER Experiment Name: At_42deg_Heat_P Parameter: Age (day) Value: 14
  misc_feature: MA Experiment 20000171 PARAMETER Experiment Name: At_42deg_Heat_P Parameter: Organism Value: A. thaliana
  misc_feature: MA Experiment 20000171 PARAMETER Experiment Name: At_42deg_Heat_P Parameter: Plant Line Value: WS
  misc_feature: MA Experiment 20000171 PARAMETER Experiment Name: At_42deg_Heat_P Parameter: Temperature (deg C) Value: 42 vs. 22
  misc_feature: MA Experiment 20000171 PARAMETER Experiment Name: At_42deg_Heat_P Parameter: Timepoint (hr) Value: 1
  misc_feature: MA Experiment 20000171 PARAMETER Experiment Name: At_42deg_Heat_P Parameter: Tissue Value: Aerial
  misc_feature: MA Experiment ID: 20000173 Result: Down-regulated in Transcription
  misc_feature: MA Experiment 20000173 PARAMETER Experiment Name: At_42deg_Heat_P Parameter: Age (day) Value: 14
  misc_feature: MA Experiment 20000173 PARAMETER Experiment Name: At_42deg_Heat_P Parameter: Organism Value: A. thaliana
  misc_feature: MA Experiment 20000173 PARAMETER Experiment Name: At_42deg_Heat_P Parameter: Plant Line Value: WS
  misc_feature: MA Experiment 20000173 PARAMETER Experiment Name: At_42deg_Heat_P Parameter: Temperature (deg C) Value: 42 vs. 22
  misc_feature: MA Experiment 20000173 PARAMETER Experiment Name: At_42deg_Heat_P Parameter: Timepoint (hr) Value: 6
  misc_feature: MA Experiment 20000173 PARAMETER Experiment Name: At_42deg_Heat_P Parameter: Tissue Value: Aerial
  misc_feature: MA Experiment ID: 20000180 Result: Up-regulated in Transcription
  misc_feature: MA Experiment 20000180 PARAMETER Experiment Name: At_Germinating_Seeds_P Parameter: Age (hr) Value: 24 vs. 0
  misc_feature: MA Experiment 20000180 PARAMETER Experiment Name: At_Germinating_Seeds_P Parameter: Tissue Value: Germinating Seeds
  misc_feature: MA Experiment ID: 20000182 Result: Down-regulated in Transcription
  misc_feature: MA Experiment 20000182 PARAMETER Experiment Name: At_2mM_SA_P Parameter: Age (day) Value: 14
  misc_feature: MA Experiment 20000182 PARAMETER Experiment Name: At_2mM_SA_P Parameter: Organism Value: A. thaliana
  misc_feature: MA Experiment 20000182 PARAMETER Experiment Name: At_2mM_SA_P Parameter: Plant Line Value: WS
  misc_feature: MA Experiment 20000182 PARAMETER Experiment Name: At_2mM_SA_P Parameter: Timepoint (hr) Value: 6
  misc_feature: MA Experiment 20000182 PARAMETER Experiment Name: At_2mM_SA_P Parameter: Tissue Value: Aerial
  misc_feature: MA Experiment 20000182 PARAMETER Experiment Name: At_2mM_SA_P Parameter: Treatment Value: 2mM SA vs. No Treatment
  misc_feature: MA Experiment ID: 20000185 Result: Down-regulated in Transcription
  misc_feature: MA Experiment 20000185 PARAMETER Experiment Name: At_Roots__P Parameter: Age (day) Value: 7 vs. 21
  misc_feature: MA Experiment 20000185 PARAMETER Experiment Name: At_Roots__P Parameter: Organism Value: A. thaliana
  misc_feature: MA Experiment 20000185 PARAMETER Experiment Name: At_Roots__P Parameter: Tissue Value: Roots vs. Whole Plant
  misc_feature: MA Experiment ID: 20000224 Result: Up-regulated in Transcription
  misc_feature: MA Experiment ID: 20000265 Result: Up-regulated in Transcription
  misc_feature: MA Experiment 20000265 PARAMETER Experiment Name: At_Open_Flower_P Parameter: Age (day) Value: 21
  misc_feature: MA Experiment 20000265 PARAMETER Experiment Name: At_Open_Flower_P Parameter: Plant Line Value: WS
  misc_feature: MA Experiment 20000265 PARAMETER Experiment Name: At_Open_Flower_P Parameter: Tissue Value: Closed Flower vs. Whole Plant
  misc_feature: MA Experiment ID: 20000268 Result: Down-regulated in Transcription
  misc_feature: MA Experiment 20000268 PARAMETER Experiment Name: At_100mM_NaCl__P Parameter: Age (day) Value: 14
  misc_feature: MA Experiment 20000268 PARAMETER Experiment Name: At_100mM_NaCl__P Parameter: Organism Value: A. thaliana
  misc_feature: MA Experiment 20000268 PARAMETER Experiment Name: At_100mM_NaCl__P Parameter: Plant Line Value: WS
  misc_feature: MA Experiment 20000268 PARAMETER Experiment Name: At_100mM_NaCl__P Parameter: Timepoint (hr) Value: 6
  misc_feature: MA Experiment 20000268 PARAMETER Experiment Name: At_100mM_NaCl__P Parameter: Tissue Value: Whole Plant
  misc_feature: MA Experiment 20000268 PARAMETER Experiment Name: At_100mM_NaCl__P Parameter: Treatment Value: 100mM NaCl vs. No Treatment
  misc_feature: MA Experiment ID: 20000286 Result: Up-regulated in Transcription
  misc_feature: MA Experiment 20000286 PARAMETER Experiment Name: At_Open_Flower_P Parameter: Age (day) Value: 21
  misc_feature: MA Experiment 20000286 PARAMETER Experiment Name: At_Open_Flower_P Parameter: Plant Line Value: WS
  misc_feature: MA Experiment 20000286 PARAMETER Experiment Name: At_Open_Flower_P Parameter: Tissue Value: Half Open vs. Whole Plant
  misc_feature: MA Experiment ID: 20000436 Result: Down-regulated in Transcription
  misc_feature: MA Experiment 20000436 PARAMETER Experiment Name: At_Drought_P Parameter: Age (day) Value: 7
  misc_feature: MA Experiment 20000436 PARAMETER Experiment Name: At_Drought_P Parameter: Organism Value: A. thaliana
  misc_feature: MA Experiment 20000436 PARAMETER Experiment Name: At_Drought_P Parameter: Plant Line Value: WS
  misc_feature: MA Experiment 20000436 PARAMETER Experiment Name: At_Drought_P Parameter: Timepoint (hr) Value: 12
  misc_feature: MA Experiment 20000436 PARAMETER Experiment Name: At_Drought_P Parameter: Tissue Value: Whole Plant
  misc_feature: MA Experiment 20000436 PARAMETER Experiment Name: At_Drought_P Parameter: Treatment Value: Drought vs. No Drought
  misc_feature: MA Experiment ID: 20000437 Result: Down-regulated in Transcription
  misc_feature: MA Experiment 20000437 PARAMETER Experiment Name: At_Drought_P Parameter: Age (day) Value: 8
  misc_feature: MA Experiment 20000437 PARAMETER Experiment Name: At_Drought_P Parameter: Organism Value: A. thaliana
  misc_feature: MA Experiment 20000437 PARAMETER Experiment Name: At_Drought_P Parameter: Plant Line Value: WS
  misc_feature: MA Experiment 20000437 PARAMETER Experiment Name: At_Drought_P Parameter: Timepoint (hr) Value: 24
  misc_feature: MA Experiment 20000437 PARAMETER Experiment Name: At_Drought_P Parameter: Tissue Value: Whole Plant
  misc_feature: MA Experiment 20000437 PARAMETER Experiment Name: At_Drought_P Parameter: Treatment Value: Drought vs. No Drought
  misc_feature: MA Experiment ID: 20000439 Result: Down-regulated in Transcription
  misc_feature: MA Experiment 20000439 PARAMETER Experiment Name: At_Roots__P Parameter: Age (day) Value: 14 vs. 21
  misc_feature: MA Experiment 20000439 PARAMETER Experiment Name: At_Roots__P Parameter: Organism Value: A. thaliana
  misc_feature: MA Experiment 20000439 PARAMETER Experiment Name: At_Roots__P Parameter: Tissue Value: Roots vs. Whole Plant
  misc_feature: MA Experiment ID: 20000453 Result: Down-regulated in Transcription
  misc_feature: MA Experiment 20000453 PARAMETER Experiment Name: At_100uM_ABA_P Parameter: Age (day) Value: 15
  misc_feature: MA Experiment 20000453 PARAMETER Experiment Name: At_100uM_ABA_P Parameter: Organism Value: A. thaliana
  misc_feature: MA Experiment 20000453 PARAMETER Experiment Name: At_100uM_ABA_P Parameter: Plant Line Value: WS
  misc_feature: MA Experiment 20000453 PARAMETER Experiment Name: At_100uM_ABA_P Parameter: Timepoint (hr) Value: 24
  misc_feature: MA Experiment 20000453 PARAMETER Experiment Name: At_100uM_ABA_P Parameter: Tissue Value: Aerial
  misc_feature: MA Experiment 20000453 PARAMETER Experiment Name: At_100uM_ABA_P Parameter: Treatment Value: 100uM ABA vs. No Treatment
  misc_feature: MA Experiment ID: 20001247 Result: Up-regulated in Transcription
  misc_feature: MA Experiment 20001247 PARAMETER Experiment Name: At_Far-red-induction_P Parameter: Age (day) Value: 7
  misc_feature: MA Experiment 20001247 PARAMETER Experiment Name: At_Far-red-induction_P Parameter: Light Value: Far-red vs. White
  misc_feature: MA Experiment 20001247 PARAMETER Experiment Name: At_Far-red-induction_P Parameter: Organism Value: A. thaliana
  misc_feature: MA Experiment 20001247 PARAMETER Experiment Name: At_Far-red-induction_P Parameter: Plant Line Value: Columbia
  misc_feature: MA Experiment 20001247 PARAMETER Experiment Name: At_Far-red-induction_P Parameter: Timepoint (hr) Value: 1
  misc_feature: MA Experiment 20001247 PARAMETER Experiment Name: At_Far-red-induction_P Parameter: Tissue Value: Whole Plant
  misc_feature: MA Experiment ID: 20001248 Result: Down-regulated in Transcription
  misc_feature: MA Experiment 20001248 PARAMETER Experiment Name: At_Far-red-induction_P Parameter: Age (day) Value: 7
  misc_feature: MA Experiment 20001248 PARAMETER Experiment Name: At_Far-red-induction_P Parameter: Light Value: Far-red vs. White
  misc_feature: MA Experiment 20001248 PARAMETER Experiment Name: At_Far-red-induction_P Parameter: Organism Value: A. thaliana
  misc_feature: MA Experiment 20001248 PARAMETER Experiment Name: At_Far-red-induction_P Parameter: Plant Line Value: Columbia
  misc_feature: MA Experiment 20001248 PARAMETER Experiment Name: At_Far-red-induction_P Parameter: Timepoint (hr) Value: 4
  misc_feature: MA Experiment 20001248 PARAMETER Experiment Name: At_Far-red-induction_P Parameter: Tissue Value: Whole Plant
  misc_feature: MA Experiment ID: 20001554 Result: Down-regulated in Transcription
  misc_feature: MA Experiment 20001554 PARAMETER Experiment Name: At_Drought_Soil_Dry_P Parameter: Age (day) Value: 21
  misc_feature: MA Experiment 20001554 PARAMETER Experiment Name: At_Drought_Soil_Dry_P Parameter: Organism Value: A. thaliana
  misc_feature: MA Experiment 20001554 PARAMETER Experiment Name: At_Drought_Soil_Dry_P Parameter: Plant Line Value: WS
  misc_feature: MA Experiment 20001554 PARAMETER Experiment Name: At_Drought_Soil_Dry_P Parameter: Post Timepoint (hr) Value: None
  misc_feature: MA Experiment 20001554 PARAMETER Experiment Name: At_Drought_Soil_Dry_P Parameter: Post-Treatment Value: None
  misc_feature: MA Experiment 20001554 PARAMETER Experiment Name: At_Drought_Soil_Dry_P Parameter: Timepoint (day) Value: 7
  misc_feature: MA Experiment 20001554 PARAMETER Experiment Name: At_Drought_Soil_Dry_P Parameter: Treatment Value: Drought vs. No Drought
  misc_feature: MA Experiment ID: 20001555 Result: Down-regulated in Transcription
  misc_feature: MA Experiment 20001555 PARAMETER Experiment Name: At_Drought_Soil_Dry_P Parameter: Age (day) Value: 24
  misc_feature: MA Experiment 20001555 PARAMETER Experiment Name: At_Drought_Soil_Dry_P Parameter: Organism Value: A. thaliana
  misc_feature: MA Experiment 20001555 PARAMETER Experiment Name: At_Drought_Soil_Dry_P Parameter: Plant Line Value: WS
  misc_feature: MA Experiment 20001555 PARAMETER Experiment Name: At_Drought_Soil_Dry_P Parameter: Post Timepoint (hr) Value: None
  misc_feature: MA Experiment 20001555 PARAMETER Experiment Name: At_Drought_Soil_Dry_P Parameter: Post-Treatment Value: None
  misc_feature: MA Experiment 20001555 PARAMETER Experiment Name: At_Drought_Soil_Dry_P Parameter: Timepoint (day) Value: 10
  misc_feature: MA Experiment 20001555 PARAMETER Experiment Name: At_Drought_Soil_Dry_P Parameter: Treatment Value: Drought vs. No Drought
  misc_feature: MA Experiment ID: 20001556 Result: Down-regulated in Transcription
  misc_feature: MA Experiment 20001556 PARAMETER Experiment Name: At_Drought_Soil_Dry_P Parameter: Age (day) Value: 26
  misc_feature: MA Experiment 20001556 PARAMETER Experiment Name: At_Drought_Soil_Dry_P Parameter: Organism Value: A. thaliana
  misc_feature: MA Experiment 20001556 PARAMETER Experiment Name: At_Drought_Soil_Dry_P Parameter: Plant Line Value: WS
  misc_feature: MA Experiment 20001556 PARAMETER Experiment Name: At_Drought_Soil_Dry_P Parameter: Post Timepoint (hr) Value: None
  misc_feature: MA Experiment 20001556 PARAMETER Experiment Name: At_Drought_Soil_Dry_P Parameter: Post-Treatment Value: None
  misc_feature: MA Experiment 20001556 PARAMETER Experiment Name: At_Drought_Soil_Dry_P Parameter: Timepoint (day) Value: 12
  misc_feature: MA Experiment 20001556 PARAMETER Experiment Name: At_Drought_Soil_Dry_P Parameter: Treatment Value: Drought vs. No Drought
  misc_feature: MA Experiment ID: 20001559 Result: Down-regulated in Transcription
  misc_feature: MA Experiment 20001559 PARAMETER Experiment Name: At_Drought_Soil_Dry_P Parameter: Age (day) Value: 28
  misc_feature: MA Experiment 20001559 PARAMETER Experiment Name: At_Drought_Soil_Dry_P Parameter: Organism Value: A. thaliana
  misc_feature: MA Experiment 20001559 PARAMETER Experiment Name: At_Drought_Soil_Dry_P Parameter: Plant Line Value: WS
  misc_feature: MA Experiment 20001559 PARAMETER Experiment Name: At_Drought_Soil_Dry_P Parameter: Post Timepoint (hr) Value: 29
  misc_feature: MA Experiment 20001559 PARAMETER Experiment Name: At_Drought_Soil_Dry_P Parameter: Post-Treatment Value: Re-Water vs. No Drought
  misc_feature: MA Experiment 20001559 PARAMETER Experiment Name: At_Drought_Soil_Dry_P Parameter: Timepoint (day) Value: 14
  misc_feature: MA Experiment 20001559 PARAMETER Experiment Name: At_Drought_Soil_Dry_P Parameter: Treatment Value: Drought vs. No Drought
  misc_feature: MA Experiment ID: 20001560 Result: Down-regulated in Transcription
  misc_feature: MA Experiment 20001560 PARAMETER Experiment Name: At_Drought_Soil_Dry_P Parameter: Age (day) Value: 28
  misc_feature: MA Experiment 20001560 PARAMETER Experiment Name: At_Drought_Soil_Dry_P Parameter: Organism Value: A. thaliana
  misc_feature: MA Experiment 20001560 PARAMETER Experiment Name: At_Drought_Soil_Dry_P Parameter: Plant Line Value: WS
  misc_feature: MA Experiment 20001560 PARAMETER Experiment Name: At_Drought_Soil_Dry_P Parameter: Post Timepoint (hr) Value: None
  misc_feature: MA Experiment 20001560 PARAMETER Experiment Name: At_Drought_Soil_Dry_P Parameter: Post-Treatment Value: None
  misc_feature: MA Experiment 20001560 PARAMETER Experiment Name: At_Drought_Soil_Dry_P Parameter: Timepoint (day) Value: 14
  misc_feature: MA Experiment 20001560 PARAMETER Experiment Name: At_Drought_Soil_Dry_P Parameter: Treatment Value: Drought vs. No Drought
  misc_feature: MA Experiment ID: 20001757 Result: Up-regulated in Transcription
  misc_feature: MA Experiment 20001757 PARAMETER Experiment Name: At_50mM_NH4NO3_L-to-H_P Parameter: Timepoint (hr) Value: 6
  misc_feature: MA Experiment 20001757 PARAMETER Experiment Name: At_50mM_NH4NO3_L-to-H_P Parameter: Tissue Value: Leaf
  misc_feature: MA Experiment 20001757 PARAMETER Experiment Name: At_50mM_NH4NO3_L-to-H_P Parameter: Treatment Value: 50mM NH4NO3 vs 100mM Mannitol
  misc_feature: MA Experiment ID: 20001904 Result: Down-regulated in Transcription
  misc_feature: MA Experiment 20001904 PARAMETER Experiment Name: At_Drought_Reproduction_P Parameter: Age (day) Value: 37
  misc_feature: MA Experiment 20001904 PARAMETER Experiment Name: At_Drought_Reproduction_P Parameter: Organism Value: A. thaliana
  misc_feature: MA Experiment 20001904 PARAMETER Experiment Name: At_Drought_Reproduction_P Parameter: Plant Line Value: WS
  misc_feature: MA Experiment 20001904 PARAMETER Experiment Name: At_Drought_Reproduction_P Parameter: Timepoint (day) Value: 7
  misc_feature: MA Experiment 20001904 PARAMETER Experiment Name: At_Drought_Reproduction_P Parameter: Tissue Value: Rosettes
  misc_feature: MA Experiment 20001904 PARAMETER Experiment Name: At_Drought_Reproduction_P Parameter: Treatment Value: Drought vs. No Drought
  misc_feature: MA Experiment ID: 20001906 Result: Down-regulated in Transcription
  misc_feature: MA Experiment 20001906 PARAMETER Experiment Name: At_Drought_Reproduction_P Parameter: Age (day) Value: 35
  misc_feature: MA Experiment 20001906 PARAMETER Experiment Name: At_Drought_Reproduction_P Parameter: Organism Value: A. thaliana
  misc_feature: MA Experiment 20001906 PARAMETER Experiment Name: At_Drought_Reproduction_P Parameter: Plant Line Value: WS
  misc_feature: MA Experiment 20001906 PARAMETER Experiment Name: At_Drought_Reproduction_P Parameter: Timepoint (day) Value: 5
  misc_feature: MA Experiment 20001906 PARAMETER Experiment Name: At_Drought_Reproduction_P Parameter: Tissue Value: Siliques
  misc_feature: MA Experiment 20001906 PARAMETER Experiment Name: At_Drought_Reproduction_P Parameter: Treatment Value: Drought vs. No Drought
  misc_feature: MA Experiment ID: 20001908 Result: Down-regulated in Transcription
  misc_feature: MA Experiment 20001908 PARAMETER Experiment Name: At_Drought_Reproduction_P Parameter: Age (day) Value: 40
  misc_feature: MA Experiment 20001908 PARAMETER Experiment Name: At_Drought_Reproduction_P Parameter: Organism Value: A. thaliana
  misc_feature: MA Experiment 20001908 PARAMETER Experiment Name: At_Drought_Reproduction_P Parameter: Plant Line Value: WS
  misc_feature: MA Experiment 20001908 PARAMETER Experiment Name: At_Drought_Reproduction_P Parameter: Timepoint (day) Value: 10
  misc_feature: MA Experiment 20001908 PARAMETER Experiment Name: At_Drought_Reproduction_P Parameter: Tissue Value: Siliques
  misc_feature: MA Experiment 20001908 PARAMETER Experiment Name: At_Drought_Reproduction_P Parameter: Treatment Value: Drought vs. No Drought
  misc_feature: MA Experiment ID: 20001911 Result: Down-regulated in Transcription
  misc_feature: MA Experiment 20001911 PARAMETER Experiment Name: At_Drought_Reproduction_P Parameter: Age (day) Value: 40
  misc_feature: MA Experiment 20001911 PARAMETER Experiment Name: At_Drought_Reproduction_P Parameter: Organism Value: A. thaliana
  misc_feature: MA Experiment 20001911 PARAMETER Experiment Name: At_Drought_Reproduction_P Parameter: Plant Line Value: WS
  misc_feature: MA Experiment 20001911 PARAMETER Experiment Name: At_Drought_Reproduction_P Parameter: Timepoint (day) Value: 10
  misc_feature: MA Experiment 20001911 PARAMETER Experiment Name: At_Drought_Reproduction_P Parameter: Tissue Value: Flowers
  misc_feature: MA Experiment 20001911 PARAMETER Experiment Name: At_Drought_Reproduction_P Parameter: Treatment Value: Drought vs. No Drought
atctcatttatcatcatccttcaagaacacaaagctagacagaaaaaaaaaaatgtgttcctcaaaattaaaaaatctgacccaagaaaacatttctcagatcaacggccgtccggttcttcaaccgaagtcgaaccaagttccgacattagaccgacgtaactcactaaaaaaatcgcctcctaagcctttgaatccaattgcatcaaagataccctcaccaagaccaatttctctaatctctcctcctttgtctcccaacacaaaatccttaagaaaaccggccggttcttgcaaggaacttcttaggtctagctctacaaaatcgaaaccagtgatatcaccagagaacagtgatggtggctacaaagaggttatgcctatggtgattgttcaaaagcagcctggaagtatagcagctgccagaagagaagaggttgcaatgaaacaagaagagagaaagaagaaaatttctcattacggtagaatcaaatccgtaaaatcgaatgaaaagaacttaaatgttgagcatgagaagaagaagagatgcagtttcatcactacaagttcagatccaatatatgtcgcttaccatgacaaagaatggggagttccagttcatgatgacaatctactatttgagcttctggtgttaaccggagctcaggtcggatcagattggacttcggttttaaagagaagaaacacttttagagaggctttctctggtttcgaagcagagttggtcgcagacttcaacgagaagaagatacaatcaatagtcaacgactatggcattaaccttagccaagtccttgcagttgttgacaacgctaaacaaattctcaaggtgaaaagagatttggggtcattcaacaaatacatttgggggtttatgaaacacaaaccggtcaccacaaaatacacatcatgccaaaagataccggttaagacatcgaaatcggagactataagcaaagacatggttcgtcgtgggtttagattcgttggtccgacggttatacattcgttaatgcaagccgccggtttaaccaacgaccacttgatcacatgtccgaggcatctcgagtgtacggccatggcggctttataggcaaaaggatcatgttgtaattgttgttgtagtcacattggctttaatttatatgtaaataaataatattttgtgttattattttagtactatagctcttctttttgtcaacattgtagtactatatctaccatgtgatatttaggtttgaggtcctaactttaggtattgatatttgtacaaaagctttttgtgtctgtgtttgtgattctgctttaaatttaatatatgtgtgtgtgtttattt

SEQ ID NO: 21278 - protein, 370 aa, Arabidopsis thaliana
  peptide (1)..(370): Ceres Seq. ID no. 13487764
  misc_feature (185)..(363): Pfam Name: Methyladenine glycosylase Pfam Description: Methyladenine glycosylase
  misc_feature (57)..(368): Homolog of NCBI NO: 38345034 NR Description: OSJNBa0029H02.18 [Oryza sativa (japonica
  misc_feature (54)..(364): Homolog of NCBI NO: 15218379 NR Description: expressed protein [Arabidopsis thaliana]
  misc_feature (178)..(364): Homolog of NCBI NO: 15242914 NR Description: expressed protein [Arabidopsis thaliana]
  misc_feature (18)..(69): Homolog of NCBI NO: 34908920 NR Description: P0691E06.10 [Oryza sativa (japonica
  misc_feature (190)..(369): Homolog of NCBI NO: 34908920 NR Description: P0691E06.10 [Oryza sativa (japonica
  misc_feature (43)..(207): Homolog of NCBI NO: 34908920 NR Description: P0691E06.10 [Oryza sativa (japonica
  misc_feature (82)..(368): Homolog of NCBI NO: 21536975 NR Description: unknown [Arabidopsis thaliana]
  misc_feature (82)..(368): Homolog of NCBI NO: 18399721 NR Description: expressed protein [Arabidopsis thaliana]
  misc_feature (18)..(370): Homolog of NCBI NO: 21592537 NR Description: unknown [Arabidopsis thaliana]
  misc_feature (18)..(370): Homolog of NCBI NO: 15241554 NR Description: expressed protein [Arabidopsis thaliana]
SHLSSSFKNTKLDRKKKMCSSKLKNLTQENISQINGRPVLQPKSNQVPTLDRRNSLKKSPPKPLNPIASKIPSPRPISLISPPLSPNTKSLRKPAGSCKELLRSSSTKSKPVISPENSDGGYKEVMPMVIVQKQPGSIAAARREEVAMKQEERKKKISHYGRIKSVKSNEKNLNVEHEKKKRCSFITTSSDPIYVAYHDKEWGVPVHDDNLLFELLVLTGAQVGSDWTSVLKRRNTFREAFSGFEAELVADFNEKKIQSIVNDYGINLSQVLAVVDNAKQILKVKRDLGSFNKYIWGFMKHKPVTTKYTSCQKIPVKTSKSETISKDMVRRGFRFVGPTVIHSLMQAAGLTNDHLITCPRHLECTAMAAL

SEQ ID NO: 21279 - protein, 353 aa, Arabidopsis thaliana
  peptide (1)..(353): Ceres Seq. ID no. 13487765
  misc_feature (168)..(346): Pfam Name: Methyladenine glycosylase Pfam Description: Methyladenine glycosylase
  misc_feature (40)..(351): Homolog of NCBI NO: 38345034 NR Description: OSJNBa0029H02.18 [Oryza sativa (japonica
  misc_feature (37)..(347): Homolog of NCBI NO: 15218379 NR Description: expressed protein [Arabidopsis thaliana]
  misc_feature (161)..(347): Homolog of NCBI NO: 15242914 NR Description: expressed protein [Arabidopsis thaliana]
  misc_feature (1)..(52): Homolog of NCBI NO: 34908920 NR Description: P0691E06.10 [Oryza sativa (japonica
  misc_feature (173)..(352): Homolog of NCBI NO: 34908920 NR Description: P0691E06.10 [Oryza sativa (japonica
  misc_feature (26)..(190): Homolog of NCBI NO: 34908920 NR Description: P0691E06.10 [Oryza sativa (japonica
  misc_feature (65)..(351): Homolog of NCBI NO: 21536975 NR Description: unknown [Arabidopsis thaliana]
  misc_feature (65)..(351): Homolog of NCBI NO: 18399721 NR Description: expressed protein [Arabidopsis thaliana]
  misc_feature (1)..(353): Homolog of NCBI NO: 21592537 NR Description: unknown [Arabidopsis thaliana]
  misc_feature (1)..(353): Homolog of NCBI NO: 15241554 NR Description: expressed protein [Arabidopsis thaliana]
MCSSKLKNLTQENISQINGRPVLQPKSNQVPTLDRRNSLKKSPPKPLNPIASKIPSPRPISLISPPLSPNTKSLRKPAGSCKELLRSSSTKSKPVISPENSDGGYKEVMPMVIVQKQPGSIAAARREEVAMKQEERKKKISHYGRIKSVKSNEKNLNVEHEKKKRCSFITTSSDPIYVAYHDKEWGVPVHDDNLLFELLVLTGAQVGSDWTSVLKRRNTFREAFSGFEAELVADFNEKKIQSIVNDYGINLSQVLAVVDNAKQILKVKRDLGSFNKYIWGFMKHKPVTTKYTSCQKIPVKTSKSETISKDMVRRGFRFVGPTVIHSLMQAAGLTNDHLITCPRHLECTAMAAL

SEQ ID NO: 21280 - protein, 245 aa, Arabidopsis thaliana
  peptide (1)..(245): Ceres Seq. ID no. 13487766
  misc_feature (60)..(238): Pfam Name: Methyladenine glycosylase Pfam Description: Methyladenine glycosylase
  misc_feature (56)..(239): Homolog of NCBI NO: 18410766 NR Description: DNA-3-methyladenine glycosylase I -related
  misc_feature (1)..(243): Homolog of NCBI NO: 38345034 NR Description: OSJNBa0029H02.18 [Oryza sativa (japonica
  misc_feature (1)..(239): Homolog of NCBI NO: 15218379 NR Description: expressed protein [Arabidopsis thaliana]
  misc_feature (53)..(239): Homolog of NCBI NO: 15242914 NR Description: expressed protein [Arabidopsis thaliana]
  misc_feature (65)..(244): Homolog of NCBI NO: 34908920 NR Description: P0691E06.10 [Oryza sativa (japonica
  misc_feature (1)..(82): Homolog of NCBI NO: 34908920 NR Description: P0691E06.10 [Oryza sativa (japonica
  misc_feature (1)..(243): Homolog of NCBI NO: 21536975 NR Description: unknown [Arabidopsis thaliana]
  misc_feature (1)..(243): Homolog of NCBI NO: 18399721 NR Description: expressed protein [Arabidopsis thaliana]
  misc_feature (1)..(245): Homolog of NCBI NO: 21592537 NR Description: unknown [Arabidopsis thaliana]
  misc_feature (1)..(245): Homolog of NCBI NO: 15241554 NR Description: expressed protein [Arabidopsis thaliana]
MPMVIVQKQPGSIAAARREEVAMKQEERKKKISHYGRIKSVKSNEKNLNVEHEKKKRCSFITTSSDPIYVAYHDKEWGVPVHDDNLLFELLVLTGAQVGSDWTSVLKRRNTFREAFSGFEAELVADFNEKKIQSIVNDYGINLSQVLAVVDNAKQILKVKRDLGSFNKYIWGFMKHKPVTTKYTSCQKIPVKTSKSETISKDMVRRGFRFVGPTVIHSLMQAAGLTNDHLITCPRHLECTAMAAL

SEQ ID NO: 21281 - DNA, 814 bp, Arabidopsis thaliana
  misc_feature (1)..(814): Ceres Seq. ID no. 12340005
  misc_feature: MA Experiment ID: 108434 Result: Up-regulated in Transcription
  misc_feature: MA Experiment 108434 PARAMETER Experiment Name: At_Root_Tips_cDNA_P Parameter: Tissue Value: Root Tips
  misc_feature: MA Experiment ID: 108488 Result: Up-regulated in Transcription
  misc_feature: MA Experiment ID: 108595 Result: Down-regulated in Transcription
  misc_feature: MA Experiment 108595 PARAMETER Experiment Name: At_Ler-pi_Ovule_cDNA_P Parameter: Plant Line Value: null
  misc_feature: MA Experiment ID: 108607 Result: Down-regulated in Transcription
  misc_feature: MA Experiment 108607 PARAMETER Experiment Name: At_100uM_ABA_cDNA_P Parameter: Timepoint (hr) Value: 4
  misc_feature: MA Experiment 108607 PARAMETER Experiment Name: At_100uM_ABA_cDNA_P Parameter: Tissue Value: Aerial
  misc_feature: MA Experiment 108607 PARAMETER Experiment Name: At_100uM_ABA_cDNA_P Parameter: Treatment Value: 100uM ABA vs. No Treatment
  misc_feature: MA Experiment ID: 20000069 Result: Down-regulated in Transcription
  misc_feature: MA Experiment 20000069 PARAMETER Experiment Name: At_100uM_ABA_Mutants_cDNA_P Parameter: Plant Line Value: CS23
  misc_feature: MA Experiment 20000069 PARAMETER Experiment Name: At_100uM_ABA_Mutants_cDNA_P Parameter: Timepoint (hr) Value: 6
  misc_feature: MA Experiment 20000069 PARAMETER Experiment Name: At_100uM_ABA_Mutants_cDNA_P Parameter: Tissue Value: Aerial
  misc_feature: MA Experiment 20000069 PARAMETER Experiment Name: At_100uM_ABA_Mutants_cDNA_P Parameter: Treatment Value: 100uM ABA vs. No Treatment
  misc_feature: MA Experiment ID: 20000070 Result: Down-regulated in Transcription
  misc_feature: MA Experiment 20000070 PARAMETER Experiment Name: At_100uM_ABA_Mutants_cDNA_P Parameter: Plant Line Value: CS24
  misc_feature: MA Experiment 20000070 PARAMETER Experiment Name: At_100uM_ABA_Mutants_cDNA_P Parameter: Timepoint (hr) Value: 6
  misc_feature: MA Experiment 20000070 PARAMETER Experiment Name: At_100uM_ABA_Mutants_cDNA_P Parameter: Tissue Value: Aerial
  misc_feature: MA Experiment 20000070 PARAMETER Experiment Name: At_100uM_ABA_Mutants_cDNA_P Parameter: Treatment Value: 100uM ABA vs. No Treatment
  misc_feature: MA Experiment ID: 20000071 Result: Down-regulated in Transcription
  misc_feature: MA Experiment 20000071 PARAMETER Experiment Name: At_100uM_ABA_Mutants_cDNA_P Parameter: Plant Line Value: CS8104
  misc_feature: MA Experiment 20000071 PARAMETER Experiment Name: At_100uM_ABA_Mutants_cDNA_P Parameter: Timepoint (hr) Value: 6
  misc_feature: MA Experiment 20000071 PARAMETER Experiment Name: At_100uM_ABA_Mutants_cDNA_P Parameter: Tissue Value: Aerial
  misc_feature: MA Experiment 20000071 PARAMETER Experiment Name: At_100uM_ABA_Mutants_cDNA_P Parameter: Treatment Value: 100uM ABA vs. No Treatment
  misc_feature: MA Experiment ID: 20000072 Result: Down-regulated in Transcription
  misc_feature: MA Experiment 20000072 PARAMETER Experiment Name: At_100uM_ABA_Mutants_cDNA_P Parameter: Plant Line Value: CS8105
  misc_feature: MA Experiment 20000072 PARAMETER Experiment Name: At_100uM_ABA_Mutants_cDNA_P Parameter: Timepoint (hr) Value: 6
  misc_feature: MA Experiment 20000072 PARAMETER Experiment Name: At_100uM_ABA_Mutants_cDNA_P Parameter: Tissue Value: Aerial
  misc_feature: MA Experiment 20000072 PARAMETER Experiment Name: At_100uM_ABA_Mutants_cDNA_P Parameter: Treatment Value: 100uM ABA vs. No Treatment
  misc_feature: MA Experiment ID: 20000086 Result: Down-regulated in Transcription
  misc_feature: MA Experiment 20000086 PARAMETER Experiment Name: At_100uM_ABA_Mutants_cDNA_P Parameter: Plant Line Value: CS22
  misc_feature: MA Experiment 20000086 PARAMETER Experiment Name: At_100uM_ABA_Mutants_cDNA_P Parameter: Timepoint (hr) Value: 6
  misc_feature: MA Experiment 20000086 PARAMETER Experiment Name: At_100uM_ABA_Mutants_cDNA_P Parameter: Tissue Value: Aerial
  misc_feature: MA Experiment 20000086 PARAMETER Experiment Name: At_100uM_ABA_Mutants_cDNA_P Parameter: Treatment Value: 100uM ABA vs. No Treatment
  misc_feature: MA Experiment ID: 20000087 Result: Down-regulated in Transcription
  misc_feature: MA Experiment 20000087 PARAMETER Experiment Name: At_100uM_ABA_Mutants_cDNA_P Parameter: Plant Line Value: WS
  misc_feature: MA Experiment 20000087 PARAMETER Experiment Name: At_100uM_ABA_Mutants_cDNA_P Parameter: Timepoint (hr) Value: 6
  misc_feature: MA Experiment 20000087 PARAMETER Experiment Name: At_100uM_ABA_Mutants_cDNA_P Parameter: Tissue Value: Aerial
  misc_feature: MA Experiment 20000087 PARAMETER Experiment Name: At_100uM_ABA_Mutants_cDNA_P Parameter: Treatment Value: 100uM ABA vs. No Treatment
  misc_feature: MA Experiment ID: 20000088 Result: Down-regulated in Transcription
  misc_feature: MA Experiment 20000088 PARAMETER Experiment Name: At_100uM_ABA_Mutants_cDNA_P Parameter: Plant Line Value: Landsberg
  misc_feature: MA Experiment 20000088 PARAMETER Experiment Name: At_100uM_ABA_Mutants_cDNA_P Parameter: Timepoint (hr) Value: 6
  misc_feature: MA Experiment 20000088 PARAMETER Experiment Name: At_100uM_ABA_Mutants_cDNA_P Parameter: Tissue Value: Aerial
  misc_feature: MA Experiment 20000088 PARAMETER Experiment Name: At_100uM_ABA_Mutants_cDNA_P Parameter: Treatment Value: 100uM ABA vs. No Treatment
  misc_feature: MA Experiment ID: 20000117 Result: Down-regulated in Transcription
  misc_feature: MA Experiment 20000117 PARAMETER Experiment Name: At_100uM_ABA_Mutants_cDNA_P Parameter: Plant Line Value: Columbia
  misc_feature: MA Experiment 20000117 PARAMETER Experiment Name: At_100uM_ABA_Mutants_cDNA_P Parameter: Timepoint (hr) Value: 6
  misc_feature: MA Experiment 20000117 PARAMETER Experiment Name: At_100uM_ABA_Mutants_cDNA_P Parameter: Tissue Value: Aerial
  misc_feature: MA Experiment 20000117 PARAMETER Experiment Name: At_100uM_ABA_Mutants_cDNA_P Parameter: Treatment Value: 100uM ABA vs. No Treatment
  misc_feature: MA Experiment ID: 20000184 Result: Up-regulated in Transcription
  misc_feature: MA Experiment 20000184 PARAMETER Experiment Name: At_Shoots__P Parameter: Age (day) Value: 7
  misc_feature: MA Experiment 20000184 PARAMETER Experiment Name: At_Shoots__P Parameter: Tissue Value: Shoots vs. Whole Plant
  misc_feature: MA Experiment ID: 20000185 Result: Down-regulated in Transcription
  misc_feature: MA Experiment 20000185 PARAMETER Experiment Name: At_Roots__P Parameter: Age (day) Value: 7 vs. 21
  misc_feature: MA Experiment 20000185 PARAMETER Experiment Name: At_Roots__P Parameter: Organism Value: A. thaliana
  misc_feature: MA Experiment 20000185 PARAMETER Experiment Name: At_Roots__P Parameter: Tissue Value: Roots vs. Whole Plant
  misc_feature: MA Experiment ID: 20000437 Result: Down-regulated in Transcription
  misc_feature: MA Experiment 20000437 PARAMETER Experiment Name: At_Drought_P Parameter: Age (day) Value: 8
  misc_feature: MA Experiment 20000437 PARAMETER Experiment Name: At_Drought_P Parameter: Organism Value: A. thaliana
  misc_feature: MA Experiment 20000437 PARAMETER Experiment Name: At_Drought_P Parameter: Plant Line Value: WS
  misc_feature: MA Experiment 20000437 PARAMETER Experiment Name: At_Drought_P Parameter: Timepoint (hr) Value: 24
  misc_feature: MA Experiment 20000437 PARAMETER Experiment Name: At_Drought_P Parameter: Tissue Value: Whole Plant
  misc_feature: MA Experiment 20000437 PARAMETER Experiment Name: At_Drought_P Parameter: Treatment Value: Drought vs. No Drought
  misc_feature: MA Experiment ID: 20000438 Result: Up-regulated in Transcription
  misc_feature: MA Experiment 20000438 PARAMETER Experiment Name: At_Shoots__P Parameter: Age (day) Value: 14
  misc_feature: MA Experiment 20000438 PARAMETER Experiment Name: At_Shoots__P Parameter: Tissue Value: Shoots vs. Whole Plant
  misc_feature: MA Experiment ID: 20000439 Result: Down-regulated in Transcription
  misc_feature: MA Experiment 20000439 PARAMETER Experiment Name: At_Roots__P Parameter: Age (day) Value: 14 vs. 21
  misc_feature: MA Experiment 20000439 PARAMETER Experiment Name: At_Roots__P Parameter: Organism Value: A. thaliana
  misc_feature: MA Experiment 20000439 PARAMETER Experiment Name: At_Roots__P Parameter: Tissue Value: Roots vs. Whole Plant
taagatttatgaacttatggatgctgttgatgattacatccctatccctcagagacaaactgaattgccattcttgttagctgttgaggatgtgttctctatcactggacgtggtacggtggctacagggcgtgtcgagagaggtacggttaaggtaggagagactgtagatttagtgggtttgagggagactaggagttacactgtcactggggttgaaatgtttcagaagattcttgatgaggctttagctggtgacaatgtagggttgttgcttaggggtattcaaaaggctgatattcagagaggtatggttttagctaagccgggatcgattactccacataccaagtttgaagcaattatctatgtgttgaagaaagaggaaggtggaaggcattctccattctttgcaggttacaggcctcagttctacatgaggacgactgatgttacgggtaaagtgacgaagatcatgaacgacaaagatgaagagtcgaagatggttatgcccggtgatcgagtgaagattgttgttgagcttattgtgccggtggcttgtgaacaagggatgaggtttgctatcagagaaggaggaaagactgttggtgctggagttattgggacgatcctcgaatgattataaggttttagagagtttcatatagtgagcatctctacttgctttctttttgtttcactcttgattctcaaactctttgagtttttacctttttttatttatttttgtgccattttccataagaacttgaaatcaaaatgtcatatatttcttgattttctgatccttgtt

SEQ ID NO: 21282 - protein, 212 aa, Arabidopsis thaliana
  peptide (1)..(212): Ceres Seq. ID no. 12340006
  misc_feature (111)..(211): Pfam Name: Elongation factor Tu C-terminal domain Pfam Description: Elongation factor Tu C-terminal domain
  misc_feature (1)..(212): Homolog of NCBI NO: 23397095 NR Description: putative chloroplast translation elongation
  misc_feature (1)..(212): Homolog of NCBI NO: 15237059 NR Description: elongation factor Tu, chloroplast precursor
KIYELMDAVDDYIPIPQRQTELPFLLAVEDVFSITGRGTVATGRVERGTVKVGETVDLVGLRETRSYTVTGVEMFQKILDEALAGDNVGLLLRGIQKADIQRGMVLAKPGSITPHTKFEAIIYVLKKEEGGRHSPFFAGYRPQFYMRTTDVTGKVTKIMNDKDEESKMVMPGDRVKIVVELIVPVACEQGMRFAIREGGKTVGAGVIGTILE

SEQ ID NO: 21283 - protein, 207 aa, Arabidopsis thaliana
  peptide (1)..(207): Ceres Seq. ID no. 12340007
  misc_feature (106)..(206): Pfam Name: Elongation factor Tu C-terminal domain Pfam Description: Elongation factor Tu C-terminal domain
  misc_feature (1)..(207): Homolog of NCBI NO: 23397095 NR Description: putative chloroplast translation elongation
  misc_feature (1)..(207): Homolog of NCBI NO: 15237059 NR Description: elongation factor Tu, chloroplast precursor
MDAVDDYIPIPQRQTELPFLLAVEDVFSITGRGTVATGRVERGTVKVGETVDLVGLRETRSYTVTGVEMFQKILDEALAGDNVGLLLRGIQKADIQRGMVLAKPGSITPHTKFEAIIYVLKKEEGGRHSPFFAGYRPQFYMRTTDVTGKVTKIMNDKDEESKMVMPGDRVKIVVELIVPVACEQGMRFAIREGGKTVGAGVIGTILE

SEQ ID NO: 21284 - protein, 139 aa, Arabidopsis thaliana
  peptide (1)..(139): Ceres Seq. ID no. 12340008
  misc_feature (38)..(138): Pfam Name: Elongation factor Tu C-terminal domain Pfam Description: Elongation factor Tu C-terminal domain
  misc_feature (1)..(139): Homolog of NCBI NO: 23397095 NR Description: putative chloroplast translation elongation
  misc_feature (1)..(139): Homolog of NCBI NO: 15237059 NR Description: elongation factor Tu, chloroplast precursor
MFQKILDEALAGDNVGLLLRGIQKADIQRGMVLAKPGSITPHTKFEAIIYVLKKEEGGRHSPFFAGYRPQFYMRTTDVTGKVTKIMNDKDEESKMVMPGDRVKIVVELIVPVACEQGMRFAIREGGKTVGAGVIGTILE

SEQ ID NO: 21285 - DNA, 1102 bp, Arabidopsis thaliana
  misc_feature (1)..(1102): Ceres Seq. ID no. 12369939
  misc_feature: MA Experiment ID: 108433 Result: Down-regulated in Transcription
  misc_feature: MA Experiment 108433 PARAMETER Experiment Name: At_rhl_Mutant2_cDNA_P Parameter: Age (day) Value: 7
  misc_feature: MA Experiment 108433 PARAMETER Experiment Name: At_rhl_Mutant2_cDNA_P Parameter: Organism Value: A. thaliana
  misc_feature: MA Experiment 108433 PARAMETER Experiment Name: At_rhl_Mutant2_cDNA_P Parameter: Plant Line Value: rhl Mutant vs. wt landsburg
  misc_feature: MA Experiment 108433 PARAMETER Experiment Name: At_rhl_Mutant2_cDNA_P Parameter: Tissue Value: Roots
  misc_feature: MA Experiment ID: 108434 Result: Up-regulated in Transcription
  misc_feature: MA Experiment 108434 PARAMETER Experiment Name: At_Root_Tips_cDNA_P Parameter: Tissue Value: Root Tips
  misc_feature: MA Experiment ID: 108462 Result: Down-regulated in Transcription
  misc_feature: MA Experiment 108462 PARAMETER Experiment Name: At_Germinating_Seeds_cDNA_P Parameter: Age (day) Value: 2 vs. 0
  misc_feature: MA Experiment 108462 PARAMETER Experiment Name: At_Germinating_Seeds_cDNA_P Parameter: Tissue Value: Germinating Seeds
  misc_feature: MA Experiment ID: 108464 Result: Down-regulated in Transcription
  misc_feature: MA Experiment 108464 PARAMETER Experiment Name: At_Germinating_Seeds_cDNA_P Parameter: Age (day) Value: 4 vs. 0
  misc_feature: MA Experiment 108464 PARAMETER Experiment Name: At_Germinating_Seeds_cDNA_P Parameter: Tissue Value: Germinating Seeds
  misc_feature: MA Experiment ID: 108595 Result: Down-regulated in Transcription
  misc_feature: MA Experiment 108595 PARAMETER Experiment Name: At_Ler-pi_Ovule_cDNA_P Parameter: Plant Line Value: null
  misc_feature: MA Experiment ID: 20000315 Result: Down-regulated in Transcription
  misc_feature: MA Experiment 20000315 PARAMETER Experiment Name: At_14day_Shoots-Roots_Sub_P Parameter: Age (day) Value: 14
  misc_feature: MA Experiment 20000315 PARAMETER Experiment Name: At_14day_Shoots-Roots_Sub_P Parameter: Organism Value: A. thaliana
  misc_feature: MA Experiment 20000315 PARAMETER Experiment Name: At_14day_Shoots-Roots_Sub_P Parameter: Plant Line Value: WS
  misc_feature: MA Experiment 20000315 PARAMETER Experiment Name: At_14day_Shoots-Roots_Sub_P Parameter: Tissue Value: Shoots vs. Whole Plant
actcccaaaattctctccatcaatctctcttacacactacacaaattcaacaactgaaaccaactcagagcaaaagcttgatttgacactatggcgagcattagcaacgagcccgagcgtgagaacagagacgaagaagagactggagccaacgaagatgaagacaccggtgctcaggttgctcctatcgtcaggcttgaagaagtcgccgtcaccaccggtgaagaagacgaagacaccatcctcgatctgaaatcgaagttgtatcgatttgataaagatggaagtcagtggaaggagagaggtgctggtactgttaagtttttgaaacatagagtttctgggaagattcgtctcgttatgaggcaatcgaaaactttgaagatctgtgctaatcatcttgttggatcgggtatgagtgttcaggaacacgctgggaatgataagtcttgtgtatggcacgctcgtgatttctccgatggtgaattgaaggatgagctcttctgtatccggtttgcttcagttgagaattgcaaagcatttatgcaaaagttcaaggaagtagctgaatctgaagaagagaaagaagagagcaaagatgcctctgataccgctggtcttcttgagaagttaacagtggaagagaaggaaagtgagaagaaaccagtggagaaggcagaggaaaacaaaaagagtgaagctgttgaagaaaagaaaacagaggagtctgttccctcagcttaagatgcatgcttacacacacatacggccaggtaatcaatagcctgatgtgttttaaatccatcgaaggaagacttggcttttattttcaaattgaatacatgttttgagtcgtgttgagagtctatatgtttagtgtcacaaaagtgtcacaggtgacattttgcatattgcgagattgattttcgtgcttgtttgggtttcattatctggaagaaaaaaagagtgtattttgagctctcttatgatttttttttggaaaaagtgtggactcaagagaagattttattttgagttcacaaaaatttgtatgcatggatgattcgcgtgttctctttttaatgccagtcgtgttattgaa

SEQ ID NO: 21286 - protein, 217 aa, Arabidopsis thaliana
  peptide (1)..(217): Ceres Seq. ID no. 12369940
  misc_feature (40)..(161): Pfam Name: RanBP1 domain Pfam Description: RanBP1 domain
  misc_feature (7)..(200): Homolog of NCBI NO: 34869790 NR Description: similar to Ran-specific GTPase-activating protein
  misc_feature (1)..(213): Homolog of NCBI NO: 14091665 NR Description: Ran binding protein-1 [Lycopersicon esculentum]
  misc_feature (5)..(213): Homolog of NCBI NO: 30697102 NR Description: Ran binding protein 1 homolog - like [Arabidopsis
  misc_feature (5)..(213): Homolog of NCBI NO: 8843780 NR Description: contains similarity to small GTPase Ran binding
  misc_feature (5)..(216): Homolog of NCBI NO: 5106769 NR Description: Ran-binding protein siRanBP [Arabidopsis thaliana]
  misc_feature (5)..(213): Homolog of NCBI NO: 2058282 NR Description: atranbp1a [Arabidopsis thaliana]
  misc_feature (5)..(216): Homolog of NCBI NO: 15222310 NR Description: Ran-binding protein (atranbp1a)
  misc_feature (1)..(217): Homolog of NCBI NO: 2058284 NR Description: atranbp1b [Arabidopsis thaliana]
  misc_feature (1)..(217): Homolog of NCBI NO: 20260400 NR Description: Ran binding protein [Arabidopsis thaliana]
  misc_feature (1)..(217): Homolog of NCBI NO: 15227700 NR Description: Ran binding protein (AtRanBP1b)
MASISNEPERENRDEEETGANEDEDTGAQVAPIVRLEEVAVTTGEEDEDTILDLKSKLYRFDKDGSQWKERGAGTVKFLKHRVSGKIRLVMRQSKTLKICANHLVGSGMSVQEHAGNDKSCVWHARDFSDGELKDELFCIRFASVENCKAFMQKFKEVAESEEEKEESKDASDTAGLLEKLTVEEKESEKKPVEKAEENKKSEAVEEKKTEESVPSA

SEQ ID NO: 21287 - protein, 127 aa, Arabidopsis thaliana
  peptide (1)..(127): Ceres Seq. ID no. 12369941
  misc_feature (1)..(71): Pfam Name: RanBP1 domain Pfam Description: RanBP1 domain
  misc_feature (1)..(110): Homolog of NCBI NO: 34869790 NR Description: similar to Ran-specific GTPase-activating protein
  misc_feature (1)..(123): Homolog of NCBI NO: 14091665 NR Description: Ran binding protein-1 [Lycopersicon esculentum]
  misc_feature (1)..(123): Homolog of NCBI NO: 30697102 NR Description: Ran binding protein 1 homolog - like [Arabidopsis
  misc_feature (1)..(123): Homolog of NCBI NO: 8843780 NR Description: contains similarity to small GTPase Ran binding
  misc_feature (1)..(126): Homolog of NCBI NO: 5106769 NR Description: Ran-binding protein siRanBP [Arabidopsis thaliana]
  misc_feature (1)..(123): Homolog of NCBI NO: 2058282 NR Description: atranbp1a [Arabidopsis thaliana]
  misc_feature (1)..(126): Homolog of NCBI NO: 15222310 NR Description: Ran-binding protein (atranbp1a)
  misc_feature (1)..(127): Homolog of NCBI NO: 2058284 NR Description: atranbp1b [Arabidopsis thaliana]
  misc_feature (1)..(127): Homolog of NCBI NO: 20260400 NR Description: Ran binding protein [Arabidopsis thaliana]
  misc_feature (1)..(127): Homolog of NCBI NO: 15227700 NR Description: Ran binding protein (AtRanBP1b)
MRQSKTLKICANHLVGSGMSVQEHAGNDKSCVWHARDFSDGELKDELFCIRFASVENCKAFMQKFKEVAESEEEKEESKDASDTAGLLEKLTVEEKESEKKPVEKAEENKKSEAVEEKKTEESVPSA

SEQ ID NO: 21288 - protein, 109 aa, Arabidopsis thaliana
  peptide (1)..(109): Ceres Seq. ID no. 12369942
  misc_feature (1)..(53): Pfam Name: RanBP1 domain Pfam Description: RanBP1 domain
  misc_feature (1)..(109): Homolog of NCBI NO: 2058284 NR Description: atranbp1b [Arabidopsis thaliana]
  misc_feature (1)..(109): Homolog of NCBI NO: 20260400 NR Description: Ran binding protein [Arabidopsis thaliana]
  misc_feature (1)..(105): Homolog of NCBI NO: 14091665 NR Description: Ran binding protein-1 [Lycopersicon esculentum]
  misc_feature (1)..(105): Homolog of NCBI NO: 8843780 NR Description: contains similarity to small GTPase Ran binding
  misc_feature (1)..(105): Homolog of NCBI NO: 2058282 NR Description: atranbp1a [Arabidopsis thaliana]
  misc_feature (1)..(108): Homolog of NCBI NO: 15222310 NR Description: Ran-binding protein (atranbp1a)
  misc_feature (1)..(108): Homolog of NCBI NO: 5106769 NR Description: Ran-binding protein siRanBP [Arabidopsis thaliana]
  misc_feature (1)..(105): Homolog of NCBI NO: 30697102 NR Description: Ran binding protein 1 homolog - like [Arabidopsis
  misc_feature (1)..(92): Homolog of NCBI NO: 34869790 NR Description: similar to Ran-specific GTPase-activating protein
  misc_feature (1)..(109): Homolog of NCBI NO: 15227700 NR Description: Ran binding protein (AtRanBP1b)
MSVQEHAGNDKSCVWHARDFSDGELKDELFCIRFASVENCKAFMQKFKEVAESEEEKEESKDASDTAGLLEKLTVEEKESEKKPVEKAEENKKSEAVEEKKTEESVPSA

SEQ ID NO: 21289 - DNA, 865 bp, Arabidopsis thaliana
  misc_feature (1)..(865): Ceres Seq. ID no. 12393293
  misc_feature: MA Experiment ID: 20000089 Result: Down-regulated in Transcription
  misc_feature: MA Experiment ID: 20000234 Result: Up-regulated in Transcription
  misc_feature: MA Experiment 20000234 PARAMETER Experiment Name: At_Siliques_P Parameter: Age (day) Value: 21
  misc_feature: MA Experiment 20000234 PARAMETER Experiment Name: At_Siliques_P Parameter: Organism Value: A. thaliana
  misc_feature: MA Experiment 20000234 PARAMETER Experiment Name: At_Siliques_P Parameter: Plant Line Value: WS
  misc_feature: MA Experiment 20000234 PARAMETER Experiment Name: At_Siliques_P Parameter: Tissue Value: Less Than 5mm Siliques vs. Whole Plant
  misc_feature: MA Experiment ID: 20000235 Result: Up-regulated in Transcription
  misc_feature: MA Experiment 20000235 PARAMETER Experiment Name: At_Siliques_P Parameter: Age (day) Value: 21
  misc_feature: MA Experiment 20000235 PARAMETER Experiment Name: At_Siliques_P Parameter: Organism Value: A. thaliana
  misc_feature: MA Experiment 20000235 PARAMETER Experiment Name: At_Siliques_P Parameter: Plant Line Value: WS
  misc_feature: MA Experiment 20000235 PARAMETER Experiment Name: At_Siliques_P Parameter: Tissue Value: 5-10mm Siliques vs. Whole Plant
  misc_feature: MA Experiment ID: 20000264 Result: Up-regulated in Transcription
  misc_feature: MA Experiment 20000264 PARAMETER Experiment Name: At_Open_Flower_P Parameter: Age (day) Value: 21
  misc_feature: MA Experiment 20000264 PARAMETER Experiment Name: At_Open_Flower_P Parameter: Plant Line Value: WS
  misc_feature: MA Experiment 20000264 PARAMETER Experiment Name: At_Open_Flower_P Parameter: Tissue Value: Open Flower vs. Whole Plant
  misc_feature: MA Experiment ID: 20000265 Result: Up-regulated in Transcription
  misc_feature: MA Experiment 20000265 PARAMETER Experiment Name: At_Open_Flower_P Parameter: Age (day) Value: 21
  misc_feature: MA Experiment 20000265 PARAMETER Experiment Name: At_Open_Flower_P Parameter: Plant Line Value: WS
  misc_feature: MA Experiment 20000265 PARAMETER Experiment Name: At_Open_Flower_P Parameter: Tissue Value: Closed Flower vs. Whole Plant
  misc_feature: MA Experiment ID: 20000286 Result: Up-regulated in Transcription
  misc_feature: MA Experiment 20000286 PARAMETER Experiment Name: At_Open_Flower_P Parameter: Age (day) Value: 21
  misc_feature: MA Experiment 20000286 PARAMETER Experiment Name: At_Open_Flower_P Parameter: Plant Line Value: WS
  misc_feature: MA Experiment 20000286 PARAMETER Experiment Name: At_Open_Flower_P Parameter: Tissue Value: Half Open vs. Whole Plant
  misc_feature: MA Experiment ID: 20000794 Result: Up-regulated in Transcription
  misc_feature: MA Experiment 20000794 PARAMETER Experiment Name: At_Petals_P Parameter: Age (day) Value: 23-25 days
  misc_feature: MA Experiment 20000794 PARAMETER Experiment Name: At_Petals_P Parameter: Plant Line Value: WS
  misc_feature: MA Experiment 20000794 PARAMETER Experiment Name: At_Petals_P Parameter: Tissue Value: Petals vs. Whole plant
  misc_feature: MA Experiment ID: 20001910 Result: Up-regulated in Transcription
  misc_feature: MA Experiment 20001910 PARAMETER Experiment Name: At_Drought_Reproduction_P Parameter: Age (day) Value: 37
  misc_feature: MA Experiment 20001910 PARAMETER Experiment Name: At_Drought_Reproduction_P Parameter: Organism Value: A. thaliana
  misc_feature: MA Experiment 20001910 PARAMETER Experiment Name: At_Drought_Reproduction_P Parameter: Plant Line Value: WS
  misc_feature: MA Experiment 20001910 PARAMETER Experiment Name: At_Drought_Reproduction_P Parameter: Timepoint (day) Value: 7
  misc_feature: MA Experiment 20001910 PARAMETER Experiment Name: At_Drought_Reproduction_P Parameter: Tissue Value: Flowers
  misc_feature: MA Experiment 20001910 PARAMETER Experiment Name: At_Drought_Reproduction_P Parameter: Treatment Value: Drought vs. No Drought
aaactcatcaataacatcttacaaacaacaacaatcaacaatggcaacttccatgatccctatattcgtcaccttcatgctcgtggccgcccacatggccctcgccgatacaaatatgcttcaagacttttgtgttgctgatctctccaacggtttgaaagtcaacggatacccttgcaaagacccagcaaaagtaacaccagaagacttctacttcataggcttagccactgctgcagccacagccaactcttcaatgggctcagctgttacaggagccaacgttgagaaagtgcctggcctcaacactctgggagtctccatctctcggatcgactacgcacctggcggacttaacccaccacatcttcacccaagagcctctgaagccatcttcgtccttgaaggccgtctcttcgtcggtttcttaaccactaccgggaaactcatctccaaacacgtcaacaaaggagacgttttcgttttccccaaagctctcctccatttccagcagaaccctaacaaagctcctgcttccgtcctcgctgctttcgatagccagcttcccgggactcaagttgttggaccatctctgtttggttctaacccaccgattcctgatgacctgcttgccaaggcgttcggggctgcagcaccagagattcagaagattaagggaaaattcccaccaaagaaataaataagtttcagaccagagcactaatctaataatgatatacaatgatgaacataaaaatgtaaacttctaagcaaaagcttgtaactttttttcattcttttctttattattgtagatactcttttgactatatttggcccattgattacgatgagaccagttttc

SEQ ID NO: 21290 - protein, 232 aa, Arabidopsis thaliana
  peptide (1)..(232): Ceres Seq. ID no. 12393294
  misc_feature (73)..(222): Pfam Name: Cupin Pfam Description: Cupin
  misc_feature (14)..(232): Homolog of NCBI NO: 26449711 NR Description: putative germin [Arabidopsis thaliana]
  misc_feature (36)..(232): Homolog of NCBI NO: 1934730 NR Description: germin-like protein [Arabidopsis thaliana]
  misc_feature (22)..(232): Homolog of NCBI NO: 15228673 NR Description: germin-like protein (GLP10); protein id:
  misc_feature (12)..(232): Homolog of NCBI NO: 34904670 NR Description: putative germin protein [Oryza sativa (japonica
  misc_feature (20)..(232): Homolog of NCBI NO: 7447332 NR Description: germin homolog F21E10.2 - Arabidopsis thaliana
  misc_feature (14)..(232): Homolog of NCBI NO: 15217561 NR Description: germin-like protein
  misc_feature (12)..(232): Homolog of NCBI NO: 30690288 NR Description: germin-like protein, putative [Arabidopsis
  misc_feature (12)..(232): Homolog of NCBI NO: 21553437 NR Description: nectarin-like protein [Arabidopsis thaliana]
  misc_feature (18)..(232): Homolog of NCBI NO: 21592538 NR Description: germin-like protein [Arabidopsis thaliana]
  misc_feature (14)..(232): Homolog of NCBI NO: 15230582 NR Description: germin-like protein
NSSITSYKQQQSTMATSMIPIFVTFMLVAAHMALADTNMLQDFCVADLSNGLKVNGYPCKDPAKVTPEDFYFIGLATAAATANSSMGSAVTGANVEKVPGLNTLGVSISRIDYAPGGLNPPHLHPRASEAIFVLEGRLFVGFLTTTGKLISKHVNKGDVFVFPKALLHFQQNPNKAPASVLAAFDSQLPGTQVVGPSLFGSNPPIPDDLLAKAFGAAAPEIQKIKGKFPPKK

SEQ ID NO: 21291 - protein, 219 aa, Arabidopsis thaliana
  peptide (1)..(219): Ceres Seq. ID no. 12393295
  misc_feature (60)..(209): Pfam Name: Cupin Pfam Description: Cupin
  misc_feature (1)..(219): Homolog of NCBI NO: 26449711 NR Description: putative germin [Arabidopsis thaliana]
  misc_feature (23)..(219): Homolog of NCBI NO: 1934730 NR Description: germin-like protein [Arabidopsis thaliana]
  misc_feature (9)..(219): Homolog of NCBI NO: 15228673 NR Description: germin-like protein (GLP10); protein id:
  misc_feature (1)..(219): Homolog of NCBI NO: 34904670 NR Description: putative germin protein [Oryza sativa (japonica
  misc_feature (7)..(219): Homolog of NCBI NO: 7447332 NR Description: germin homolog F21E10.2 - Arabidopsis thaliana
  misc_feature (1)..(219): Homolog of NCBI NO: 15217561 NR Description: germin-like protein
  misc_feature (1)..(219): Homolog of NCBI NO: 30690288 NR Description: germin-like protein, putative [Arabidopsis
  misc_feature (1)..(219): Homolog of NCBI NO: 21553437 NR Description: nectarin-like protein [Arabidopsis thaliana]
  misc_feature (5)..(219): Homolog of NCBI NO: 21592538 NR Description: germin-like protein [Arabidopsis thaliana]
  misc_feature (1)..(219): Homolog of NCBI NO: 15230582 NR Description: germin-like protein
MATSMIPIFVTFMLVAAHMALADTNMLQDFCVADLSNGLKVNGYPCKDPAKVTPEDFYFIGLATAAATANSSMGSAVTGANVEKVPGLNTLGVSISRIDYAPGGLNPPHLHPRASEAIFVLEGRLFVGFLTTTGKLISKHVNKGDVFVFPKALLHFQQNPNKAPASVLAAFDSQLPGTQVVGPSLFGSNPPIPDDLLAKAFGAAAPEIQKIKGKFPPKK

SEQ ID NO: 21292 - protein, 215 aa, Arabidopsis thaliana
  peptide (1)..(215): Ceres Seq. ID no. 12393296
  misc_feature (56)..(205): Pfam Name: Cupin Pfam Description: Cupin
  misc_feature (1)..(215): Homolog of NCBI NO: 26449711 NR Description: putative germin [Arabidopsis thaliana]
  misc_feature (19)..(215): Homolog of NCBI NO: 1934730 NR Description: germin-like protein [Arabidopsis thaliana]
  misc_feature (5)..(215): Homolog of NCBI NO: 15228673 NR Description: germin-like protein (GLP10); protein id:
  misc_feature (1)..(215): Homolog of NCBI NO: 34904670 NR Description: putative germin protein [Oryza sativa (japonica
  misc_feature (3)..(215): Homolog of NCBI NO: 7447332 NR Description: germin homolog F21E10.2 - Arabidopsis thaliana
  misc_feature (1)..(215): Homolog of NCBI NO: 15217561 NR Description: germin-like protein
  misc_feature (1)..(215): Homolog of NCBI NO: 30690288 NR Description: germin-like protein, putative [Arabidopsis
  misc_feature (1)..(215): Homolog of NCBI NO: 21553437 NR Description: nectarin-like protein [Arabidopsis thaliana]
  misc_feature (1)..(215): Homolog of NCBI NO: 21592538 NR Description: germin-like protein [Arabidopsis thaliana]
  misc_feature (1)..(215): Homolog of NCBI NO: 15230582 NR Description: germin-like protein
MIPIFVTFMLVAAHMALADTNMLQDFCVADLSNGLKVNGYPCKDPAKVTPEDFYFIGLATAAATANSSMGSAVTGANVEKVPGLNTLGVSISRIDYAPGGLNPPHLHPRASEAIFVLEGRLFVGFLTTTGKLISKHVNKGDVFVFPKALLHFQQNPNKAPASVLAAFDSQLPGTQVVGPSLFGSNPPIPDDLLAKAFGAAAPEIQKIKGKFPPKK

SEQ ID NO: 21293 - DNA, 1251 bp, Arabidopsis thaliana
  misc_feature (1)..(1251): Ceres Seq. ID no. 12391659
  misc_feature: MA Experiment ID: 20000234 Result: Down-regulated in Transcription
  misc_feature: MA Experiment 20000234 PARAMETER Experiment Name: At_Siliques_P Parameter: Age (day) Value: 21
  misc_feature: MA Experiment 20000234 PARAMETER Experiment Name: At_Siliques_P Parameter: Organism Value: A. thaliana
  misc_feature: MA Experiment 20000234 PARAMETER Experiment Name: At_Siliques_P Parameter: Plant Line Value: WS
  misc_feature: MA Experiment 20000234 PARAMETER Experiment Name: At_Siliques_P Parameter: Tissue Value: Less Than 5mm Siliques vs. Whole Plant
  misc_feature: MA Experiment ID: 20000235 Result: Down-regulated in Transcription
  misc_feature: MA Experiment 20000235 PARAMETER Experiment Name: At_Siliques_P Parameter: Age (day) Value: 21
  misc_feature: MA Experiment 20000235 PARAMETER Experiment Name: At_Siliques_P Parameter: Organism Value: A. thaliana
  misc_feature: MA Experiment 20000235 PARAMETER Experiment Name: At_Siliques_P Parameter: Plant Line Value: WS
  misc_feature: MA Experiment 20000235 PARAMETER Experiment Name: At_Siliques_P Parameter: Tissue Value: 5-10mm Siliques vs. Whole Plant
  misc_feature: MA Experiment ID: 20000264 Result: Up-regulated in Transcription
  misc_feature: MA Experiment 20000264 PARAMETER Experiment Name: At_Open_Flower_P Parameter: Age (day) Value: 21
  misc_feature: MA Experiment 20000264 PARAMETER Experiment Name: At_Open_Flower_P Parameter: Plant Line Value: WS
  misc_feature: MA Experiment 20000264 PARAMETER Experiment Name: At_Open_Flower_P Parameter: Tissue Value: Open Flower vs. Whole Plant
  misc_feature: MA Experiment ID: 20000495 Result: Down-regulated in Transcription
  misc_feature: MA Experiment 20000495 PARAMETER Experiment Name: At_Guard_Cells_P Parameter: Harvest Date Value: 8/2/2002
  misc_feature: MA Experiment 20000495 PARAMETER Experiment Name: At_Guard_Cells_P Parameter: Organism Value: A. thaliana
  misc_feature: MA Experiment 20000495 PARAMETER Experiment Name: At_Guard_Cells_P Parameter: Tissue Value: Guard Cells vs. Leaves
  misc_feature: MA Experiment ID: 20000794 Result: Up-regulated in Transcription
  misc_feature: MA Experiment 20000794 PARAMETER Experiment Name: At_Petals_P Parameter: Age (day) Value: 23-25 days
  misc_feature: MA Experiment 20000794 PARAMETER Experiment Name: At_Petals_P Parameter: Plant Line Value: WS
  misc_feature: MA Experiment 20000794 PARAMETER Experiment Name: At_Petals_P Parameter: Tissue Value: Petals vs. Whole plant
  misc_feature: MA Experiment ID: 20001248 Result: Down-regulated in Transcription
  misc_feature: MA Experiment 20001248 PARAMETER Experiment Name: At_Far-red-induction_P Parameter: Age (day) Value: 7
  misc_feature: MA Experiment 20001248 PARAMETER Experiment Name: At_Far-red-induction_P Parameter: Light Value: Far-red vs. White
  misc_feature: MA Experiment 20001248 PARAMETER Experiment Name: At_Far-red-induction_P Parameter: Organism Value: A. thaliana
  misc_feature: MA Experiment 20001248 PARAMETER Experiment Name: At_Far-red-induction_P Parameter: Plant Line Value: Columbia
  misc_feature: MA Experiment 20001248 PARAMETER Experiment Name: At_Far-red-induction_P Parameter: Timepoint (hr) Value: 4
  misc_feature: MA Experiment 20001248 PARAMETER Experiment Name: At_Far-red-induction_P Parameter: Tissue Value: Whole Plant
  misc_feature: MA Experiment ID: 20001556 Result: Up-regulated in Transcription
  misc_feature: MA Experiment 20001556 PARAMETER Experiment Name: At_Drought_Soil_Dry_P Parameter: Age (day) Value: 26
  misc_feature: MA Experiment 20001556 PARAMETER Experiment Name: At_Drought_Soil_Dry_P Parameter: Organism Value: A. thaliana
  misc_feature: MA Experiment 20001556 PARAMETER Experiment Name: At_Drought_Soil_Dry_P Parameter: Plant Line Value: WS
  misc_feature: MA Experiment 20001556 PARAMETER Experiment Name: At_Drought_Soil_Dry_P Parameter: Post Timepoint (hr) Value: None
  misc_feature: MA Experiment 20001556 PARAMETER Experiment Name: At_Drought_Soil_Dry_P Parameter: Post-Treatment Value: None
  misc_feature: MA Experiment 20001556 PARAMETER Experiment Name: At_Drought_Soil_Dry_P Parameter: Timepoint (day) Value: 12
  misc_feature: MA Experiment 20001556 PARAMETER Experiment Name: At_Drought_Soil_Dry_P Parameter: Treatment Value: Drought vs. No Drought
  misc_feature: MA Experiment ID: 20001905 Result: Up-regulated in Transcription
  misc_feature: MA Experiment 20001905 PARAMETER Experiment Name: At_Drought_Reproduction_P Parameter: Age (day) Value: 40
  misc_feature: MA Experiment 20001905 PARAMETER Experiment Name: At_Drought_Reproduction_P Parameter: Organism Value: A. thaliana
  misc_feature: MA Experiment 20001905 PARAMETER Experiment Name: At_Drought_Reproduction_P Parameter: Plant Line Value: WS
  misc_feature: MA Experiment 20001905 PARAMETER Experiment Name: At_Drought_Reproduction_P Parameter: Timepoint (day) Value: 10
  misc_feature: MA Experiment 20001905 PARAMETER Experiment Name: At_Drought_Reproduction_P Parameter: Tissue Value: Rosettes
  misc_feature: MA Experiment 20001905 PARAMETER Experiment Name: At_Drought_Reproduction_P Parameter: Treatment Value: Drought vs. No Drought
acatgaaaactaaacacacgtacacaagaaaccccaaaacattttgcctagaaagttgtttaaattacctcttaaaccttaagaaatcatatccagaaactcaatggatcaacaagggatggtcaagaaaagactagccgttctcgtcggctgcaactaccctaacacaaggaacgagcttcacggttgcatcaatgatgttctagccatgaaagaaactattttgtcacgtttcggattcaaacaagacgacattgaggtgctaacggacgagccagaatcaaaggtaaagccgacaggtgccaacatcaaggctgctctacgtaggatggtggataaagctcaagccggatctggagacatcttgttcttccactacagtggccatggaactcgtattccttcggttaaatctgctcatccttttaaacaagacgaagctattgttccttgtgatttcaatctcatcacagatgttgatttccgagaattggtcaatcaacttcctaaaggaacaagctttaccatgatctctgattcttgccatagtggtggtctcatcgacaaggagaaagaacagatcggaccctcttcggtctccagcaacatatctccggctattgagacaacgaacaagactataacatcacgtgccttgcccttcaaggcagtccttgaccacttgagttctctcaccggaattacaacttccgacatcggcacacatctacttgagctctttggccgcgatgctggtcttaagtttcggttaccggcaatggatctaatggatcttttggagactatgacggcccgtgaaaaacacgtggactcagggatattgatgagcgggtgtcaggcggatgagacgtctgctgacgtcggcgttgggaacgggaaagcgtacggagcgtttagcaacgcgattcaaagggtgttgaacgaaaatgaaggtgccatgaagaacaagcaactagtgatgatggcaagggatgtgcttgagagactagggtttcatcaacacccttgtctctactgcagcgaccagaacgcagacgcgacgttcctttctcaaccttgaattttaaacgtttgcgttgttttcttttatttgttttatcacgtttgcctttggggttgttgtaaattgttaactggtggaatgtgtgtattttctattctctgtggtgtactctaaaaggaaaaaggacatataaaacttgtttaataacatttatcttttttaatggt

SEQ ID NO: 21294 - protein, 325 aa, Arabidopsis thaliana
  peptide (1)..(325): Ceres Seq. ID no. 12391660
  misc_feature (10)..(325): Pfam Name: Caspase domain Pfam Description: Caspase domain
  misc_feature (10)..(325): Pfam Name: Caspase domain Pfam Description: Caspase domain
  misc_feature (224)..(322): Homolog of NCBI NO: 29367583 NR Description: latex-abundant protein-like protein
  misc_feature (8)..(164): Homolog of NCBI NO: 29367583 NR Description: latex-abundant protein-like protein
  misc_feature (243)..(322): Homolog of NCBI NO: 4235430 NR Description: latex-abundant protein [Hevea brasiliensis]
  misc_feature (6)..(164): Homolog of NCBI NO: 4235430 NR Description: latex-abundant protein [Hevea brasiliensis]
  misc_feature (243)..(322): Homolog of NCBI NO: 23343885 NR Description: metacaspase 1 [Lycopersicon esculentum]
  misc_feature (224)..(322): Homolog of NCBI NO: 29367583 NR Description: latex-abundant protein-like protein
  misc_feature (243)..(322): Homolog of NCBI NO: 4235430 NR Description: latex-abundant protein [Hevea brasiliensis]
  misc_feature (243)..(322): Homolog of NCBI NO: 23343885 NR Description: metacaspase 1 [Lycopersicon esculentum]
  misc_feature (1)..(325): Homolog of NCBI NO: 15237648 NR Description: hypothetical protein common family
  misc_feature (6)..(325): Homolog of NCBI NO: 21554334 NR Description: latex-abundant protein-like [Arabidopsis thaliana]
  misc_feature (6)..(236): Homolog of NCBI NO: 15219340 NR Description: hypothetical protein common family; protein id:
  misc_feature (243)..(322): Homolog of NCBI NO: 15219340 NR Description: hypothetical protein common family; protein id:
  misc_feature (15)..(163): Homolog of NCBI NO: 23343885 NR Description: metacaspase 1 [Lycopersicon esculentum]
  misc_feature (6)..(164): Homolog of NCBI NO: 4235430 NR Description: latex-abundant protein [Hevea brasiliensis]
  misc_feature (8)..(164): Homolog of NCBI NO: 29367583 NR Description: latex-abundant protein-like protein
  misc_feature (15)..(163): Homolog of NCBI NO: 23343885 NR Description: metacaspase 1 [Lycopersicon esculentum]
  misc_feature (243)..(322): Homolog of NCBI NO: 15219340 NR Description: hypothetical protein common family; protein id:
  misc_feature (6)..(236): Homolog of NCBI NO: 15219340 NR Description: hypothetical protein common family; protein id:
  misc_feature (6)..(325): Homolog of NCBI NO: 21554334 NR Description: latex-abundant protein-like [Arabidopsis thaliana]
  misc_feature (1)..(325): Homolog of NCBI NO: 15237648 NR Description: hypothetical protein common family
MDQQGMVKKRLAVLVGCNYPNTRNELHGCINDVLAMKETILSRFGFKQDDIEVLTDEPESKVKPTGANIKAALRRMVDKAQAGSGDILFFHYSGHGTRIPSVKSAHPFKQDEAIVPCDFNLITDVDFRELVNQLPKGTSFTMISDSCHSGGLIDKEKEQIGPSSVSSNISPAIETTNKTITSRALPFKAVLDHLSSLTGITTSDIGTHLLELFGRDAGLKFRLPAMDLMDLLETMTAREKHVDSGILMSGCQADETSADVGVGNGKAYGAFSNAIQRVLNENEGAMKNKQLVMMARDVLERLGFHQHPCLYCSDQNADATFLSQP

SEQ ID NO: 21295 - protein, 320 aa, Arabidopsis thaliana
  peptide (1)..(320): Ceres Seq. ID no. 12391661
  misc_feature (5)..(320): Pfam Name: Caspase domain Pfam Description: Caspase domain
  misc_feature (5)..(320): Pfam Name: Caspase domain Pfam Description: Caspase domain
  misc_feature (219)..(317): Homolog of NCBI NO: 29367583 NR Description: latex-abundant protein-like protein
  misc_feature (3)..(159): Homolog of NCBI NO: 29367583 NR Description: latex-abundant protein-like protein
  misc_feature (238)..(317): Homolog of NCBI NO: 4235430 NR Description: latex-abundant protein [Hevea brasiliensis]
  misc_feature (1)..(159): Homolog of NCBI NO: 4235430 NR Description: latex-abundant protein [Hevea brasiliensis]
  misc_feature (238)..(317): Homolog of NCBI NO: 23343885 NR Description: metacaspase 1 [Lycopersicon esculentum]
  misc_feature (219)..(317): Homolog of NCBI NO: 29367583 NR Description: latex-abundant protein-like protein
  misc_feature (238)..(317): Homolog of NCBI NO: 4235430 NR Description: latex-abundant protein [Hevea brasiliensis]
  misc_feature (238)..(317): Homolog of NCBI NO: 23343885 NR Description: metacaspase 1 [Lycopersicon esculentum]
  misc_feature (1)..(320): Homolog of NCBI NO: 15237648 NR Description: hypothetical protein common family
  misc_feature (1)..(320): Homolog of NCBI NO: 21554334 NR Description: latex-abundant protein-like [Arabidopsis thaliana]
  misc_feature (1)..(231): Homolog of NCBI NO: 15219340 NR Description: hypothetical protein common family; protein id:
  misc_feature (238)..(317): Homolog of NCBI NO: 15219340 NR Description: hypothetical protein common family; protein id:
  misc_feature (10)..(158): Homolog of NCBI NO: 23343885 NR Description: metacaspase 1 [Lycopersicon esculentum]
  misc_feature (1)..(159): Homolog of NCBI NO: 4235430 NR Description: latex-abundant protein [Hevea brasiliensis]
  misc_feature (3)..(159): Homolog of NCBI NO: 29367583 NR Description: latex-abundant protein-like protein
  misc_feature (10)..(158): Homolog of NCBI NO: 23343885 NR Description: metacaspase 1 [Lycopersicon esculentum]
  misc_feature (238)..(317): Homolog of NCBI NO: 15219340 NR Description: hypothetical protein common family; protein id:
  misc_feature (1)..(231): Homolog of NCBI NO: 15219340 NR Description: hypothetical protein common family; protein id:
  misc_feature (1)..(320): Homolog of NCBI NO: 21554334 NR Description: latex-abundant protein-like [Arabidopsis thaliana]
  misc_feature (1)..(320): Homolog of NCBI NO: 15237648 NR Description: hypothetical protein common family
MVKKRLAVLVGCNYPNTRNELHGCINDVLAMKETILSRFGFKQDDIEVLTDEPESKVKPTGANIKAALRRMVDKAQAGSGDILFFHYSGHGTRIPSVKSAHPFKQDEAIVPCDFNLITDVDFRELVNQLPKGTSFTMISDSCHSGGLIDKEKEQIGPSSVSSNISPAIETTNKTITSRALPFKAVLDHLSSLTGITTSDIGTHLLELFGRDAGLKFRLPAMDLMDLLETMTAREKHVDSGILMSGCQADETSADVGVGNGKAYGAFSNAIQRVLNENEGAMKNKQLVMMARDVLERLGFHQHPCLYCSDQNADATFLSQP

SEQ ID NO: 21296 - protein, 290 aa, Arabidopsis thaliana
  peptide (1)..(290): Ceres Seq. ID no. 12391662
  misc_feature (1)..(290): Pfam Name: Caspase domain Pfam Description: Caspase domain
  misc_feature (1)..(290): Pfam Name: Caspase domain Pfam Description: Caspase domain
  misc_feature (189)..(287): Homolog of NCBI NO: 29367583 NR Description: latex-abundant protein-like protein
  misc_feature (1)..(129): Homolog of NCBI NO: 29367583 NR Description: latex-abundant protein-like protein
  misc_feature (208)..(287): Homolog of NCBI NO: 4235430 NR Description: latex-abundant protein [Hevea brasiliensis]
  misc_feature (1)..(129): Homolog of NCBI NO: 4235430 NR Description: latex-abundant protein [Hevea brasiliensis]
  misc_feature (208)..(287): Homolog of NCBI NO: 23343885 NR Description: metacaspase 1 [Lycopersicon esculentum]
  misc_feature (189)..(287): Homolog of NCBI NO: 29367583 NR Description: latex-abundant protein-like protein
  misc_feature (208)..(287): Homolog of NCBI NO: 4235430 NR Description: latex-abundant protein [Hevea brasiliensis]
  misc_feature (208)..(287): Homolog of NCBI NO: 23343885 NR Description: metacaspase 1 [Lycopersicon esculentum]
  misc_feature (1)..(290): Homolog of NCBI NO: 15237648 NR Description: hypothetical protein common family
  misc_feature (1)..(290): Homolog of NCBI NO: 21554334 NR Description: latex-abundant protein-like [Arabidopsis thaliana]
  misc_feature (1)..(201): Homolog of NCBI NO: 15219340 NR Description: hypothetical protein common family; protein id:
  misc_feature (208)..(287): Homolog of NCBI NO: 15219340 NR Description: hypothetical protein common family; protein id:
  misc_feature (1)..(128): Homolog of NCBI NO: 23343885 NR Description: metacaspase 1 [Lycopersicon esculentum]
  misc_feature (1)..(129): Homolog of NCBI NO: 4235430 NR Description: latex-abundant protein [Hevea brasiliensis]
  misc_feature (1)..(129): Homolog of NCBI NO: 29367583 NR Description: latex-abundant protein-like protein
  misc_feature (1)..(128): Homolog of NCBI NO: 23343885 NR Description: metacaspase 1 [Lycopersicon esculentum]
  misc_feature (208)..(287): Homolog of NCBI NO: 15219340 NR Description: hypothetical protein common family; protein id:
  misc_feature (1)..(201): Homolog of NCBI NO: 15219340 NR Description: hypothetical protein common family; protein id:
  misc_feature (1)..(290): Homolog of NCBI NO: 21554334 NR Description: latex-abundant protein-like [Arabidopsis thaliana]
  misc_feature (1)..(290): Homolog of NCBI NO: 15237648 NR Description: hypothetical protein common family
MKETILSRFGFKQDDIEVLTDEPESKVKPTGANIKAALRRMVDKAQAGSGDILFFHYSGHGTRIPSVKSAHPFKQDEAIVPCDFNLITDVDFRELVNQLPKGTSFTMISDSCHSGGLIDKEKEQIGPSSVSSNISPAIETTNKTITSRALPFKAVLDHLSSLTGITTSDIGTHLLELFGRDAGLKFRLPAMDLMDLLETMTAREKHVDSGILMSGCQADETSADVGVGNGKAYGAFSNAIQRVLNENEGAMKNKQLVMMARDVLERLGFHQHPCLYCSDQNADATFLSQP

SEQ ID NO: 21297 - DNA, 1229 bp, Arabidopsis thaliana
  misc_feature (1)..(1229): Ceres Seq. ID no. 12331912
  misc_feature: MA Experiment ID: 108434 Result: Up-regulated in Transcription
  misc_feature: MA Experiment 108434 PARAMETER Experiment Name: At_Root_Tips_cDNA_P Parameter: Tissue Value: Root Tips
  misc_feature: MA Experiment ID: 108573 Result: Up-regulated in Transcription
  misc_feature: MA Experiment 108573 PARAMETER Experiment Name: At_Drought_cDNA_P Parameter: Timepoint (hr) Value: 6
  misc_feature: MA Experiment 108573 PARAMETER Experiment Name: At_Drought_cDNA_P Parameter: Tissue Value: Aerial
  misc_feature: MA Experiment 108573 PARAMETER Experiment Name: At_Drought_cDNA_P Parameter: Treatment Value: Drought vs. No Drought
  misc_feature: MA Experiment ID: 20000111 Result: Up-regulated in Transcription
  misc_feature: MA Experiment 20000111 PARAMETER Experiment Name: At_42deg_Heat_cDNA_P Parameter: Temperature (deg C) Value: 42 vs. 22
  misc_feature: MA Experiment 20000111 PARAMETER Experiment Name: At_42deg_Heat_cDNA_P Parameter: Timepoint (hr) Value: 6
  misc_feature: MA Experiment 20000111 PARAMETER Experiment Name: At_42deg_Heat_cDNA_P Parameter: Tissue Value: Aerial
  misc_feature: MA Experiment ID: 20000173 Result: Up-regulated in Transcription
  misc_feature: MA Experiment 20000173 PARAMETER Experiment Name: At_42deg_Heat_P Parameter: Age (day) Value: 14
  misc_feature: MA Experiment 20000173 PARAMETER Experiment Name: At_42deg_Heat_P Parameter: Organism Value: A. thaliana
  misc_feature: MA Experiment 20000173 PARAMETER Experiment Name: At_42deg_Heat_P Parameter: Plant Line Value: WS
  misc_feature: MA Experiment 20000173 PARAMETER Experiment Name: At_42deg_Heat_P Parameter: Temperature (deg C) Value: 42 vs. 22
  misc_feature: MA Experiment 20000173 PARAMETER Experiment Name: At_42deg_Heat_P Parameter: Timepoint (hr) Value: 6
  misc_feature: MA Experiment 20000173 PARAMETER Experiment Name: At_42deg_Heat_P Parameter: Tissue Value: Aerial
  misc_feature: MA Experiment ID: 20000495 Result: Up-regulated in Transcription
  misc_feature: MA Experiment 20000495 PARAMETER Experiment Name: At_Guard_Cells_P Parameter: Harvest Date Value: 8/2/2002
  misc_feature: MA Experiment 20000495 PARAMETER Experiment Name: At_Guard_Cells_P Parameter: Organism Value: A. thaliana
  misc_feature: MA Experiment 20000495 PARAMETER Experiment Name: At_Guard_Cells_P Parameter: Tissue Value: Guard Cells vs. Leaves
  misc_feature: MA Experiment ID: 20001911 Result: Up-regulated in Transcription
  misc_feature: MA Experiment 20001911 PARAMETER Experiment Name: At_Drought_Reproduction_P Parameter: Age (day) Value: 40
  misc_feature: MA Experiment 20001911 PARAMETER Experiment Name: At_Drought_Reproduction_P Parameter: Organism Value: A. thaliana
  misc_feature: MA Experiment 20001911 PARAMETER Experiment Name: At_Drought_Reproduction_P Parameter: Plant Line Value: WS
  misc_feature: MA Experiment 20001911 PARAMETER Experiment Name: At_Drought_Reproduction_P Parameter: Timepoint (day) Value: 10
  misc_feature: MA Experiment 20001911 PARAMETER Experiment Name: At_Drought_Reproduction_P Parameter: Tissue Value: Flowers
  misc_feature: MA Experiment 20001911 PARAMETER Experiment Name: At_Drought_Reproduction_P Parameter: Treatment Value: Drought vs. No Drought
agggttccggattcaggtcggtgtcgccaccgcccttcttcgtgcttctcttccttctttgtcggatcgtcaggtttacagatcagctcttgtggaggatatgggtgaagaagacaccgcgacggtggatcagaacagtttcggtggtggcaaagattcattgcttcgtaatcgtcattcgtcgccattgccttcaccgacacagctttcttctaaagtgattacattgcctaccgtattaacccttggccgtgtagctgccgttccgattctcgtcgccaccttttacgttgattgctggtggggaagaactgctacgacaagtattttcattgcagcagccattacagattggcttgatggatatattgcacggaagatgagattgggttctgaatttggtgcatttttggatccagtggcagataagcttatggtagcagctacattgatattgttgtgcactaaaccaatggtcgccgttgtcttaggaccagttccatggttagtgacagtaccttcaatcgccatcattggtagagagattactatgtctgcagtaagagaatgggctgcatctcaaaacggcaagctttcagaggctgttgctgtaaatagcttgggaaagtggaaaactgcaacgcagatgatagcgctaaccatacttcttgcaagccgggatagcagttttgagagactattaccgtcgggtattgggttgctctatgtatctgcagggctctctatatggtctttagttgtttatatgaggaagatatggagagtactgctaaagaagtagcaacaaaaaactcttttttagggctttttgcattcagtatatacacatagaatggaagatttacctctcttcttcttgaagaaagctgactaatttctctctggatacaaatgaaattagttgggcaagcactataagactcttatatgatgctttagttctgttttcaactttgggcactggggtcgtactctacttggtttggttttgtataatatctctgaatcacattgctccggctagcaccgaattttaatgaagcagcaagcacgatcttatgggcaatgatggaaaagcagcaggcgcaatttcgttctagtcgaagacttggtctcatgaattctgatataaatgaaaacaattgttgcatgtcatgtagatgcttttaccgatacaatataatttatatatataaaaaactttggtt

SEQ ID NO: 21298 - protein, 266 aa, Arabidopsis thaliana
  peptide (1)..(266): Ceres Seq. ID no. 12331913
  misc_feature (107)..(258): Pfam Name: CDP-alcohol phosphatidyltransferase Pfam Description: CDP-alcohol phosphatidyltransferase
  misc_feature (74)..(260): Homolog of NCBI NO: 23104171 NR Description: hypothetical protein [Azotobacter vinelandii]
  misc_feature (74)..(260): Homolog of NCBI NO: 15597780 NR Description: CDP-diacylglycerol--glycerol-3-phosphate
  misc_feature (74)..(260): Homolog of NCBI NO: 23472904 NR Description: hypothetical protein [Pseudomonas syringae pv.
  misc_feature (74)..(260): Homolog of NCBI NO: 28870198 NR Description: CDP-diacylglycerol--glycerol-3-phosphate
  misc_feature (74)..(260): Homolog of NCBI NO: 27753591 NR Description: CDP-diacylglycerol-glycerol-3-phosphate
  misc_feature (74)..(260): Homolog of NCBI NO: 26990792 NR Description: CDP-diacylglycerol--glycerol-3-phosphate
  misc_feature (74)..(260): Homolog of NCBI NO: 23061902 NR Description: hypothetical protein [Pseudomonas fluorescens
  misc_feature (58)..(265): Homolog of NCBI NO: 24796824 NR Description: putative phosphatidylglycerolphosphate synthase
  misc_feature (44)..(265): Homolog of NCBI NO: 15225064 NR Description: putative CDP-diacylglycerol--glycerol-3-phosphate
  misc_feature (34)..(266): Homolog of NCBI NO: 15233163 NR Description: phosphatidylglycerophosphate synthase - like
GFRIQVGVATALLRASLPSLSDRQVYRSALVEDMGEEDTATVDQNSFGGGKDSLLRNRHSSPLPSPTQLSSKVITLPTVLTLGRVAAVPILVATFYVDCWWGRTATTSIFIAAAITDWLDGYIARKMRLGSEFGAFLDPVADKLMVAATLILLCTKPMVAVVLGPVPWLVTVPSIAIIGREITMSAVREWAASQNGKLSEAVAVNSLGKWKTATQMIALTILLASRDSSFERLLPSGIGLLYVSAGLSIWSLVVYMRKIWRVLLKK

SEQ ID NO: 21299 - protein, 233 aa, Arabidopsis thaliana
  peptide (1)..(233): Ceres Seq. ID no. 12331914
  misc_feature (74)..(225): Pfam Name: CDP-alcohol phosphatidyltransferase Pfam Description: CDP-alcohol phosphatidyltransferase
  misc_feature (41)..(227): Homolog of NCBI NO: 23472904 NR Description: hypothetical protein [Pseudomonas syringae pv.
  misc_feature (41)..(227): Homolog of NCBI NO: 28870198 NR Description: CDP-diacylglycerol--glycerol-3-phosphate
  misc_feature (41)..(227): Homolog of NCBI NO: 27753591 NR Description: CDP-diacylglycerol-glycerol-3-phosphate
  misc_feature (41)..(227): Homolog of NCBI NO: 26990792 NR Description: CDP-diacylglycerol--glycerol-3-phosphate
  misc_feature (41)..(227): Homolog of NCBI NO: 23104171 NR Description: hypothetical protein [Azotobacter vinelandii]
  misc_feature (41)..(227): Homolog of NCBI NO: 15597780 NR Description: CDP-diacylglycerol--glycerol-3-phosphate
  misc_feature (41)..(227): Homolog of NCBI NO: 23061902 NR Description: hypothetical protein [Pseudomonas fluorescens
  misc_feature (25)..(232): Homolog of NCBI NO: 24796824 NR Description: putative phosphatidylglycerolphosphate synthase
  misc_feature (11)..(232): Homolog of NCBI NO: 15225064 NR Description: putative CDP-diacylglycerol--glycerol-3-phosphate
  misc_feature (1)..(233): Homolog of NCBI NO: 15233163 NR Description: phosphatidylglycerophosphate synthase - like
MGEEDTATVDQNSFGGGKDSLLRNRHSSPLPSPTQLSSKVITLPTVLTLGRVAAVPILVATFYVDCWWGRTATTSIFIAAAITDWLDGYIARKMRLGSEFGAFLDPVADKLMVAATLILLCTKPMVAVVLGPVPWLVTVPSIAIIGREITMSAVREWAASQNGKLSEAVAVNSLGKWKTATQMIALTILLASRDSSFERLLPSGIGLLYVSAGLSIWSLVVYMRKIWRVLLKK

SEQ ID NO: 21300 - protein, 140 aa, Arabidopsis thaliana
  peptide (1)..(140): Ceres Seq. ID no. 12331915
  misc_feature (1)..(132): Pfam Name: CDP-alcohol phosphatidyltransferase Pfam Description: CDP-alcohol phosphatidyltransferase
  misc_feature (1)..(134): Homolog of NCBI NO: 23104171 NR Description: hypothetical protein [Azotobacter vinelandii]
  misc_feature (1)..(134): Homolog of NCBI NO: 15597780 NR Description: CDP-diacylglycerol--glycerol-3-phosphate
  misc_feature (1)..(134): Homolog of NCBI NO: 23472904 NR Description: hypothetical protein [Pseudomonas syringae pv.
  misc_feature (1)..(134): Homolog of NCBI NO: 28870198 NR Description: CDP-diacylglycerol--glycerol-3-phosphate
  misc_feature (1)..(134): Homolog of NCBI NO: 27753591 NR Description: CDP-diacylglycerol-glycerol-3-phosphate
  misc_feature (1)..(134): Homolog of NCBI NO: 26990792 NR Description: CDP-diacylglycerol--glycerol-3-phosphate
  misc_feature (1)..(134): Homolog of NCBI NO: 23061902 NR Description: hypothetical protein [Pseudomonas fluorescens
  misc_feature (1)..(139): Homolog of NCBI NO: 24796824 NR Description: putative phosphatidylglycerolphosphate synthase
  misc_feature (1)..(139): Homolog of NCBI NO: 15225064 NR Description: putative CDP-diacylglycerol--glycerol-3-phosphate
  misc_feature (1)..(140): Homolog of NCBI NO: 15233163 NR Description: phosphatidylglycerophosphate synthase - like
MRLGSEFGAFLDPVADKLMVAATLILLCTKPMVAVVLGPVPWLVTVPSIAIIGREITMSAVREWAASQNGKLSEAVAVNSLGKWKTATQMIALTILLASRDSSFERLLPSGIGLLYVSAGLSIWSLVVYMRKIWRVLLKK

SEQ ID NO: 21301 - DNA, 1091 bp, Arabidopsis thaliana
  misc_feature (1)..(1091): Ceres Seq. ID no. 12333256
  misc_feature: MA Experiment ID: 108488 Result: Down-regulated in Transcription
  misc_feature: MA Experiment ID: 108561 Result: Up-regulated in Transcription
  misc_feature: MA Experiment 108561 PARAMETER Experiment Name: At_100uM_ABA_cDNA_P Parameter: Timepoint (hr) Value: 6
  misc_feature: MA Experiment 108561 PARAMETER Experiment Name: At_100uM_ABA_cDNA_P Parameter: Tissue Value: Aerial
  misc_feature: MA Experiment 108561 PARAMETER Experiment Name: At_100uM_ABA_cDNA_P Parameter: Treatment Value: 100uM ABA vs. No Treatment
  misc_feature: MA Experiment ID: 108572 Result: Up-regulated in Transcription
  misc_feature: MA Experiment 108572 PARAMETER Experiment Name: At_Drought_cDNA_P Parameter: Timepoint (hr) Value: 1
  misc_feature: MA Experiment 108572 PARAMETER Experiment Name: At_Drought_cDNA_P Parameter: Tissue Value: Aerial
  misc_feature: MA Experiment 108572 PARAMETER Experiment Name: At_Drought_cDNA_P Parameter: Treatment Value: Drought vs. No Drought
  misc_feature: MA Experiment ID: 108573 Result: Up-regulated in Transcription
  misc_feature: MA Experiment 108573 PARAMETER Experiment Name: At_Drought_cDNA_P Parameter: Timepoint (hr) Value: 6
  misc_feature: MA Experiment 108573 PARAMETER Experiment Name: At_Drought_cDNA_P Parameter: Tissue Value: Aerial
  misc_feature: MA Experiment 108573 PARAMETER Experiment Name: At_Drought_cDNA_P Parameter: Treatment Value: Drought vs. No Drought
  misc_feature: MA Experiment ID: 108595 Result: Down-regulated in Transcription
  misc_feature: MA Experiment 108595 PARAMETER Experiment Name: At_Ler-pi_Ovule_cDNA_P Parameter: Plant Line Value: null
  misc_feature: MA Experiment ID: 20000224 Result: Down-regulated in Transcription
  misc_feature: MA Experiment ID: 20000794 Result: Up-regulated in Transcription
  misc_feature: MA Experiment 20000794 PARAMETER Experiment Name: At_Petals_P Parameter: Age (day) Value: 23-25 days
  misc_feature: MA Experiment 20000794 PARAMETER Experiment Name: At_Petals_P Parameter: Plant Line Value: WS
  misc_feature: MA Experiment 20000794 PARAMETER Experiment Name: At_Petals_P Parameter: Tissue Value: Petals vs. Whole plant
  misc_feature: MA Experiment ID: 20001557 Result: Down-regulated in Transcription
  misc_feature: MA Experiment 20001557 PARAMETER Experiment Name: At_Drought_Soil_Dry_P Parameter: Age (day) Value: 27
  misc_feature: MA Experiment 20001557 PARAMETER Experiment Name: At_Drought_Soil_Dry_P Parameter: Organism Value: A. thaliana
  misc_feature: MA Experiment 20001557 PARAMETER Experiment Name: At_Drought_Soil_Dry_P Parameter: Plant Line Value: WS
  misc_feature: MA Experiment 20001557 PARAMETER Experiment Name: At_Drought_Soil_Dry_P Parameter: Post Timepoint (hr) Value: 3
  misc_feature: MA Experiment 20001557 PARAMETER Experiment Name: At_Drought_Soil_Dry_P Parameter: Post-Treatment Value: Re-Water vs. No Drought
  misc_feature: MA Experiment 20001557 PARAMETER Experiment Name: At_Drought_Soil_Dry_P Parameter: Timepoint (day) Value: 13
  misc_feature: MA Experiment 20001557 PARAMETER Experiment Name: At_Drought_Soil_Dry_P Parameter: Treatment Value: Drought vs. No Drought
  misc_feature: MA Experiment ID: 20001558 Result: Down-regulated in Transcription
  misc_feature: MA Experiment 20001558 PARAMETER Experiment Name: At_Drought_Soil_Dry_P Parameter: Age (day) Value: 27
  misc_feature: MA Experiment 20001558 PARAMETER Experiment Name: At_Drought_Soil_Dry_P Parameter: Organism Value: A. thaliana
  misc_feature: MA Experiment 20001558 PARAMETER Experiment Name: At_Drought_Soil_Dry_P Parameter: Plant Line Value: WS
  misc_feature: MA Experiment 20001558 PARAMETER Experiment Name: At_Drought_Soil_Dry_P Parameter: Post Timepoint (hr) Value: 6
  misc_feature: MA Experiment 20001558 PARAMETER Experiment Name: At_Drought_Soil_Dry_P Parameter: Post-Treatment Value: Re-Water vs. No Drought
  misc_feature: MA Experiment 20001558 PARAMETER Experiment Name: At_Drought_Soil_Dry_P Parameter: Timepoint (day) Value: 13
  misc_feature: MA Experiment 20001558 PARAMETER Experiment Name: At_Drought_Soil_Dry_P Parameter: Treatment Value: Drought vs. No Drought
  misc_feature: MA Experiment ID: 20001560 Result: Down-regulated in Transcription
  misc_feature: MA Experiment 20001560 PARAMETER Experiment Name: At_Drought_Soil_Dry_P Parameter: Age (day) Value: 28
  misc_feature: MA Experiment 20001560 PARAMETER Experiment Name: At_Drought_Soil_Dry_P Parameter: Organism Value: A. thaliana
  misc_feature: MA Experiment 20001560 PARAMETER Experiment Name: At_Drought_Soil_Dry_P Parameter: Plant Line Value: WS
  misc_feature: MA Experiment 20001560 PARAMETER Experiment Name: At_Drought_Soil_Dry_P Parameter: Post Timepoint (hr) Value: None
  misc_feature: MA Experiment 20001560 PARAMETER Experiment Name: At_Drought_Soil_Dry_P Parameter: Post-Treatment Value: None
  misc_feature: MA Experiment 20001560 PARAMETER Experiment Name: At_Drought_Soil_Dry_P Parameter: Timepoint (day) Value: 14
  misc_feature: MA Experiment 20001560 PARAMETER Experiment Name: At_Drought_Soil_Dry_P Parameter: Treatment Value: Drought vs. No Drought
aaaacgacaagtagttttcttagaatttatcattatccagatttttgagaaggagacggcgaagaagagaagaagatcaaaactatggcgagtcaccacgcgatcgaagtgacgaagacggtgctagaagtagccgacgtagcatggaccgccgtagaaacctaccatcaccatcaccaccaccaagacgagaatcacgagtcaacgaatccgatttctgatccacgagatcgtgaattagaagctcttcgtcaagagaatcgtcgtctcaggactttgcttgaatcgaatcttaaactctttgagactctcgctgaatctgctgcgttctctcatgattgccctagcgacctctatgctaggcttgtaacgatggttacttcaagagatttcttggctagattagagaatcttagacaagctttatctaatggtactcagaatcaatttccattcaaggaaccaacagaagatgatgtgaagactgttgaagttcttatagagatgggtcatcaagagccaagttggtgggttttggttactgatgatatggttcctagtaatgtcgaggaacaaagcgcgatcgataacgaacattacattgttgtgaatgaagatcatgtgattgatgctgttgctcactttttggctaaatgtattatgtcaaatcccaaagctaagaatctcaaacctgaagagcttcagaaactgctggtgcaagaagttactgctttgagcaaggtagggaaggtagtggatatatggcatgctgggaaaatgttctacacgttttccacttggggacttgcttttggagggttataccaagctcgtggtgcgctgaagatagctgctaagggtgttcatgcgaccagcaaggttgttcttagggctctctgaaagttataagaggtctatctcctactatctttgggtttgtctttctgtgcgagactctgttttaaaattaatagcattgcgtgtgtaaatagtgtaaatagggtttgatcaatgttgtatttcatattgatttcaaattcgacatttgttctttgattctcgtttataaacgcagacaatttgtgaatacc

SEQ ID NO: 21302 - protein, 271 aa, Arabidopsis thaliana
  peptide (1)..(271): Ceres Seq. ID no. 12333257
  misc_feature (124)..(267): Homolog of NCBI NO: 30686591 NR Description: expressed protein [Arabidopsis thaliana]
  misc_feature (141)..(267): Homolog of NCBI NO: 30695733 NR Description: expressed protein [Arabidopsis thaliana]
  misc_feature (1)..(259): Homolog of NCBI NO: 19033559 NR Description: putative growth factor [Oryza sativa (japonica
  misc_feature (1)..(271): Homolog of NCBI NO: 25373234 NR Description: hypothetical protein T12C22.4 [imported] -
  misc_feature (1)..(271): Homolog of NCBI NO: 15219442 NR Description: unknown protein; protein id: At1g44770.1
MASHHAIEVTKTVLEVADVAWTAVETYHHHHHHQDENHESTNPISDPRDRELEALRQENRRLRTLLESNLKLFETLAESAAFSHDCPSDLYARLVTMVTSRDFLARLENLRQALSNGTQNQFPFKEPTEDDVKTVEVLIEMGHQEPSWWVLVTDDMVPSNVEEQSAIDNEHYIVVNEDHVIDAVAHFLAKCIMSNPKAKNLKPEELQKLLVQEVTALSKVGKVVDIWHAGKMFYTFSTWGLAFGGLYQARGALKIAAKGVHATSKVVLRAL

SEQ ID NO: 21303 - protein, 175 aa, Arabidopsis thaliana
  peptide (1)..(175): Ceres Seq. ID no. 12333258
  misc_feature (28)..(171): Homolog of NCBI NO: 30686591 NR Description: expressed protein [Arabidopsis thaliana]
  misc_feature (45)..(171): Homolog of NCBI NO: 30695733 NR Description: expressed protein [Arabidopsis thaliana]
  misc_feature (1)..(163): Homolog of NCBI NO: 19033559 NR Description: putative growth factor [Oryza sativa (japonica
  misc_feature (1)..(175): Homolog of NCBI NO: 25373234 NR Description: hypothetical protein T12C22.4 [imported] -
  misc_feature (1)..(175): Homolog of NCBI NO: 15219442 NR Description: unknown protein; protein id: At1g44770.1
MVTSRDFLARLENLRQALSNGTQNQFPFKEPTEDDVKTVEVLIEMGHQEPSWWVLVTDDMVPSNVEEQSAIDNEHYIVVNEDHVIDAVAHFLAKCIMSNPKAKNLKPEELQKLLVQEVTALSKVGKVVDIWHAGKMFYTFSTWGLAFGGLYQARGALKIAAKGVHATSKVVLRAL

SEQ ID NO: 21304 - DNA, 1790 bp, Arabidopsis thaliana
  misc_feature (1)..(1790): Ceres Seq. ID no. 12371075
  misc_feature: MA Experiment ID: 108474 Result: Down-regulated in Transcription
  misc_feature: MA Experiment 108474 PARAMETER Experiment Name: At_Drought_Flowers_cDNA_P Parameter: Timepoint (hr) Value: null
  misc_feature: MA Experiment 108474 PARAMETER Experiment Name: At_Drought_Flowers_cDNA_P Parameter: Treatment Value: Drought vs. No Drought
  misc_feature: MA Experiment ID: 108501 Result: Down-regulated in Transcription
  misc_feature: MA Experiment 108501 PARAMETER Experiment Name: At_ap2_floral_buds_cDNA_P Parameter: Plant Line Value: ap2 (Ler.)
  misc_feature: MA Experiment 108501 PARAMETER Experiment Name: At_ap2_floral_buds_cDNA_P Parameter: Tissue Value: Closed Flower
  misc_feature: MA Experiment ID: 20000184 Result: Up-regulated in Transcription
  misc_feature: MA Experiment 20000184 PARAMETER Experiment Name: At_Shoots__P Parameter: Age (day) Value: 7
  misc_feature: MA Experiment 20000184 PARAMETER Experiment Name: At_Shoots__P Parameter: Tissue Value: Shoots vs. Whole Plant
  misc_feature: MA Experiment ID: 20000265 Result: Up-regulated in Transcription
  misc_feature: MA Experiment 20000265 PARAMETER Experiment Name: At_Open_Flower_P Parameter: Age (day) Value: 21
  misc_feature: MA Experiment 20000265 PARAMETER Experiment Name: At_Open_Flower_P Parameter: Plant Line Value: WS
  misc_feature: MA Experiment 20000265 PARAMETER Experiment Name: At_Open_Flower_P Parameter: Tissue Value: Closed Flower vs. Whole Plant
  misc_feature: MA Experiment ID: 20000286 Result: Up-regulated in Transcription
  misc_feature: MA Experiment 20000286 PARAMETER Experiment Name: At_Open_Flower_P Parameter: Age (day) Value: 21
  misc_feature: MA Experiment 20000286 PARAMETER Experiment Name: At_Open_Flower_P Parameter: Plant Line Value: WS
  misc_feature: MA Experiment 20000286 PARAMETER Experiment Name: At_Open_Flower_P Parameter: Tissue Value: Half Open vs. Whole Plant
  misc_feature: MA Experiment ID: 20001910 Result: Down-regulated in Transcription
  misc_feature: MA Experiment 20001910 PARAMETER Experiment Name: At_Drought_Reproduction_P Parameter: Age (day) Value: 37
  misc_feature: MA Experiment 20001910 PARAMETER Experiment Name: At_Drought_Reproduction_P Parameter: Organism Value: A. thaliana
  misc_feature: MA Experiment 20001910 PARAMETER Experiment Name: At_Drought_Reproduction_P Parameter: Plant Line Value: WS
  misc_feature: MA Experiment 20001910 PARAMETER Experiment Name: At_Drought_Reproduction_P Parameter: Timepoint (day) Value: 7
  misc_feature: MA Experiment 20001910 PARAMETER Experiment Name: At_Drought_Reproduction_P Parameter: Tissue Value: Flowers
  misc_feature: MA Experiment 20001910 PARAMETER Experiment Name: At_Drought_Reproduction_P Parameter: Treatment Value: Drought vs. No Drought
atcccaaatcacactcaccactctctcttctcaacatttttctccaacaaaaacaaaaaacaatgactccttttgctctgttcctcttcactctccttgccctttcaagttcatgttgctctgccattggtccacaaaacaacagaacagtgttagcacttgcaagcagaattgggatcaactatggaaaattaggcaacaatcttccttctccttaccaatcaatcaacctcatcaaaaccattaaagcaggccacgtcaagctctatgacgccgatccagaaaccctaaagctcctctctacgaccaatctttacgtcaccatcatggtccctaacaaccagatcatctcaataggtgctgatcaagccgctgctgataactgggtcgccactaatgtccttccttttcacccgcaaacccgaatccgattcgtcctcgttggcaacgaggtcctcagctacagttctgatcaagacaagcaaatatgggctaatcttgtccctgccatgcgtaaagtagtgaactctcttagagctcgtggaattcacaacatcaaagttgggacacctcttgccatggacgctcttcgttcgagttttcctccttcgagtggtacattccgggaagatatcgctgttccgatgatgttaccgttgttgaagtttctcaatggaacaaactctttcttcttccttgatgtttacccttacttcccttggtctactgatccggttaataaccatttggattttgctctgttcgaatcgaattctacttataccgatcctcaaaccggtttggtttacaccaatcttctagaccagatgctcgattcggttatctttgcgatgaccaagctcggttatccgaatatcagtctcgcaatctctgaaaccgggtggcctaatgacggtgatatccatgaaaccggagctaatattgtcaatgccgcgacgtataaccggaatttgatcaagaagatgactgctaacccgccactcggtacaccagctaggcgcggtgcacctataccgacgtttttgttctctttgttcaatgaaaaccagaaacccggttcgggaacagagagacattggggaattttgaaccctgacggtacaccgatctacgacatcgatttcagcggtacaagatcgttttctggttttgattcgttgcctaaaccgagtaacaatgttccgtttaaaggtaatgtatggtgtgtggcggttgatggggccgatgaggcagagctagggcaggcgcttaactttgcttgcggaagaagcaatgcaacatgtgcagcgttggctccaggaggagaatgctatgcaccggtgacggttacttggcatgcaagctatgcgtttagctcgtactgggctcagttccggaaccaaagctctcaatgctacttcaatggtttggctcgtgagaccacgaccaaccctggaaatgagcgttgcaagtttcctagcgttacattgtgaggctgcctcgtgactcaggcgtgtggaggaaaggatcaaaagaatcattcgcattaagttgattatatctcttgataattatgattagtttcctttttattccaagtttttactctttgtgtcccattgttgtgcaagatctataataatctatagaaatttgttcctcatcccttctcatttctcatatatctagtagtttattaatgttctgaaggaaattatgagaattttataactaattcaagaacatgttttgcgatcattactatacgagaaatatgaagtttttgatcc

SEQ ID NO: 21305 - protein, 496 aa, Arabidopsis thaliana
  peptide (1)..(496): Ceres Seq. ID no. 12371076
  misc_feature (57)..(381): Pfam Name: Glycosyl hydrolases family 17 Pfam Description: Glycosyl hydrolases family 17
  misc_feature (57)..(486): Homolog of NCBI NO: 29647494 NR Description: putative beta-1,3-glucanase
  misc_feature (431)..(496): Homolog of NCBI NO: 6642633 NR Description: putative beta-1,3-glucanase precursor
  misc_feature (54)..(420): Homolog of NCBI NO: 6642633 NR Description: putative beta-1,3-glucanase precursor
  misc_feature (53)..(496): Homolog of NCBI NO: 6714534 NR Description: beta-1,3-glucanase [Salix gilgiana]
  misc_feature (54)..(496): Homolog of NCBI NO: 22330905 NR Description: glycosyl hydrolase family 17
  misc_feature (54)..(496): Homolog of NCBI NO: 21593090 NR Description: putative glucan endo-1-3-beta-glucosidase
  misc_feature (27)..(496): Homolog of NCBI NO: 322641 NR Description: beta-1,3-glucanase homolog (clone A6) - rape
  misc_feature (21)..(496): Homolog of NCBI NO: 15236405 NR Description: glycosyl hydrolase family 17 (anther-specific
  misc_feature (21)..(496): Homolog of NCBI NO: 15229514 NR Description: glycosyl hydrolase family 17
  misc_feature (21)..(496): Homolog of NCBI NO: 21592541 NR Description: beta-1,3-glucanase, putative [Arabidopsis
PKSHSPLSLLNIFLQQKQKTMTPFALFLFTLLALSSSCCSAIGPQNNRTVLALASRIGINYGKLGNNLPSPYQSINLIKTIKAGHVKLYDADPETLKLLSTTNLYVTIMVPNNQIISIGADQAAADNWVATNVLPFHPQTRIRFVLVGNEVLSYSSDQDKQIWANLVPAMRKVVNSLRARGIHNIKVGTPLAMDALRSSFPPSSGTFREDIAVPMMLPLLKFLNGTNSFFFLDVYPYFPWSTDPVNNHLDFALFESNSTYTDPQTGLVYTNLLDQMLDSVIFAMTKLGYPNISLAISETGWPNDGDIHETGANIVNAATYNRNLIKKMTANPPLGTPARRGAPIPTFLFSLFNENQKPGSGTERHWGILNPDGTPIYDIDFSGTRSFSGFDSLPKPSNNVPFKGNVWCVAVDGADEAELGQALNFACGRSNATCAALAPGGECYAPVTVTWHASYAFSSYWAQFRNQSSQCYFNGLARETTTNPGNERCKFPSVTL

SEQ ID NO: 21306 - protein, 476 aa, Arabidopsis thaliana
  peptide (1)..(476): Ceres Seq. ID no. 12371077
  misc_feature (37)..(361): Pfam Name: Glycosyl hydrolases family 17 Pfam Description: Glycosyl hydrolases family 17
  misc_feature (37)..(466): Homolog of NCBI NO: 29647494 NR Description: putative beta-1,3-glucanase
  misc_feature (411)..(476): Homolog of NCBI NO: 6642633 NR Description: putative beta-1,3-glucanase precursor
  misc_feature (34)..(400): Homolog of NCBI NO: 6642633 NR Description: putative beta-1,3-glucanase precursor
  misc_feature (33)..(476): Homolog of NCBI NO: 6714534 NR Description: beta-1,3-glucanase [Salix gilgiana]
  misc_feature (34)..(476): Homolog of NCBI NO: 22330905 NR Description: glycosyl hydrolase family 17
  misc_feature (34)..(476): Homolog of NCBI NO: 21593090 NR Description: putative glucan endo-1-3-beta-glucosidase
  misc_feature (7)..(476): Homolog of NCBI NO: 322641 NR Description: beta-1,3-glucanase homolog (clone A6) - rape
  misc_feature (1)..(476): Homolog of NCBI NO: 15236405 NR Description: glycosyl hydrolase family 17 (anther-specific
  misc_feature (1)..(476): Homolog of NCBI NO: 15229514 NR Description: glycosyl hydrolase family 17
  misc_feature (1)..(476): Homolog of NCBI NO: 21592541 NR Description: beta-1,3-glucanase, putative [Arabidopsis
MTPFALFLFTLLALSSSCCSAIGPQNNRTVLALASRIGINYGKLGNNLPSPYQSINLIKTIKAGHVKLYDADPETLKLLSTTNLYVTIMVPNNQIISIGADQAAADNWVATNVLPFHPQTRIRFVLVGNEVLSYSSDQDKQIWANLVPAMRKVVNSLRARGIHNIKVGTPLAMDALRSSFPPSSGTFREDIAVPMMLPLLKFLNGTNSFFFLDVYPYFPWSTDPVNNHLDFALFESNSTYTDPQTGLVYTNLLDQMLDSVIFAMTKLGYPNISLAISETGWPNDGDIHETGANIVNAATYNRNLIKKMTANPPLGTPARRGAPIPTFLFSLFNENQKPGSGTERHWGILNPDGTPIYDIDFSGTRSFSGFDSLPKPSNNVPFKGNVWCVAVDGADEAELGQALNFACGRSNATCAALAPGGECYAPVTVTWHASYAFSSYWAQFRNQSSQCYFNGLARETTTNPGNERCKFPSVTL

SEQ ID NO: 21307 - protein, 388 aa, Arabidopsis thaliana
  peptide (1)..(388): Ceres Seq. ID no. 12371078
  misc_feature (1)..(273): Pfam Name: Glycosyl hydrolases family 17 Pfam Description: Glycosyl hydrolases family 17
  misc_feature (1)..(378): Homolog of NCBI NO: 29647494 NR Description: putative beta-1,3-glucanase
  misc_feature (323)..(388): Homolog of NCBI NO: 6642633 NR Description: putative beta-1,3-glucanase precursor
  misc_feature (1)..(312): Homolog of NCBI NO: 6642633 NR Description: putative beta-1,3-glucanase precursor
  misc_feature (1)..(388): Homolog of NCBI NO: 6714534 NR Description: beta-1,3-glucanase [Salix gilgiana]
  misc_feature (1)..(388): Homolog of NCBI NO: 22330905 NR Description: glycosyl hydrolase family 17
  misc_feature (1)..(388): Homolog of NCBI NO: 21593090 NR Description: putative glucan endo-1-3-beta-glucosidase
  misc_feature (1)..(388): Homolog of NCBI NO: 322641 NR Description: beta-1,3-glucanase homolog (clone A6) - rape
  misc_feature (1)..(388): Homolog of NCBI NO: 15236405 NR Description: glycosyl hydrolase family 17 (anther-specific
  misc_feature (1)..(388): Homolog of NCBI NO: 15229514 NR Description: glycosyl hydrolase family 17
  misc_feature (1)..(388): Homolog of NCBI NO: 21592541 NR Description: beta-1,3-glucanase, putative [Arabidopsis
MVPNNQIISIGADQAAADNWVATNVLPFHPQTRIRFVLVGNEVLSYSSDQDKQIWANLVPAMRKVVNSLRARGIHNIKVGTPLAMDALRSSFPPSSGTFREDIAVPMMLPLLKFLNGTNSFFFLDVYPYFPWSTDPVNNHLDFALFESNSTYTDPQTGLVYTNLLDQMLDSVIFAMTKLGYPNISLAISETGWPNDGDIHETGANIVNAATYNRNLIKKMTANPPLGTPARRGAPIPTFLFSLFNENQKPGSGTERHWGILNPDGTPIYDIDFSGTRSFSGFDSLPKPSNNVPFKGNVWCVAVDGADEAELGQALNFACGRSNATCAALAPGGECYAPVTVTWHASYAFSSYWAQFRNQSSQCYFNGLARETTTNPGNERCKFPSVTL

SEQ ID NO: 21308 - DNA, 656 bp, Arabidopsis thaliana
  misc_feature (1)..(656): Ceres Seq. ID no. 12370552
  misc_feature: MA Experiment ID: 108433 Result: Up-regulated in Transcription
  misc_feature: MA Experiment 108433 PARAMETER Experiment Name: At_rhl_Mutant2_cDNA_P Parameter: Age (day) Value: 7
  misc_feature: MA Experiment 108433 PARAMETER Experiment Name: At_rhl_Mutant2_cDNA_P Parameter: Organism Value: A. thaliana
  misc_feature: MA Experiment 108433 PARAMETER Experiment Name: At_rhl_Mutant2_cDNA_P Parameter: Plant Line Value: rhl Mutant vs. wt landsburg
  misc_feature: MA Experiment 108433 PARAMETER Experiment Name: At_rhl_Mutant2_cDNA_P Parameter: Tissue Value: Roots
  misc_feature: MA Experiment ID: 108434 Result: Down-regulated in Transcription
  misc_feature: MA Experiment 108434 PARAMETER Experiment Name: At_Root_Tips_cDNA_P Parameter: Tissue Value: Root Tips
  misc_feature: MA Experiment ID: 108461 Result: Up-regulated in Transcription
  misc_feature: MA Experiment 108461 PARAMETER Experiment Name: At_Germinating_Seeds_cDNA_P Parameter: Age (day) Value: 1 vs. 0
  misc_feature: MA Experiment 108461 PARAMETER Experiment Name: At_Germinating_Seeds_cDNA_P Parameter: Tissue Value: Germinating Seeds
  misc_feature: MA Experiment ID: 108462 Result: Up-regulated in Transcription
  misc_feature: MA Experiment 108462 PARAMETER Experiment Name: At_Germinating_Seeds_cDNA_P Parameter: Age (day) Value: 2 vs. 0
  misc_feature: MA Experiment 108462 PARAMETER Experiment Name: At_Germinating_Seeds_cDNA_P Parameter: Tissue Value: Germinating Seeds
  misc_feature: MA Experiment ID: 108463 Result: Up-regulated in Transcription
  misc_feature: MA Experiment 108463 PARAMETER Experiment Name: At_Germinating_Seeds_cDNA_P Parameter: Age (day) Value: 3 vs. 0
  misc_feature: MA Experiment 108463 PARAMETER Experiment Name: At_Germinating_Seeds_cDNA_P Parameter: Tissue Value: Germinating Seeds
  misc_feature: MA Experiment ID: 108668 Result: Up-regulated in Transcription
  misc_feature: MA Experiment 108668 PARAMETER Experiment Name: At_2mM_SA_cDNA_P Parameter: Plant Line Value: WS
  misc_feature: MA Experiment 108668 PARAMETER Experiment Name: At_2mM_SA_cDNA_P Parameter: Timepoint (hr) Value: 6
  misc_feature: MA Experiment 108668 PARAMETER Experiment Name: At_2mM_SA_cDNA_P Parameter: Treatment Value: 2mM SA vs. No Treatment
  misc_feature: MA Experiment ID: 20000111 Result: Down-regulated in Transcription
  misc_feature: MA Experiment 20000111 PARAMETER Experiment Name: At_42deg_Heat_cDNA_P Parameter: Temperature (deg C) Value: 42 vs. 22
  misc_feature: MA Experiment 20000111 PARAMETER Experiment Name: At_42deg_Heat_cDNA_P Parameter: Timepoint (hr) Value: 6
  misc_feature: MA Experiment 20000111 PARAMETER Experiment Name: At_42deg_Heat_cDNA_P Parameter: Tissue Value: Aerial
  misc_feature: MA Experiment ID: 20000180 Result: Up-regulated in Transcription
  misc_feature: MA Experiment 20000180 PARAMETER Experiment Name: At_Germinating_Seeds_P Parameter: Age (hr) Value: 24 vs. 0
  misc_feature: MA Experiment 20000180 PARAMETER Experiment Name: At_Germinating_Seeds_P Parameter: Tissue Value: Germinating Seeds
  misc_feature: MA Experiment ID: 20000213 Result: Up-regulated in Transcription
  misc_feature: MA Experiment 20000213 PARAMETER Experiment Name: At_4deg_Cold_P Parameter: Timepoint (hr) Value: 2
  misc_feature: MA Experiment ID: 20000224 Result: Down-regulated in Transcription
  misc_feature: MA Experiment ID: 20000227 Result: Down-regulated in Transcription
  misc_feature: MA Experiment 20000227 PARAMETER Experiment Name: At_Root-Tips-vs-Tops_P Parameter: Tissue Value: Root Tips vs. Root Tops
  misc_feature: MA Experiment ID: 20000234 Result: Down-regulated in Transcription
  misc_feature: MA Experiment 20000234 PARAMETER Experiment Name: At_Siliques_P Parameter: Age (day) Value: 21
  misc_feature: MA Experiment 20000234 PARAMETER Experiment Name: At_Siliques_P Parameter: Organism Value: A. thaliana
  misc_feature: MA Experiment 20000234 PARAMETER Experiment Name: At_Siliques_P Parameter: Plant Line Value: WS
  misc_feature: MA Experiment 20000234 PARAMETER Experiment Name: At_Siliques_P Parameter: Tissue Value: Less Than 5mm Siliques vs. Whole Plant
  misc_feature: MA Experiment ID: 20000235 Result: Down-regulated in Transcription
  misc_feature: MA Experiment 20000235 PARAMETER Experiment Name: At_Siliques_P Parameter: Age (day) Value: 21
  misc_feature: MA Experiment 20000235 PARAMETER Experiment Name: At_Siliques_P Parameter: Organism Value: A. thaliana
  misc_feature: MA Experiment 20000235 PARAMETER Experiment Name: At_Siliques_P Parameter: Plant Line Value: WS
  misc_feature: MA Experiment 20000235 PARAMETER Experiment Name: At_Siliques_P Parameter: Tissue Value: 5-10mm Siliques vs. Whole Plant
  misc_feature: MA Experiment ID: 20000265 Result: Down-regulated in Transcription
  misc_feature: MA Experiment 20000265 PARAMETER Experiment Name: At_Open_Flower_P Parameter: Age (day) Value: 21
  misc_feature: MA Experiment 20000265 PARAMETER Experiment Name: At_Open_Flower_P Parameter: Plant Line Value: WS
  misc_feature: MA Experiment 20000265 PARAMETER Experiment Name: At_Open_Flower_P Parameter: Tissue Value: Closed Flower vs. Whole Plant
  misc_feature: MA Experiment ID: 20000268 Result: Down-regulated in Transcription
  misc_feature: MA Experiment 20000268 PARAMETER Experiment Name: At_100mM_NaCl__P Parameter: Age (day) Value: 14
  misc_feature: MA Experiment 20000268 PARAMETER Experiment Name: At_100mM_NaCl__P Parameter: Organism Value: A. thaliana
  misc_feature: MA Experiment 20000268 PARAMETER Experiment Name: At_100mM_NaCl__P Parameter: Plant Line Value: WS
  misc_feature: MA Experiment 20000268 PARAMETER Experiment Name: At_100mM_NaCl__P Parameter: Timepoint (hr) Value: 6
  misc_feature: MA Experiment 20000268 PARAMETER Experiment Name: At_100mM_NaCl__P Parameter: Tissue Value: Whole Plant
  misc_feature: MA Experiment 20000268 PARAMETER Experiment Name: At_100mM_NaCl__P Parameter: Treatment Value: 100mM NaCl vs. No Treatment
  misc_feature: MA Experiment ID: 20000286 Result: Down-regulated in Transcription
  misc_feature: MA Experiment 20000286 PARAMETER Experiment Name: At_Open_Flower_P Parameter: Age (day) Value: 21
  misc_feature: MA Experiment 20000286 PARAMETER Experiment Name: At_Open_Flower_P Parameter: Plant Line Value: WS
  misc_feature: MA Experiment 20000286 PARAMETER Experiment Name: At_Open_Flower_P Parameter: Tissue Value: Half Open vs. Whole Plant
  misc_feature: MA Experiment ID: 20000436 Result: Down-regulated in Transcription
  misc_feature: MA Experiment 20000436 PARAMETER Experiment Name: At_Drought_P Parameter: Age (day) Value: 7
  misc_feature: MA Experiment 20000436 PARAMETER Experiment Name: At_Drought_P Parameter: Organism Value: A. thaliana
  misc_feature: MA Experiment 20000436 PARAMETER Experiment Name: At_Drought_P Parameter: Plant Line Value: WS
  misc_feature: MA Experiment 20000436 PARAMETER Experiment Name: At_Drought_P Parameter: Timepoint (hr) Value: 12
  misc_feature: MA Experiment 20000436 PARAMETER Experiment Name: At_Drought_P Parameter: Tissue Value: Whole Plant
  misc_feature: MA Experiment 20000436 PARAMETER Experiment Name: At_Drought_P Parameter: Treatment Value: Drought vs. No Drought
  misc_feature: MA Experiment ID: 20000496 Result: Down-regulated in Transcription
  misc_feature: MA Experiment 20000496 PARAMETER Experiment Name: At_Guard_Cells_P Parameter: Harvest Date Value: 7/19/2002
  misc_feature: MA Experiment 20000496 PARAMETER Experiment Name: At_Guard_Cells_P Parameter: Organism Value: Canola
  misc_feature: MA Experiment 20000496 PARAMETER Experiment Name: At_Guard_Cells_P Parameter: Tissue Value: Guard Cells vs. Leaves
  misc_feature: MA Experiment ID: 20000573 Result: Down-regulated in Transcription
  misc_feature: MA Experiment 20000573 PARAMETER Experiment Name: At_100uM_ABA_Mutants__P Parameter: Organism Value: A. thaliana
  misc_feature: MA Experiment 20000573 PARAMETER Experiment Name: At_100uM_ABA_Mutants__P Parameter: Plant Line Value: CS22 vs. Ler wt
  misc_feature: MA Experiment 20000573 PARAMETER Experiment Name: At_100uM_ABA_Mutants__P Parameter: Timepoint (hr) Value: N/A
  misc_feature: MA Experiment 20000573 PARAMETER Experiment Name: At_100uM_ABA_Mutants__P Parameter: Tissue Value: Whole Plant
  misc_feature: MA Experiment 20000573 PARAMETER Experiment Name: At_100uM_ABA_Mutants__P Parameter: Treatment Value: None
  misc_feature: MA Experiment ID: 20000574 Result: Down-regulated in Transcription
  misc_feature: MA Experiment 20000574 PARAMETER Experiment Name: At_100uM_ABA_Mutants__P Parameter: Organism Value: A. thaliana
  misc_feature: MA Experiment 20000574 PARAMETER Experiment Name: At_100uM_ABA_Mutants__P Parameter: Plant Line Value: CS23 vs. Ler wt
  misc_feature: MA Experiment 20000574 PARAMETER Experiment Name: At_100uM_ABA_Mutants__P Parameter: Timepoint (hr) Value: N/A
  misc_feature: MA Experiment 20000574 PARAMETER Experiment Name: At_100uM_ABA_Mutants__P Parameter: Tissue Value: Whole Plant
  misc_feature: MA Experiment 20000574 PARAMETER Experiment Name: At_100uM_ABA_Mutants__P Parameter: Treatment Value: None
  misc_feature: MA Experiment ID: 20001247 Result: Up-regulated in Transcription
  misc_feature: MA Experiment 20001247 PARAMETER Experiment Name: At_Far-red-induction_P Parameter: Age (day) Value: 7
  misc_feature: MA Experiment 20001247 PARAMETER Experiment Name: At_Far-red-induction_P Parameter: Light Value: Far-red vs. White
  misc_feature: MA Experiment 20001247 PARAMETER Experiment Name: At_Far-red-induction_P Parameter: Organism Value: A. thaliana
  misc_feature: MA Experiment 20001247 PARAMETER Experiment Name: At_Far-red-induction_P Parameter: Plant Line Value: Columbia
  misc_feature: MA Experiment 20001247 PARAMETER Experiment Name: At_Far-red-induction_P Parameter: Timepoint (hr) Value: 1
  misc_feature: MA Experiment 20001247 PARAMETER Experiment Name: At_Far-red-induction_P Parameter: Tissue Value: Whole Plant
  misc_feature: MA Experiment ID: 20001451 Result: Up-regulated in Transcription
  misc_feature: MA Experiment 20001451 PARAMETER Experiment Name: At_Far-red-induction_P Parameter: Age (day) Value: 7
  misc_feature: MA Experiment 20001451 PARAMETER Experiment Name: At_Far-red-induction_P Parameter: Light Value: Far-red vs. White
  misc_feature: MA Experiment 20001451 PARAMETER Experiment Name: At_Far-red-induction_P Parameter: Organism Value: A. thaliana
  misc_feature: MA Experiment 20001451 PARAMETER Experiment Name: At_Far-red-induction_P Parameter: Plant Line Value: Columbia
  misc_feature: MA Experiment 20001451 PARAMETER Experiment Name: At_Far-red-induction_P Parameter: Timepoint (hr) Value: 24
  misc_feature: MA Experiment 20001451 PARAMETER Experiment Name: At_Far-red-induction_P Parameter: Tissue Value: Whole Plant
  misc_feature: MA Experiment ID: 20001554 Result: Down-regulated in Transcription
  misc_feature: MA Experiment 20001554 PARAMETER Experiment Name: At_Drought_Soil_Dry_P Parameter: Age (day) Value: 21
  misc_feature: MA Experiment 20001554 PARAMETER Experiment Name: At_Drought_Soil_Dry_P Parameter: Organism Value: A. thaliana
  misc_feature: MA Experiment 20001554 PARAMETER Experiment Name: At_Drought_Soil_Dry_P Parameter: Plant Line Value: WS
  misc_feature: MA Experiment 20001554 PARAMETER Experiment Name: At_Drought_Soil_Dry_P Parameter: Post Timepoint (hr) Value: None
  misc_feature: MA Experiment 20001554 PARAMETER Experiment Name: At_Drought_Soil_Dry_P Parameter: Post-Treatment Value: None
  misc_feature: MA Experiment 20001554 PARAMETER Experiment Name: At_Drought_Soil_Dry_P Parameter: Timepoint (day) Value: 7
  misc_feature: MA Experiment 20001554 PARAMETER Experiment Name: At_Drought_Soil_Dry_P Parameter: Treatment Value: Drought vs. No Drought
  misc_feature: MA Experiment ID: 20001555 Result: Down-regulated in Transcription
  misc_feature: MA Experiment 20001555 PARAMETER Experiment Name: At_Drought_Soil_Dry_P Parameter: Age (day) Value: 24
  misc_feature: MA Experiment 20001555 PARAMETER Experiment Name: At_Drought_Soil_Dry_P Parameter: Organism Value: A. thaliana
  misc_feature: MA Experiment 20001555 PARAMETER Experiment Name: At_Drought_Soil_Dry_P Parameter: Plant Line Value: WS
  misc_feature: MA Experiment 20001555 PARAMETER Experiment Name: At_Drought_Soil_Dry_P Parameter: Post Timepoint (hr) Value: None
  misc_feature: MA Experiment 20001555 PARAMETER Experiment Name: At_Drought_Soil_Dry_P Parameter: Post-Treatment Value: None
  misc_feature: MA Experiment 20001555 PARAMETER Experiment Name: At_Drought_Soil_Dry_P Parameter: Timepoint (day) Value: 10
  misc_feature: MA Experiment 20001555 PARAMETER Experiment Name: At_Drought_Soil_Dry_P Parameter: Treatment Value: Drought vs. No Drought
  misc_feature: MA Experiment ID: 20001556 Result: Down-regulated in Transcription
  misc_feature: MA Experiment 20001556 PARAMETER Experiment Name: At_Drought_Soil_Dry_P Parameter: Age (day) Value: 26
  misc_feature: MA Experiment 20001556 PARAMETER Experiment Name: At_Drought_Soil_Dry_P Parameter: Organism Value: A. thaliana
  misc_feature: MA Experiment 20001556 PARAMETER Experiment Name: At_Drought_Soil_Dry_P Parameter: Plant Line Value: WS
  misc_feature: MA Experiment 20001556 PARAMETER Experiment Name: At_Drought_Soil_Dry_P Parameter: Post Timepoint (hr) Value: None
  misc_feature: MA Experiment 20001556 PARAMETER Experiment Name: At_Drought_Soil_Dry_P Parameter: Post-Treatment Value: None
  misc_feature: MA Experiment 20001556 PARAMETER Experiment Name: At_Drought_Soil_Dry_P Parameter: Timepoint (day) Value: 12
  misc_feature: MA Experiment 20001556 PARAMETER Experiment Name: At_Drought_Soil_Dry_P Parameter: Treatment Value: Drought vs. No Drought
  misc_feature: MA Experiment ID: 20001559 Result: Down-regulated in Transcription
  misc_feature: MA Experiment 20001559 PARAMETER Experiment Name: At_Drought_Soil_Dry_P Parameter: Age (day) Value: 28
  misc_feature: MA Experiment 20001559 PARAMETER Experiment Name: At_Drought_Soil_Dry_P Parameter: Organism Value: A. thaliana
  misc_feature: MA Experiment 20001559 PARAMETER Experiment Name: At_Drought_Soil_Dry_P Parameter: Plant Line Value: WS
  misc_feature: MA Experiment 20001559 PARAMETER Experiment Name: At_Drought_Soil_Dry_P Parameter: Post Timepoint (hr) Value: 29
  misc_feature: MA Experiment 20001559 PARAMETER Experiment Name: At_Drought_Soil_Dry_P Parameter: Post-Treatment Value: Re-Water vs. No Drought
  misc_feature: MA Experiment 20001559 PARAMETER Experiment Name: At_Drought_Soil_Dry_P Parameter: Timepoint (day) Value: 14
  misc_feature: MA Experiment 20001559 PARAMETER Experiment Name: At_Drought_Soil_Dry_P Parameter: Treatment Value: Drought vs. No Drought
  misc_feature: MA Experiment ID: 20001904 Result: Down-regulated in Transcription
  misc_feature: MA Experiment 20001904 PARAMETER Experiment Name: At_Drought_Reproduction_P Parameter: Age (day) Value: 37
  misc_feature: MA Experiment 20001904 PARAMETER Experiment Name: At_Drought_Reproduction_P Parameter: Organism Value: A. thaliana
  misc_feature: MA Experiment 20001904 PARAMETER Experiment Name: At_Drought_Reproduction_P Parameter: Plant Line Value: WS
  misc_feature: MA Experiment 20001904 PARAMETER Experiment Name: At_Drought_Reproduction_P Parameter: Timepoint (day) Value: 7
  misc_feature: MA Experiment 20001904 PARAMETER Experiment Name: At_Drought_Reproduction_P Parameter: Tissue Value: Rosettes
  misc_feature: MA Experiment 20001904 PARAMETER Experiment Name: At_Drought_Reproduction_P Parameter: Treatment Value: Drought vs. No Drought
  misc_feature: MA Experiment ID: 20001907 Result: Down-regulated in Transcription
  misc_feature: MA Experiment 20001907 PARAMETER Experiment Name: At_Drought_Reproduction_P Parameter: Age (day) Value: 37
  misc_feature: MA Experiment 20001907 PARAMETER Experiment Name: At_Drought_Reproduction_P Parameter: Organism Value: A. thaliana
  misc_feature: MA Experiment 20001907 PARAMETER Experiment Name: At_Drought_Reproduction_P Parameter: Plant Line Value: WS
  misc_feature: MA Experiment 20001907 PARAMETER Experiment Name: At_Drought_Reproduction_P Parameter: Timepoint (day) Value: 7
  misc_feature: MA Experiment 20001907 PARAMETER Experiment Name: At_Drought_Reproduction_P Parameter: Tissue Value: Siliques
  misc_feature: MA Experiment 20001907 PARAMETER Experiment Name: At_Drought_Reproduction_P Parameter: Treatment Value: Drought vs. No Drought
attcatctccaaactttcaaaaaaaaacctaaaacaaaaaaaatctctttccttcttctttctccatcaatggcgtcaacaaaacccaccgatcaaatcaaacaactcaaagatatcttcgctcgcttcgacatggacaaggacggaagcttaacgcagctagaactcgccgctcttctgcgttctctcggaatcaaacctcgcggcgatcaaatctctcttctgtaaaaccaaatcgaccgtaacggtaacggatccgtagagttcgacgagctcgtcgtgggcgatattgccggatataaacgaagaggtgttgataaatcaagaacagttgatggaggttttccgttcgtttgatcgtgacggtaacggttcaataacggcggcggaacttgctgggtcaatggctaaaatgggacatccgttgacttaccgtgaattaacggaaatgatgacggaagctgattcaaacggtgacggtgttattagttttaatgagttttctcatattatggctaaatcggctgctgattttcttggattaaccgcttcttgatctgttttgttttaattactctctttttttcttctcctgtcaatgcaacttgtgcaattaacaatgtgctaatctttcgtttggtgtgacgtaaaaattt

SEQ ID NO: 21309 - protein, 75 aa, Arabidopsis thaliana
  peptide (1)..(75): Ceres Seq. ID no. 12370553
  misc_feature (24)..(75): Homolog of NCBI NO: 4959168 NR Description: calmodulin mutant SYNCAM62 [synthetic construct]
  misc_feature (24)..(75): Homolog of NCBI NO: 4959629 NR Description: calmodulin mutant SYNCAM15 [synthetic construct]
  misc_feature (24)..(75): Homolog of NCBI NO: 13386230 NR Description: RIKEN cDNA 2310068O22 [Mus musculus]
  misc_feature (24)..(75): Homolog of NCBI NO: 3800847 NR Description: VU91B calmodulin [synthetic construct]
  misc_feature (31)..(75): Homolog of NCBI NO: 13359053 NR Description: P0436D06.14 [Oryza sativa (japonica
  misc_feature (31)..(75): Homolog of NCBI NO: 15228441 NR Description: putative calmodulin
  misc_feature (31)..(75): Homolog of NCBI NO: 34912426 NR Description: P0681B11.17 [Oryza sativa (japonica
  misc_feature (31)..(75): Homolog of NCBI NO: 15221797 NR Description: calmodulin, putative; protein id: At1g18530.1
  misc_feature (24)..(75): Homolog of NCBI NO: 15230858 NR Description: calmodulin, putative; protein id: At3g25600.1
  misc_feature (24)..(75): Homolog of NCBI NO: 28393082 NR Description: putative calmodulin [Arabidopsis thaliana]
IHLQTFKKKPKTKKISFLLLSPSMASTKPTDQIKQLKDIFARFDMDKDGSLTQLELAALLRSLGIKPRGDQISLL

SEQ ID NO: 21310 - protein, 73 aa, Arabidopsis thaliana
  peptide (1)..(73): Ceres Seq. ID no. 12370554
  misc_feature (35)..(63): Pfam Name: EF hand Pfam Description: EF hand
  misc_feature (1)..(60): Homolog of NCBI NO: 4959168 NR Description: calmodulin mutant SYNCAM62 [synthetic construct]
  misc_feature (1)..(60): Homolog of NCBI NO: 13386230 NR Description: RIKEN cDNA 2310068O22 [Mus musculus]
  misc_feature (1)..(60): Homolog of NCBI NO: 4959629 NR Description: calmodulin mutant SYNCAM15 [synthetic construct]
  misc_feature (1)..(60): Homolog of NCBI NO: 3800847 NR Description: VU91B calmodulin [synthetic construct]
  misc_feature (1)..(66): Homolog of NCBI NO: 13359053 NR Description: P0436D06.14 [Oryza sativa (japonica
  misc_feature (1)..(66): Homolog of NCBI NO: 15228441 NR Description: putative calmodulin
  misc_feature (1)..(72): Homolog of NCBI NO: 34912426 NR Description: P0681B11.17 [Oryza sativa (japonica
  misc_feature (1)..(70): Homolog of NCBI NO: 15221797 NR Description: calmodulin, putative; protein id: At1g18530.1
  misc_feature (1)..(73): Homolog of NCBI NO: 15230858 NR Description: calmodulin, putative; protein id: At3g25600.1
  misc_feature (1)..(73): Homolog of NCBI NO: 28393082 NR Description: putative calmodulin [Arabidopsis thaliana]
MEVFRSFDRDGNGSITAAELAGSMAKMGHPLTYRELTEMMTEADSNGDGVISFNEFSHIMAKSAADFLGLTAS

SEQ ID NO: 21311 - protein, 52 aa, Arabidopsis thaliana
  peptide (1)..(52): Ceres Seq. ID no. 12370555
  misc_feature (1)..(52): Homolog of NCBI NO: 4959168 NR Description: calmodulin mutant SYNCAM62 [synthetic construct]
  misc_feature (1)..(52): Homolog of NCBI NO: 4959629 NR Description: calmodulin mutant SYNCAM15 [synthetic construct]
  misc_feature (1)..(52): Homolog of NCBI NO: 13386230 NR Description: RIKEN cDNA 2310068O22 [Mus musculus]
  misc_feature (1)..(52): Homolog of NCBI NO: 3800847 NR Description: VU91B calmodulin [synthetic construct]
  misc_feature (8)..(52): Homolog of NCBI NO: 13359053 NR Description: P0436D06.14 [Oryza sativa (japonica
  misc_feature (8)..(52): Homolog of NCBI NO: 15228441 NR Description: putative calmodulin
  misc_feature (8)..(52): Homolog of NCBI NO: 34912426 NR Description: P0681B11.17 [Oryza sativa (japonica
  misc_feature (8)..(52): Homolog of NCBI NO: 15221797 NR Description: calmodulin, putative; protein id: At1g18530.1
  misc_feature (1)..(52): Homolog of NCBI NO: 15230858 NR Description: calmodulin, putative; protein id: At3g25600.1
  misc_feature (1)..(52): Homolog of NCBI NO: 28393082 NR Description: putative calmodulin [Arabidopsis thaliana]
MASTKPTDQIKQLKDIFARFDMDKDGSLTQLELAALLRSLGIKPRGDQISLL

SEQ ID NO: 21312 - DNA, 1900 bp, Arabidopsis thaliana
  misc_feature (1)..(1900): Ceres Seq. ID no. 13494031
  misc_feature: MA Experiment ID: 20000264 Result: Up-regulated in Transcription
  misc_feature: MA Experiment 20000264 PARAMETER Experiment Name: At_Open_Flower_P Parameter: Age (day) Value: 21
  misc_feature: MA Experiment 20000264 PARAMETER Experiment Name: At_Open_Flower_P Parameter: Plant Line Value: WS
  misc_feature: MA Experiment 20000264 PARAMETER Experiment Name: At_Open_Flower_P Parameter: Tissue Value: Open Flower vs. Whole Plant
  misc_feature: MA Experiment ID: 20000438 Result: Up-regulated in Transcription
  misc_feature: MA Experiment 20000438 PARAMETER Experiment Name: At_Shoots__P Parameter: Age (day) Value: 14
  misc_feature: MA Experiment 20000438 PARAMETER Experiment Name: At_Shoots__P Parameter: Tissue Value: Shoots vs. Whole Plant
  misc_feature: MA Experiment ID: 20000495 Result: Up-regulated in Transcription
  misc_feature: MA Experiment 20000495 PARAMETER Experiment Name: At_Guard_Cells_P Parameter: Harvest Date Value: 8/2/2002
  misc_feature: MA Experiment 20000495 PARAMETER Experiment Name: At_Guard_Cells_P Parameter: Organism Value: A. thaliana
  misc_feature: MA Experiment 20000495 PARAMETER Experiment Name: At_Guard_Cells_P Parameter: Tissue Value: Guard Cells vs. Leaves
  misc_feature: MA Experiment ID: 20001457 Result: Down-regulated in Transcription
  misc_feature: MA Experiment 20001457 PARAMETER Experiment Name: At_50mM_NH4NO3_L-to-H_P Parameter: Age (day) Value: Undefined
  misc_feature: MA Experiment 20001457 PARAMETER Experiment Name: At_50mM_NH4NO3_L-to-H_P Parameter: Organism Value: Undefined
  misc_feature: MA Experiment 20001457 PARAMETER Experiment Name: At_50mM_NH4NO3_L-to-H_P Parameter: Plant Line Value: Undefined
  misc_feature: MA Experiment 20001457 PARAMETER Experiment Name: At_50mM_NH4NO3_L-to-H_P Parameter: Timepoint (hr) Value: 0.5
  misc_feature: MA Experiment 20001457 PARAMETER Experiment Name: At_50mM_NH4NO3_L-to-H_P Parameter: Tissue Value: Siliques
  misc_feature: MA Experiment 20001457 PARAMETER Experiment Name: At_50mM_NH4NO3_L-to-H_P Parameter: Treatment Value: 50mM NH4NO3 vs. 100mM Manitol
  misc_feature: MA Experiment ID: 20001554 Result: Up-regulated in Transcription
  misc_feature: MA Experiment 20001554 PARAMETER Experiment Name: At_Drought_Soil_Dry_P Parameter: Age (day) Value: 21
  misc_feature: MA Experiment 20001554 PARAMETER Experiment Name: At_Drought_Soil_Dry_P Parameter: Organism Value: A. thaliana
  misc_feature: MA Experiment 20001554 PARAMETER Experiment Name: At_Drought_Soil_Dry_P Parameter: Plant Line Value: WS
  misc_feature: MA Experiment 20001554 PARAMETER Experiment Name: At_Drought_Soil_Dry_P Parameter: Post Timepoint (hr) Value: None
  misc_feature: MA Experiment 20001554 PARAMETER Experiment Name: At_Drought_Soil_Dry_P Parameter: Post-Treatment Value: None
  misc_feature: MA Experiment 20001554 PARAMETER Experiment Name: At_Drought_Soil_Dry_P Parameter: Timepoint (day) Value: 7
  misc_feature: MA Experiment 20001554 PARAMETER Experiment Name: At_Drought_Soil_Dry_P Parameter: Treatment Value: Drought vs. No Drought
  misc_feature: MA Experiment ID: 20001558 Result: Down-regulated in Transcription
  misc_feature: MA Experiment 20001558 PARAMETER Experiment Name: At_Drought_Soil_Dry_P Parameter: Age (day) Value: 27
  misc_feature: MA Experiment 20001558 PARAMETER Experiment Name: At_Drought_Soil_Dry_P Parameter: Organism Value: A. thaliana
  misc_feature: MA Experiment 20001558 PARAMETER Experiment Name: At_Drought_Soil_Dry_P Parameter: Plant Line Value: WS
  misc_feature: MA Experiment 20001558 PARAMETER Experiment Name: At_Drought_Soil_Dry_P Parameter: Post Timepoint (hr) Value: 6
  misc_feature: MA Experiment 20001558 PARAMETER Experiment Name: At_Drought_Soil_Dry_P Parameter: Post-Treatment Value: Re-Water vs. No Drought
  misc_feature: MA Experiment 20001558 PARAMETER Experiment Name: At_Drought_Soil_Dry_P Parameter: Timepoint (day) Value: 13
  misc_feature: MA Experiment 20001558 PARAMETER Experiment Name: At_Drought_Soil_Dry_P Parameter: Treatment Value: Drought vs. No Drought
  misc_feature: MA Experiment ID: 20001560 Result: Down-regulated in Transcription
  misc_feature: MA Experiment 20001560 PARAMETER Experiment Name: At_Drought_Soil_Dry_P Parameter: Age (day) Value: 28
  misc_feature: MA Experiment 20001560 PARAMETER Experiment Name: At_Drought_Soil_Dry_P Parameter: Organism Value: A. thaliana
  misc_feature: MA Experiment 20001560 PARAMETER Experiment Name: At_Drought_Soil_Dry_P Parameter: Plant Line Value: WS
  misc_feature: MA Experiment 20001560 PARAMETER Experiment Name: At_Drought_Soil_Dry_P Parameter: Post Timepoint (hr) Value: None
  misc_feature: MA Experiment 20001560 PARAMETER Experiment Name: At_Drought_Soil_Dry_P Parameter: Post-Treatment Value: None
  misc_feature: MA Experiment 20001560 PARAMETER Experiment Name: At_Drought_Soil_Dry_P Parameter: Timepoint (day) Value: 14
  misc_feature: MA Experiment 20001560 PARAMETER Experiment Name: At_Drought_Soil_Dry_P Parameter: Treatment Value: Drought vs. No Drought
  misc_feature: MA Experiment ID: 20001761 Result: Down-regulated in Transcription
  misc_feature: MA Experiment 20001761 PARAMETER Experiment Name: At_50mM_NH4NO3_L-to-H_P Parameter: Timepoint (hr) Value: 4
  misc_feature: MA Experiment 20001761 PARAMETER Experiment Name: At_50mM_NH4NO3_L-to-H_P Parameter: Tissue Value: Siliques
  misc_feature: MA Experiment 20001761 PARAMETER Experiment Name: At_50mM_NH4NO3_L-to-H_P Parameter: Treatment Value: 50mM NH4NO3 vs 100mM Mannitol
  misc_feature: MA Experiment ID: 20001906 Result: Up-regulated in Transcription
  misc_feature: MA Experiment 20001906 PARAMETER Experiment Name: At_Drought_Reproduction_P Parameter: Age (day) Value: 35
  misc_feature: MA Experiment 20001906 PARAMETER Experiment Name: At_Drought_Reproduction_P Parameter: Organism Value: A. thaliana
  misc_feature: MA Experiment 20001906 PARAMETER Experiment Name: At_Drought_Reproduction_P Parameter: Plant Line Value: WS
  misc_feature: MA Experiment 20001906 PARAMETER Experiment Name: At_Drought_Reproduction_P Parameter: Timepoint (day) Value: 5
  misc_feature: MA Experiment 20001906 PARAMETER Experiment Name: At_Drought_Reproduction_P Parameter: Tissue Value: Siliques
  misc_feature: MA Experiment 20001906 PARAMETER Experiment Name: At_Drought_Reproduction_P Parameter: Treatment Value: Drought vs. No Drought
  misc_feature: MA Experiment ID: 20001909 Result: Up-regulated in Transcription
  misc_feature: MA Experiment 20001909 PARAMETER Experiment Name: At_Drought_Reproduction_P Parameter: Age (day) Value: 35
  misc_feature: MA Experiment 20001909 PARAMETER Experiment Name: At_Drought_Reproduction_P Parameter: Organism Value: A. thaliana
  misc_feature: MA Experiment 20001909 PARAMETER Experiment Name: At_Drought_Reproduction_P Parameter: Plant Line Value: WS
  misc_feature: MA Experiment 20001909 PARAMETER Experiment Name: At_Drought_Reproduction_P Parameter: Timepoint (day) Value: 5
  misc_feature: MA Experiment 20001909 PARAMETER Experiment Name: At_Drought_Reproduction_P Parameter: Tissue Value: Flowers
  misc_feature: MA Experiment 20001909 PARAMETER Experiment Name: At_Drought_Reproduction_P Parameter: Treatment Value: Drought vs. No Drought
cctttcgtcttaaaccccacagcaaaaagccactctcctttctctctctctcttgttcctctgcatccatggccaccaagctcgacaccagtagcttacttttggccctcttgtccaaatgtagcctccttactcaaaccaatcttgctctctctctcctcgtagcctccctagcttctctcgctctttctctcttcttctggtctcatcccggaggacccgcatggggaaagtacttcctccaccgccgccgtcaaaccaccgtgatacccgggccaagaggcttaccttttgtcggaagcatgtctctcatgtcaaacactctggctcaccgttgcatagccgcaaccgcagagaaatttagagccgaacggttaatggcgtttagtttgggagaaactcgcgtgatcgtcacgtgcaatcctgatgtagctaaagagattctaaacagtccggttttcgctgaccgcccggttaaggaatcagcttattccctcatgtttaaccgtgctatcggtttcgctccttacggcgtttactggcgaaccttgagaaaaatcgcgtctaatcatcttttcagcccgaaacagattaaacgttccgaaacgcagagaagcgtgatcgcgaatcaaatcgtgaagtgtctcacaaaacagagtaacaccaaaggtctctgtttcgcacgtgacttgatcaaaacggcatcgcttaataacatgatgtgctctgttttcggaaaagaatacgagcttgaggaagagcatgaagaagtgagtgagctacgtgaattggtggaagaaggttatgatttactcggtacactgaattggaccgatcatctcccatggctctctgaatttgatcctcaaagaatccggtctagatgctctaatctcgtcccaaaagtaaaccggtttgtgaaccggattatctctgaccaccgtgaacaaactcgtgactcaccgagtgacttcgttgacgtattgctctctctcgatggtcctgataaattatccgaccctgatatcatcgccgttctatgggaaatgatattcagaggaactgacacggtggctgttttgatcgagtggattcttgctaggatggtccttcatccagatattcaatcgacggttcacaatgagcttgatcaaatcgtgggacgatcaagggctgtcgaagagtctgacgtggtgtctctagtatatctaacggctgtggtgaaagaagtcttgaggcttcacccgccaggcccactactctcatgggcccgtttagcaatcacagacacgatcatcgacggtcgtcgtgttccggcggggaccaccgcaatggtgaacatgtgggctattgcacacgatccacacgtgtgggagaatccgttggagtttaaacccgaacgttttgtagccaaggaaggtgaggttgagttctcggttcttgggtctgatttgaggcttgcaccgttcgggtccggtcgtcgggtttgccccgggaagaatcttggtttgaccaccgtgacgttttggactgcgacgcttttgcatgagtttgaatggctgacgccgtccgatgagaagaccgttgacttgtccgagaaactgaggctctcgtgtgagatggctaatcctcttgctgctaaattacgccccaggcgcagttttagtgtatgataagggtaaggctatacacagatacagtggtaactaaagcgaaggaaaattagtgtgaatttaaagcaaaagaataaaataaagaacaaagaaagtaaaggaaacaaaaaaaaagaatcatacaaaaaatactaataagaatggtaatgaagcttttatattaaactaacatcttgatacgtgttgtatatatgatgaaaacattaatgtcacaaagaaaagttaat

SEQ ID NO: 21313 - protein, 556 aa, Arabidopsis thaliana
  peptide (1)..(556): Ceres Seq. ID no. 13494032
  misc_feature (89)..(550): Pfam Name: Cytochrome P450 Pfam Description: Cytochrome P450
  misc_feature (23)..(552): Homolog of NCBI NO: 15223341 NR Description: cytochrome P450, putative [Arabidopsis thaliana]
  misc_feature (20)..(552): Homolog of NCBI NO: 6715638 NR Description: T25K16.18 [Arabidopsis thaliana]
  misc_feature (23)..(553): Homolog of NCBI NO: 15226422 NR Description: cytochrome P450, putative [Arabidopsis thaliana]
  misc_feature (23)..(556): Homolog of NCBI NO: 21592543 NR Description: cytochrome p450 (CYP78A9) [Arabidopsis thaliana]
  misc_feature (23)..(556): Homolog of NCBI NO: 15228624 NR Description: cytochrome P450, putative [Arabidopsis thaliana]
FRLKPHSKKPLSFLSLSCSSASMATKLDTSSLLLALLSKCSLLTQTNLALSLLVASLASLALSLFFWSHPGGPAWGKYFLHRRRQTTVIPGPRGLPFVGSMSLMSNTLAHRCIAATAEKFRAERLMAFSLGETRVIVTCNPDVAKEILNSPVFADRPVKESAYSLMFNRAIGFAPYGVYWRTLRKIASNHLFSPKQIKRSETQRSVIANQIVKCLTKQSNTKGLCFARDLIKTASLNNMMCSVFGKEYELEEEHEEVSELRELVEEGYDLLGTLNWTDHLPWLSEFDPQRIRSRCSNLVPKVNRFVNRIISDHREQTRDSPSDFVDVLLSLDGPDKLSDPDIIAVLWEMIFRGTDTVAVLIEWILARMVLHPDIQSTVHNELDQIVGRSRAVEESDVVSLVYLTAVVKEVLRLHPPGPLLSWARLAITDTIIDGRRVPAGTTAMVNMWAIAHDPHVWENPLEFKPERFVAKEGEVEFSVLGSDLRLAPFGSGRRVCPGKNLGLTTVTFWTATLLHEFEWLTPSDEKTVDLSEKLRLSCEMANPLAAKLRPRRSFSV

SEQ ID NO: 21314 - protein, 534 aa, Arabidopsis thaliana
  peptide (1)..(534): Ceres Seq. ID no. 13494033
  misc_feature (67)..(528): Pfam Name: Cytochrome P450 Pfam Description: Cytochrome P450
  misc_feature (1)..(530): Homolog of NCBI NO: 15223341 NR Description: cytochrome P450, putative [Arabidopsis thaliana]
  misc_feature (1)..(530): Homolog of NCBI NO: 6715638 NR Description: T25K16.18 [Arabidopsis thaliana]
  misc_feature (1)..(531): Homolog of NCBI NO: 15226422 NR Description: cytochrome P450, putative [Arabidopsis thaliana]
  misc_feature (1)..(534): Homolog of NCBI NO: 21592543 NR Description: cytochrome p450 (CYP78A9) [Arabidopsis thaliana]
  misc_feature (1)..(534): Homolog of NCBI NO: 15228624 NR Description: cytochrome P450, putative [Arabidopsis thaliana]
MATKLDTSSLLLALLSKCSLLTQTNLALSLLVASLASLALSLFFWSHPGGPAWGKYFLHRRRQTTVIPGPRGLPFVGSMSLMSNTLAHRCIAATAEKFRAERLMAFSLGETRVIVTCNPDVAKEILNSPVFADRPVKESAYSLMFNRAIGFAPYGVYWRTLRKIASNHLFSPKQIKRSETQRSVIANQIVKCLTKQSNTKGLCFARDLIKTASLNNMMCSVFGKEYELEEEHEEVSELRELVEEGYDLLGTLNWTDHLPWLSEFDPQRIRSRCSNLVPKVNRFVNRIISDHREQTRDSPSDFVDVLLSLDGPDKLSDPDIIAVLWEMIFRGTDTVAVLIEWILARMVLHPDIQSTVHNELDQIVGRSRAVEESDVVSLVYLTAVVKEVLRLHPPGPLLSWARLAITDTIIDGRRVPAGTTAMVNMWAIAHDPHVWENPLEFKPERFVAKEGEVEFSVLGSDLRLAPFGSGRRVCPGKNLGLTTVTFWTATLLHEFEWLTPSDEKTVDLSEKLRLSCEMANPLAAKLRPRRSFSV

SEQ ID NO: 21315 - protein, 456 aa, Arabidopsis thaliana
  peptide (1)..(456): Ceres Seq. ID no. 13494034
  misc_feature (1)..(450): Pfam Name: Cytochrome P450 Pfam Description: Cytochrome P450
  misc_feature (1)..(452): Homolog of NCBI NO: 15223341 NR Description: cytochrome P450, putative [Arabidopsis thaliana]
  misc_feature (1)..(452): Homolog of NCBI NO: 6715638 NR Description: T25K16.18 [Arabidopsis thaliana]
  misc_feature (1)..(453): Homolog of NCBI NO: 15226422 NR Description: cytochrome P450, putative [Arabidopsis thaliana]
  misc_feature (1)..(456): Homolog of NCBI NO: 21592543 NR Description: cytochrome p450 (CYP78A9) [Arabidopsis thaliana]
  misc_feature (1)..(456): Homolog of NCBI NO: 15228624 NR Description: cytochrome P450, putative [Arabidopsis thaliana]
MSLMSNTLAHRCIAATAEKFRAERLMAFSLGETRVIVTCNPDVAKEILNSPVFADRPVKESAYSLMFNRAIGFAPYGVYWRTLRKIASNHLFSPKQIKRSETQRSVIANQIVKCLTKQSNTKGLCFARDLIKTASLNNMMCSVFGKEYELEEEHEEVSELRELVEEGYDLLGTLNWTDHLPWLSEFDPQRIRSRCSNLVPKVNRFVNRIISDHREQTRDSPSDFVDVLLSLDGPDKLSDPDIIAVLWEMIFRGTDTVAVLIEWILARMVLHPDIQSTVHNELDQIVGRSRAVEESDVVSLVYLTAVVKEVLRLHPPGPLLSWARLAITDTIIDGRRVPAGTTAMVNMWAIAHDPHVWENPLEFKPERFVAKEGEVEFSVLGSDLRLAPFGSGRRVCPGKNLGLTTVTFWTATLLHEFEWLTPSDEKTVDLSEKLRLSCEMANPLAAKLRPRRSFSV

SEQ ID NO: 21316 - DNA, 1723 bp, Arabidopsis thaliana
  misc_feature (1)..(1723): Ceres Seq. ID no. 13499982
  misc_feature: MA Experiment ID: 108461 Result: Up-regulated in Transcription
  misc_feature: MA Experiment 108461 PARAMETER Experiment Name: At_Germinating_Seeds_cDNA_P Parameter: Age (day) Value: 1 vs. 0
  misc_feature: MA Experiment 108461 PARAMETER Experiment Name: At_Germinating_Seeds_cDNA_P Parameter: Tissue Value: Germinating Seeds
  misc_feature: MA Experiment ID: 108561 Result: Down-regulated in Transcription
  misc_feature: MA Experiment 108561 PARAMETER Experiment Name: At_100uM_ABA_cDNA_P Parameter: Timepoint (hr) Value: 6
  misc_feature: MA Experiment 108561 PARAMETER Experiment Name: At_100uM_ABA_cDNA_P Parameter: Tissue Value: Aerial
  misc_feature: MA Experiment 108561 PARAMETER Experiment Name: At_100uM_ABA_cDNA_P Parameter: Treatment Value: 100uM ABA vs. No Treatment
  misc_feature: MA Experiment ID: 108569 Result: Up-regulated in Transcription
  misc_feature: MA Experiment 108569 PARAMETER Experiment Name: At_0.001%_MeJA__cDNA_P Parameter: Timepoint (hr) Value: 6
  misc_feature: MA Experiment 108569 PARAMETER Experiment Name: At_0.001%_MeJA__cDNA_P Parameter: Tissue Value: Aerial
  misc_feature: MA Experiment 108569 PARAMETER Experiment Name: At_0.001%_MeJA__cDNA_P Parameter: Treatment Value: 0.001% MeJA vs. No Treatment
  misc_feature: MA Experiment ID: 108572 Result: Down-regulated in Transcription
  misc_feature: MA Experiment 108572 PARAMETER Experiment Name: At_Drought_cDNA_P Parameter: Timepoint (hr) Value: 1
  misc_feature: MA Experiment 108572 PARAMETER Experiment Name: At_Drought_cDNA_P Parameter: Tissue Value: Aerial
  misc_feature: MA Experiment 108572 PARAMETER Experiment Name: At_Drought_cDNA_P Parameter: Treatment Value: Drought vs. No Drought
  misc_feature: MA Experiment ID: 108573 Result: Down-regulated in Transcription
  misc_feature: MA Experiment 108573 PARAMETER Experiment Name: At_Drought_cDNA_P Parameter: Timepoint (hr) Value: 6
  misc_feature: MA Experiment 108573 PARAMETER Experiment Name: At_Drought_cDNA_P Parameter: Tissue Value: Aerial
  misc_feature: MA Experiment 108573 PARAMETER Experiment Name: At_Drought_cDNA_P Parameter: Treatment Value: Drought vs. No Drought
  misc_feature: MA Experiment ID: 108576 Result: Down-regulated in Transcription
  misc_feature: MA Experiment 108576 PARAMETER Experiment Name: At_42deg_Heat_cDNA_P Parameter: Temperature (deg C) Value: 42 vs. 22
  misc_feature: MA Experiment 108576 PARAMETER Experiment Name: At_42deg_Heat_cDNA_P Parameter: Timepoint (hr) Value: 1
  misc_feature: MA Experiment 108576 PARAMETER Experiment Name: At_42deg_Heat_cDNA_P Parameter: Tissue Value: Aerial
  misc_feature: MA Experiment ID: 108579 Result: Up-regulated in Transcription
  misc_feature: MA Experiment 108579 PARAMETER Experiment Name: At_4deg_Cold_cDNA_P Parameter: Temperature (deg C) Value: 4 vs. 22
  misc_feature: MA Experiment 108579 PARAMETER Experiment Name: At_4deg_Cold_cDNA_P Parameter: Timepoint (hr) Value: 6
  misc_feature: MA Experiment 108579 PARAMETER Experiment Name: At_4deg_Cold_cDNA_P Parameter: Tissue Value: Aerial
  misc_feature: MA Experiment ID: 108595 Result: Down-regulated in Transcription
  misc_feature: MA Experiment 108595 PARAMETER Experiment Name: At_Ler-pi_Ovule_cDNA_P Parameter: Plant Line Value: null
  misc_feature: MA Experiment ID: 20000069 Result: Down-regulated in Transcription
  misc_feature: MA Experiment 20000069 PARAMETER Experiment Name: At_100uM_ABA_Mutants_cDNA_P Parameter: Plant Line Value: CS23
  misc_feature: MA Experiment 20000069 PARAMETER Experiment Name: At_100uM_ABA_Mutants_cDNA_P Parameter: Timepoint (hr) Value: 6
  misc_feature: MA Experiment 20000069 PARAMETER Experiment Name: At_100uM_ABA_Mutants_cDNA_P Parameter: Tissue Value: Aerial
  misc_feature: MA Experiment 20000069 PARAMETER Experiment Name: At_100uM_ABA_Mutants_cDNA_P Parameter: Treatment Value: 100uM ABA vs. No Treatment
  misc_feature: MA Experiment ID: 20000171 Result: Down-regulated in Transcription
  misc_feature: MA Experiment 20000171 PARAMETER Experiment Name: At_42deg_Heat_P Parameter: Age (day) Value: 14
  misc_feature: MA Experiment 20000171 PARAMETER Experiment Name: At_42deg_Heat_P Parameter: Organism Value: A. thaliana
  misc_feature: MA Experiment 20000171 PARAMETER Experiment Name: At_42deg_Heat_P Parameter: Plant Line Value: WS
  misc_feature: MA Experiment 20000171 PARAMETER Experiment Name: At_42deg_Heat_P Parameter: Temperature (deg C) Value: 42 vs. 22
  misc_feature: MA Experiment 20000171 PARAMETER Experiment Name: At_42deg_Heat_P Parameter: Timepoint (hr) Value: 1
  misc_feature: MA Experiment 20000171 PARAMETER Experiment Name: At_42deg_Heat_P Parameter: Tissue Value: Aerial
  misc_feature: MA Experiment ID: 20000180 Result: Up-regulated in Transcription
  misc_feature: MA Experiment 20000180 PARAMETER Experiment Name: At_Germinating_Seeds_P Parameter: Age (hr) Value: 24 vs. 0
  misc_feature: MA Experiment 20000180 PARAMETER Experiment Name: At_Germinating_Seeds_P Parameter: Tissue Value: Germinating Seeds
  misc_feature: MA Experiment ID: 20000184 Result: Up-regulated in Transcription
  misc_feature: MA Experiment 20000184 PARAMETER Experiment Name: At_Shoots__P Parameter: Age (day) Value: 7
  misc_feature: MA Experiment 20000184 PARAMETER Experiment Name: At_Shoots__P Parameter: Tissue Value: Shoots vs. Whole Plant
  misc_feature: MA Experiment ID: 20000185 Result: Up-regulated in Transcription
  misc_feature: MA Experiment 20000185 PARAMETER Experiment Name: At_Roots__P Parameter: Age (day) Value: 7 vs. 21
  misc_feature: MA Experiment 20000185 PARAMETER Experiment Name: At_Roots__P Parameter: Organism Value: A. thaliana
  misc_feature: MA Experiment 20000185 PARAMETER Experiment Name: At_Roots__P Parameter: Tissue Value: Roots vs. Whole Plant
  misc_feature: MA Experiment ID: 20000213 Result: Up-regulated in Transcription
  misc_feature: MA Experiment 20000213 PARAMETER Experiment Name: At_4deg_Cold_P Parameter: Timepoint (hr) Value: 2
  misc_feature: MA Experiment ID: 20000234 Result: Up-regulated in Transcription
  misc_feature: MA Experiment 20000234 PARAMETER Experiment Name: At_Siliques_P Parameter: Age (day) Value: 21
  misc_feature: MA Experiment 20000234 PARAMETER Experiment Name: At_Siliques_P Parameter: Organism Value: A. thaliana
  misc_feature: MA Experiment 20000234 PARAMETER Experiment Name: At_Siliques_P Parameter: Plant Line Value: WS
  misc_feature: MA Experiment 20000234 PARAMETER Experiment Name: At_Siliques_P Parameter: Tissue Value: Less Than 5mm Siliques vs. Whole Plant
  misc_feature: MA Experiment ID: 20000265 Result: Up-regulated in Transcription
  misc_feature: MA Experiment 20000265 PARAMETER Experiment Name: At_Open_Flower_P Parameter: Age (day) Value: 21
  misc_feature: MA Experiment 20000265 PARAMETER Experiment Name: At_Open_Flower_P Parameter: Plant Line Value: WS
  misc_feature: MA Experiment 20000265 PARAMETER Experiment Name: At_Open_Flower_P Parameter: Tissue Value: Closed Flower vs. Whole Plant
  misc_feature: MA Experiment ID: 20000437 Result: Down-regulated in Transcription
  misc_feature: MA Experiment 20000437 PARAMETER Experiment Name: At_Drought_P Parameter: Age (day) Value: 8
  misc_feature: MA Experiment 20000437 PARAMETER Experiment Name: At_Drought_P Parameter: Organism Value: A. thaliana
  misc_feature: MA Experiment 20000437 PARAMETER Experiment Name: At_Drought_P Parameter: Plant Line Value: WS
  misc_feature: MA Experiment 20000437 PARAMETER Experiment Name: At_Drought_P Parameter: Timepoint (hr) Value: 24
  misc_feature: MA Experiment 20000437 PARAMETER Experiment Name: At_Drought_P Parameter: Tissue Value: Whole Plant
  misc_feature: MA Experiment 20000437 PARAMETER Experiment Name: At_Drought_P Parameter: Treatment Value: Drought vs. No Drought
  misc_feature: MA Experiment ID: 20000495 Result: Down-regulated in Transcription
  misc_feature: MA Experiment 20000495 PARAMETER Experiment Name: At_Guard_Cells_P Parameter: Harvest Date Value: 8/2/2002
  misc_feature: MA Experiment 20000495 PARAMETER Experiment Name: At_Guard_Cells_P Parameter: Organism Value: A. thaliana
  misc_feature: MA Experiment 20000495 PARAMETER Experiment Name: At_Guard_Cells_P Parameter: Tissue Value: Guard Cells vs. Leaves
  misc_feature: MA Experiment ID: 20000573 Result: Down-regulated in Transcription
  misc_feature: MA Experiment 20000573 PARAMETER Experiment Name: At_100uM_ABA_Mutants__P Parameter: Organism Value: A. thaliana
  misc_feature: MA Experiment 20000573 PARAMETER Experiment Name: At_100uM_ABA_Mutants__P Parameter: Plant Line Value: CS22 vs. Ler wt
  misc_feature: MA Experiment 20000573 PARAMETER Experiment Name: At_100uM_ABA_Mutants__P Parameter: Timepoint (hr) Value: N/A
  misc_feature: MA Experiment 20000573 PARAMETER Experiment Name: At_100uM_ABA_Mutants__P Parameter: Tissue Value: Whole Plant
  misc_feature: MA Experiment 20000573 PARAMETER Experiment Name: At_100uM_ABA_Mutants__P Parameter: Treatment Value: None
  misc_feature: MA Experiment ID: 20000794 Result: Down-regulated in Transcription
  misc_feature: MA Experiment 20000794 PARAMETER Experiment Name: At_Petals_P Parameter: Age (day) Value: 23-25 days
  misc_feature: MA Experiment 20000794 PARAMETER Experiment Name: At_Petals_P Parameter: Plant Line Value: WS
  misc_feature: MA Experiment 20000794 PARAMETER Experiment Name: At_Petals_P Parameter: Tissue Value: Petals vs. Whole plant
  misc_feature: MA Experiment ID: 20001248 Result: Down-regulated in Transcription
  misc_feature: MA Experiment 20001248 PARAMETER Experiment Name: At_Far-red-induction_P Parameter: Age (day) Value: 7
  misc_feature: MA Experiment 20001248 PARAMETER Experiment Name: At_Far-red-induction_P Parameter: Light Value: Far-red vs. White
  misc_feature: MA Experiment 20001248 PARAMETER Experiment Name: At_Far-red-induction_P Parameter: Organism Value: A. thaliana
  misc_feature: MA Experiment 20001248 PARAMETER Experiment Name: At_Far-red-induction_P Parameter: Plant Line Value: Columbia
  misc_feature: MA Experiment 20001248 PARAMETER Experiment Name: At_Far-red-induction_P Parameter: Timepoint (hr) Value: 4
  misc_feature: MA Experiment 20001248 PARAMETER Experiment Name: At_Far-red-induction_P Parameter: Tissue Value: Whole Plant
  misc_feature: MA Experiment ID: 20001450 Result: Down-regulated in Transcription
  misc_feature: MA Experiment 20001450 PARAMETER Experiment Name: At_Far-red-induction_P Parameter: Age (day) Value: 7
  misc_feature: MA Experiment 20001450 PARAMETER Experiment Name: At_Far-red-induction_P Parameter: Light Value: Far-red vs. White
  misc_feature: MA Experiment 20001450 PARAMETER Experiment Name: At_Far-red-induction_P Parameter: Organism Value: A. thaliana
  misc_feature: MA Experiment 20001450 PARAMETER Experiment Name: At_Far-red-induction_P Parameter: Plant Line Value: Columbia
  misc_feature: MA Experiment 20001450 PARAMETER Experiment Name: At_Far-red-induction_P Parameter: Timepoint (hr) Value: 8
  misc_feature: MA Experiment 20001450 PARAMETER Experiment Name: At_Far-red-induction_P Parameter: Tissue Value: Whole Plant
  misc_feature: MA Experiment ID: 20001451 Result: Down-regulated in Transcription
  misc_feature: MA Experiment 20001451 PARAMETER Experiment Name: At_Far-red-induction_P Parameter: Age (day) Value: 7
  misc_feature: MA Experiment 20001451 PARAMETER Experiment Name: At_Far-red-induction_P Parameter: Light Value: Far-red vs. White
  misc_feature: MA Experiment 20001451 PARAMETER Experiment Name: At_Far-red-induction_P Parameter: Organism Value: A. thaliana
  misc_feature: MA Experiment 20001451 PARAMETER Experiment Name: At_Far-red-induction_P Parameter: Plant Line Value: Columbia
  misc_feature: MA Experiment 20001451 PARAMETER Experiment Name: At_Far-red-induction_P Parameter: Timepoint (hr) Value: 24
  misc_feature: MA Experiment 20001451 PARAMETER Experiment Name: At_Far-red-induction_P Parameter: Tissue Value: Whole Plant
  misc_feature: MA Experiment ID: 20001557 Result: Up-regulated in Transcription
  misc_feature: MA Experiment 20001557 PARAMETER Experiment Name: At_Drought_Soil_Dry_P Parameter: Age (day) Value: 27
  misc_feature: MA Experiment 20001557 PARAMETER Experiment Name: At_Drought_Soil_Dry_P Parameter: Organism Value: A. thaliana
  misc_feature: MA Experiment 20001557 PARAMETER Experiment Name: At_Drought_Soil_Dry_P Parameter: Plant Line Value: WS
  misc_feature: MA Experiment 20001557 PARAMETER Experiment Name: At_Drought_Soil_Dry_P Parameter: Post Timepoint (hr) Value: 3
  misc_feature: MA Experiment 20001557 PARAMETER Experiment Name: At_Drought_Soil_Dry_P Parameter: Post-Treatment Value: Re-Water vs. No Drought
  misc_feature: MA Experiment 20001557 PARAMETER Experiment Name: At_Drought_Soil_Dry_P Parameter: Timepoint (day) Value: 13
  misc_feature: MA Experiment 20001557 PARAMETER Experiment Name: At_Drought_Soil_Dry_P Parameter: Treatment Value: Drought vs. No Drought
  misc_feature: MA Experiment ID: 20001558 Result: Up-regulated in Transcription
  misc_feature: MA Experiment 20001558 PARAMETER Experiment Name: At_Drought_Soil_Dry_P Parameter: Age (day) Value: 27
  misc_feature: MA Experiment 20001558 PARAMETER Experiment Name: At_Drought_Soil_Dry_P Parameter: Organism Value: A. thaliana
  misc_feature: MA Experiment 20001558 PARAMETER Experiment Name: At_Drought_Soil_Dry_P Parameter: Plant Line Value: WS
  misc_feature: MA Experiment 20001558 PARAMETER Experiment Name: At_Drought_Soil_Dry_P Parameter: Post Timepoint (hr) Value: 6
  misc_feature: MA Experiment 20001558 PARAMETER Experiment Name: At_Drought_Soil_Dry_P Parameter: Post-Treatment Value: Re-Water vs. No Drought
  misc_feature: MA Experiment 20001558 PARAMETER Experiment Name: At_Drought_Soil_Dry_P Parameter: Timepoint (day) Value: 13
  misc_feature: MA Experiment 20001558 PARAMETER Experiment Name: At_Drought_Soil_Dry_P Parameter: Treatment Value: Drought vs. No Drought
  misc_feature: MA Experiment ID: 20001906 Result: Down-regulated in Transcription
  misc_feature: MA Experiment 20001906 PARAMETER Experiment Name: At_Drought_Reproduction_P Parameter: Age (day) Value: 35
  misc_feature: MA Experiment 20001906 PARAMETER Experiment Name: At_Drought_Reproduction_P Parameter: Organism Value: A. thaliana
  misc_feature: MA Experiment 20001906 PARAMETER Experiment Name: At_Drought_Reproduction_P Parameter: Plant Line Value: WS
  misc_feature: MA Experiment 20001906 PARAMETER Experiment Name: At_Drought_Reproduction_P Parameter: Timepoint (day) Value: 5
  misc_feature: MA Experiment 20001906 PARAMETER Experiment Name: At_Drought_Reproduction_P Parameter: Tissue Value: Siliques
  misc_feature: MA Experiment 20001906 PARAMETER Experiment Name: At_Drought_Reproduction_P Parameter: Treatment Value: Drought vs. No Drought
ctcttcccacttctcactctctgatctcagatctctccctccctcttttcacagatccattcaacaatctccaaagaagatggaaccagtctcttcatggggtaacacctctctcgtctccgtagatccagagatccacgacctaatcgagaaggagaaacgtcggcaatgtcgaggaatcgaacttatcgcttccgagaatttcacttccttcgccgtcatcgaagctctcggaagtgccttaaccaacaaatactccgaaggtattcctggtaatcgttattacggaggtaacgaattcatcgatgagatcgagaatctttgccgttcacgtgctctcgaagctttccattgtgatccagcagcgtggggcgttaatgttcagccgtattctggatctccggcgaatttcgctgcttacacggctttgcttcagcctcacgatcgtatcatggggcttgatttgccttcaggtggtcatttgactcatggttactatacatctggtggtaagaagacctctgcgacttcgatctactttgagagtcttccgtataaggtgaatttcaccactggttacattgattacgataagcttgaagagaaggcgttggatttcaggcctaagttgcttatctgtggtggtagtgcgtatcctagggattgggattacgctagatttagagctattgctgataaggttggagctcttttgctttgtgacatggctcacatcagtggtctcgttgctgctcaggaagctgcaaacccatttgagtactgtgacgttgtgacaaccacaacccacaagagtttgaggggtccaagggctggtatgattttctacaggaagggtccaaaaccaccaaagaagggtcaacccgagggtgcagtctatgattttgaggacaaaatcaactttgctgtattccctgcgcttcaaggtggtcctcacaatcaccagattggtgctttagctgttgcgttgaagcaggctaatactcctgggttcaaggtctacgcaaaacaagtgaaagccaatgctgttgcccttggaaactacctaatgagcaagggttaccagattgtgaccaatggaactgagaaccaccttgttctctgggatcttcgccctcttggattgaccggaaacaaggttgagaagctctgcgatctgtgcagcattacattgaacaagaacgcagtatttggagacagtagtgctcttgctcctggaggtgtaagaatcggtgcacccgcgatgacatcgagaggattggtggagaaggactttgagcagataggagaattcctgagccgtgcagtgacactgacgttggacatccaaaagacatacggtaagttgttgaaggacttcaacaagggtttggtgaacaacaaagatctcgaccagctcaaggctgacgtcgagaagttctctgcgtcttatgaaatgcctggattcctcatgtctgagatgaagtaccaggattagagatctttctctatatgcaagagtaatcttctattatctaccatatatataaaatatgcttttgtaggatcgccttaaaggcgaagagatgaagatgcaaacagtaaaaaagggttttcttttcagctatttcttcttgaatgtttttttttctttttattttggtttcttattgaaattgttgtatttttgttggctttttttctaataatatcagcgagttttttc

SEQ ID NO: 21317 - protein, 497 aa, Arabidopsis thaliana
  peptide (1)..(497): Ceres Seq. ID no. 13499983
  misc_feature (38)..(438): Pfam Name: Serine hydroxymethyltransferase Pfam Description: Serine hydroxymethyltransferase
  misc_feature (6)..(487): Homolog of NCBI NO: 18418028 NR Description: glycine hydroxymethyltransferase (EC 2.1.2.1) -
  misc_feature (35)..(497): Homolog of NCBI NO: 17066746 NR Description: serine hydroxymethyltransferase [Chlamydomonas
  misc_feature (30)..(490): Homolog of NCBI NO: 15219182 NR Description: glycine hydroxymethyltransferase -related
  misc_feature (30)..(490): Homolog of NCBI NO: 21537165 NR Description: putative hydroxymethyltransferase [Arabidopsis
  misc_feature (30)..(490): Homolog of NCBI NO: 25286207 NR Description: probable hydroxymethyltransferase, 49598-47322
  misc_feature (30)..(490): Homolog of NCBI NO: 18400090 NR Description: hydroxymethyltransferase -related [Arabidopsis
  misc_feature (27)..(494): Homolog of NCBI NO: 15236371 NR Description: glycine hydroxymethyltransferase - like protein
  misc_feature (27)..(497): Homolog of NCBI NO: 11762130 NR Description: AT4g13930 [Arabidopsis thaliana]
  misc_feature (27)..(497): Homolog of NCBI NO: 15236375 NR Description: hydroxymethyltransferase [Arabidopsis thaliana]
  misc_feature (27)..(497): Homolog of NCBI NO: 21592544 NR Description: hydroxymethyltransferase [Arabidopsis thaliana]
SSHFSLSDLRSLPPSFHRSIQQSPKKMEPVSSWGNTSLVSVDPEIHDLIEKEKRRQCRGIELIASENFTSFAVIEALGSALTNKYSEGIPGNRYYGGNEFIDEIENLCRSRALEAFHCDPAAWGVNVQPYSGSPANFAAYTALLQPHDRIMGLDLPSGGHLTHGYYTSGGKKTSATSIYFESLPYKVNFTTGYIDYDKLEEKALDFRPKLLICGGSAYPRDWDYARFRAIADKVGALLLCDMAHISGLVAAQEAANPFEYCDVVTTTTHKSLRGPRAGMIFYRKGPKPPKKGQPEGAVYDFEDKINFAVFPALQGGPHNHQIGALAVALKQANTPGFKVYAKQVKANAVALGNYLMSKGYQIVTNGTENHLVLWDLRPLGLTGNKVEKLCDLCSITLNKNAVFGDSSALAPGGVRIGAPAMTSRGLVEKDFEQIGEFLSRAVTLTLDIQKTYGKLLKDFNKGLVNNKDLDQLKADVEKFSASYEMPGFLMSEMKYQD

SEQ ID NO: 21318 - protein, 471 aa, Arabidopsis thaliana
  peptide (1)..(471): Ceres Seq. ID no. 13499984
  misc_feature (12)..(412): Pfam Name: Serine hydroxymethyltransferase Pfam Description: Serine hydroxymethyltransferase
  misc_feature (1)..(461): Homolog of NCBI NO: 18418028 NR Description: glycine hydroxymethyltransferase (EC 2.1.2.1) -
  misc_feature (9)..(471): Homolog of NCBI NO: 17066746 NR Description: serine hydroxymethyltransferase [Chlamydomonas
  misc_feature (4)..(464): Homolog of NCBI NO: 15219182 NR Description: glycine hydroxymethyltransferase -related
  misc_feature (4)..(464): Homolog of NCBI NO: 21537165 NR Description: putative hydroxymethyltransferase [Arabidopsis
  misc_feature (4)..(464): Homolog of NCBI NO: 25286207 NR Description: probable hydroxymethyltransferase, 49598-47322
  misc_feature (4)..(464): Homolog of NCBI NO: 18400090 NR Description: hydroxymethyltransferase -related [Arabidopsis
  misc_feature (1)..(468): Homolog of NCBI NO: 15236371 NR Description: glycine hydroxymethyltransferase - like protein
  misc_feature (1)..(471): Homolog of NCBI NO: 11762130 NR Description: AT4g13930 [Arabidopsis thaliana]
  misc_feature (1)..(471): Homolog of NCBI NO: 15236375 NR Description: hydroxymethyltransferase [Arabidopsis thaliana]
  misc_feature (1)..(471): Homolog of NCBI NO: 21592544 NR Description: hydroxymethyltransferase [Arabidopsis thaliana]
MEPVSSWGNTSLVSVDPEIHDLIEKEKRRQCRGIELIASENFTSFAVIEALGSALTNKYSEGIPGNRYYGGNEFIDEIENLCRSRALEAFHCDPAAWGVNVQPYSGSPANFAAYTALLQPHDRIMGLDLPSGGHLTHGYYTSGGKKTSATSIYFESLPYKVNFTTGYIDYDKLEEKALDFRPKLLICGGSAYPRDWDYARFRAIADKVGALLLCDMAHISGLVAAQEAANPFEYCDVVTTTTHKSLRGPRAGMIFYRKGPKPPKKGQPEGAVYDFEDKINFAVFPALQGGPHNHQIGALAVALKQANTPGFKVYAKQVKANAVALGNYLMSKGYQIVTNGTENHLVLWDLRPLGLTGNKVEKLCDLCSITLNKNAVFGDSSALAPGGVRIGAPAMTSRGLVEKDFEQIGEFLSRAVTLTLDIQKTYGKLLKDFNKGLVNNKDLDQLKADVEKFSASYEMPGFLMSEMKYQD

SEQ ID NO: 21319 - protein, 347 aa, Arabidopsis thaliana
  peptide (1)..(347): Ceres Seq. ID no. 13499985
  misc_feature (1)..(288): Pfam Name: Serine hydroxymethyltransferase Pfam Description: Serine hydroxymethyltransferase
  misc_feature (1)..(337): Homolog of NCBI NO: 18418028 NR Description: glycine hydroxymethyltransferase (EC 2.1.2.1) -
  misc_feature (1)..(347): Homolog of NCBI NO: 17066746 NR Description: serine hydroxymethyltransferase [Chlamydomonas
  misc_feature (1)..(340): Homolog of NCBI NO: 15219182 NR Description: glycine hydroxymethyltransferase -related
  misc_feature (1)..(340): Homolog of NCBI NO: 21537165 NR Description: putative hydroxymethyltransferase [Arabidopsis
  misc_feature (1)..(340): Homolog of NCBI NO: 25286207 NR Description: probable hydroxymethyltransferase, 49598-47322
  misc_feature (1)..(340): Homolog of NCBI NO: 18400090 NR Description: hydroxymethyltransferase -related [Arabidopsis
  misc_feature (1)..(344): Homolog of NCBI NO: 15236371 NR Description: glycine hydroxymethyltransferase - like protein
  misc_feature (1)..(347): Homolog of NCBI NO: 11762130 NR Description: AT4g13930 [Arabidopsis thaliana]
  misc_feature (1)..(347): Homolog of NCBI NO: 15236375 NR Description: hydroxymethyltransferase [Arabidopsis thaliana]
  misc_feature (1)..(347): Homolog of NCBI NO: 21592544 NR Description: hydroxymethyltransferase [Arabidopsis thaliana]
MGLDLPSGGHLTHGYYTSGGKKTSATSIYFESLPYKVNFTTGYIDYDKLEEKALDFRPKLLICGGSAYPRDWDYARFRAIADKVGALLLCDMAHISGLVAAQEAANPFEYCDVVTTTTHKSLRGPRAGMIFYRKGPKPPKKGQPEGAVYDFEDKINFAVFPALQGGPHNHQIGALAVALKQANTPGFKVYAKQVKANAVALGNYLMSKGYQIVTNGTENHLVLWDLRPLGLTGNKVEKLCDLCSITLNKNAVFGDSSALAPGGVRIGAPAMTSRGLVEKDFEQIGEFLSRAVTLTLDIQKTYGKLLKDFNKGLVNNKDLDQLKADVEKFSASYEMPGFLMSEMKYQD

SEQ ID NO: 21320 - DNA, 1118 bp, Arabidopsis thaliana
  misc_feature (1)..(1118): Ceres Seq. ID no. 12334090
  misc_feature: MA Experiment ID: 108561 Result: Up-regulated in Transcription
  misc_feature: MA Experiment 108561 PARAMETER Experiment Name: At_100uM_ABA_cDNA_P Parameter: Timepoint (hr) Value: 6
  misc_feature: MA Experiment 108561 PARAMETER Experiment Name: At_100uM_ABA_cDNA_P Parameter: Tissue Value: Aerial
  misc_feature: MA Experiment 108561 PARAMETER Experiment Name: At_100uM_ABA_cDNA_P Parameter: Treatment Value: 100uM ABA vs. No Treatment
  misc_feature: MA Experiment ID: 108573 Result: Up-regulated in Transcription
  misc_feature: MA Experiment 108573 PARAMETER Experiment Name: At_Drought_cDNA_P Parameter: Timepoint (hr) Value: 6
  misc_feature: MA Experiment 108573 PARAMETER Experiment Name: At_Drought_cDNA_P Parameter: Tissue Value: Aerial
  misc_feature: MA Experiment 108573 PARAMETER Experiment Name: At_Drought_cDNA_P Parameter: Treatment Value: Drought vs. No Drought
  misc_feature: MA Experiment ID: 108574 Result: Up-regulated in Transcription
  misc_feature: MA Experiment 108574 PARAMETER Experiment Name: At_Wounding__cDNA_P Parameter: Timepoint (hr) Value: 1
  misc_feature: MA Experiment 108574 PARAMETER Experiment Name: At_Wounding__cDNA_P Parameter: Tissue Value: Aerial
  misc_feature: MA Experiment 108574 PARAMETER Experiment Name: At_Wounding__cDNA_P Parameter: Treatment Value: Wounding vs. No Wounding
  misc_feature: MA Experiment ID: 108579 Result: Up-regulated in Transcription
  misc_feature: MA Experiment 108579 PARAMETER Experiment Name: At_4deg_Cold_cDNA_P Parameter: Temperature (deg C) Value: 4 vs. 22
  misc_feature: MA Experiment 108579 PARAMETER Experiment Name: At_4deg_Cold_cDNA_P Parameter: Timepoint (hr) Value: 6
  misc_feature: MA Experiment 108579 PARAMETER Experiment Name: At_4deg_Cold_cDNA_P Parameter: Tissue Value: Aerial
  misc_feature: MA Experiment ID: 108585 Result: Up-regulated in Transcription
  misc_feature: MA Experiment 108585 PARAMETER Experiment Name: At_5mM_NaNP_cDNA_P Parameter: Timepoint (hr) Value: 6
  misc_feature: MA Experiment 108585 PARAMETER Experiment Name: At_5mM_NaNP_cDNA_P Parameter: Tissue Value: Aerial
  misc_feature: MA Experiment 108585 PARAMETER Experiment Name: At_5mM_NaNP_cDNA_P Parameter: Treatment Value: null
  misc_feature: MA Experiment ID: 20000171 Result: Up-regulated in Transcription
  misc_feature: MA Experiment 20000171 PARAMETER Experiment Name: At_42deg_Heat_P Parameter: Age (day) Value: 14
  misc_feature: MA Experiment 20000171 PARAMETER Experiment Name: At_42deg_Heat_P Parameter: Organism Value: A. thaliana
  misc_feature: MA Experiment 20000171 PARAMETER Experiment Name: At_42deg_Heat_P Parameter: Plant Line Value: WS
  misc_feature: MA Experiment 20000171 PARAMETER Experiment Name: At_42deg_Heat_P Parameter: Temperature (deg C) Value: 42 vs. 22
  misc_feature: MA Experiment 20000171 PARAMETER Experiment Name: At_42deg_Heat_P Parameter: Timepoint (hr) Value: 1
  misc_feature: MA Experiment 20000171 PARAMETER Experiment Name: At_42deg_Heat_P Parameter: Tissue Value: Aerial
  misc_feature: MA Experiment ID: 20000173 Result: Up-regulated in Transcription
  misc_feature: MA Experiment 20000173 PARAMETER Experiment Name: At_42deg_Heat_P Parameter: Age (day) Value: 14
  misc_feature: MA Experiment 20000173 PARAMETER Experiment Name: At_42deg_Heat_P Parameter: Organism Value: A. thaliana
  misc_feature: MA Experiment 20000173 PARAMETER Experiment Name: At_42deg_Heat_P Parameter: Plant Line Value: WS
  misc_feature: MA Experiment 20000173 PARAMETER Experiment Name: At_42deg_Heat_P Parameter: Temperature (deg C) Value: 42 vs. 22
  misc_feature: MA Experiment 20000173 PARAMETER Experiment Name: At_42deg_Heat_P Parameter: Timepoint (hr) Value: 6
  misc_feature: MA Experiment 20000173 PARAMETER Experiment Name: At_42deg_Heat_P Parameter: Tissue Value: Aerial
  misc_feature: MA Experiment ID: 20000179 Result: Down-regulated in Transcription
  misc_feature: MA Experiment 20000179 PARAMETER Experiment Name: At_Germinating_Seeds_P Parameter: Age (hr) Value: 6 vs. 0
  misc_feature: MA Experiment 20000179 PARAMETER Experiment Name: At_Germinating_Seeds_P Parameter: Tissue Value: Germinating Seeds
  misc_feature: MA Experiment ID: 20000436 Result: Up-regulated in Transcription
  misc_feature: MA Experiment 20000436 PARAMETER Experiment Name: At_Drought_P Parameter: Age (day) Value: 7
  misc_feature: MA Experiment 20000436 PARAMETER Experiment Name: At_Drought_P Parameter: Organism Value: A. thaliana
  misc_feature: MA Experiment 20000436 PARAMETER Experiment Name: At_Drought_P Parameter: Plant Line Value: WS
  misc_feature: MA Experiment 20000436 PARAMETER Experiment Name: At_Drought_P Parameter: Timepoint (hr) Value: 12
  misc_feature: MA Experiment 20000436 PARAMETER Experiment Name: At_Drought_P Parameter: Tissue Value: Whole Plant
  misc_feature: MA Experiment 20000436 PARAMETER Experiment Name: At_Drought_P Parameter: Treatment Value: Drought vs. No Drought
  misc_feature: MA Experiment ID: 20000437 Result: Up-regulated in Transcription
  misc_feature: MA Experiment 20000437 PARAMETER Experiment Name: At_Drought_P Parameter: Age (day) Value: 8
  misc_feature: MA Experiment 20000437 PARAMETER Experiment Name: At_Drought_P Parameter: Organism Value: A. thaliana
  misc_feature: MA Experiment 20000437 PARAMETER Experiment Name: At_Drought_P Parameter: Plant Line Value: WS
  misc_feature: MA Experiment 20000437 PARAMETER Experiment Name: At_Drought_P Parameter: Timepoint (hr) Value: 24
  misc_feature: MA Experiment 20000437 PARAMETER Experiment Name: At_Drought_P Parameter: Tissue Value: Whole Plant
  misc_feature: MA Experiment 20000437 PARAMETER Experiment Name: At_Drought_P Parameter: Treatment Value: Drought vs. No Drought
  misc_feature: MA Experiment ID: 20000451 Result: Up-regulated in Transcription
  misc_feature: MA Experiment 20000451 PARAMETER Experiment Name: At_CS6879_Shoots-Roots_P Parameter: Age (day) Value: 14
  misc_feature: MA Experiment 20000451 PARAMETER Experiment Name: At_CS6879_Shoots-Roots_P Parameter: Organism Value: A. thaliana
  misc_feature: MA Experiment 20000451 PARAMETER Experiment Name: At_CS6879_Shoots-Roots_P Parameter: Plant Line Value: CS6879 vs. WS
  misc_feature: MA Experiment 20000451 PARAMETER Experiment Name: At_CS6879_Shoots-Roots_P Parameter: Tissue Value: Roots
  misc_feature: MA Experiment ID: 20000456 Result: Up-regulated in Transcription
  misc_feature: MA Experiment 20000456 PARAMETER Experiment Name: At_100uM_BA_P Parameter: Age (day) Value: 14
  misc_feature: MA Experiment 20000456 PARAMETER Experiment Name: At_100uM_BA_P Parameter: Organism Value: A. thaliana
  misc_feature: MA Experiment 20000456 PARAMETER Experiment Name: At_100uM_BA_P Parameter: Plant Line Value: WS
  misc_feature: MA Experiment 20000456 PARAMETER Experiment Name: At_100uM_BA_P Parameter: Timepoint (hr) Value: 6
  misc_feature: MA Experiment 20000456 PARAMETER Experiment Name: At_100uM_BA_P Parameter: Tissue Value: Aerial
  misc_feature: MA Experiment 20000456 PARAMETER Experiment Name: At_100uM_BA_P Parameter: Treatment Value: 100uM BA vs. No Treatment
aaaactatctcgtctcttcgaacacttcaaaaaacatagcaacttcacttcttcctcctccttcctagtttctcgtttggtctcattctaattacctcctcctctgttctgctcatcccctgtttttatagttttatataaaatggtgagccaaaacgtcgtcgtatcagacgccaagaccgggatcataacggtctctacagtctctaactcctctgtctttactcctaccgctcaaaaaccaccgactgctcctggttacatctcagtttccaagaaaaaactcctcaaaaaccttgaaatcaatggagctgatcaaagtcaaagacttaactcttgggttgactccatgagagcttcttctcctacccatctcaaatcactttcctctttctcttccgaagaagaacacaattcttggatcaaacgacatccatcagcacttaacatgttcgaacgaatcatcgaagaagcaagaggaaaacaaatcgtcatgtttcttgattatgacggtactctttctccgatcgtggatgatccagacagagctttcatgactagcaagatgagaagaacagtgaaaaaaatggccaagtgttttccaacttctatagttactggtagatgcatagacaaggtttatagctttgtgaagctagcagaactgtattatgctggaagccatgggatggatattaaaggcccaactaaaggtttctcaagatacaataaggataaaccatccgttctttaccaaccagccggcgactttcttcccatgatcgatgaggtttataaacaattagtggagaaaaccaaatctacaccaggagccaaagtggagaacaacaagttctgtctttctgtgcacttccgttgtgttgacgagaagaaatggagcgagctggcttcaaaagttcggtcggtggtaaagaactatccgacgttgaaactgtctcaaggtcgaaaggtttttgaaatccgacctataattaaatggaacaaaggcaaggctcttgagtttttgttagagtcactcggtgagactctctttggtcgtttgttgaattttatttttgcttatttaaactctttcatcaacaataatattagctcgg

SEQ ID NO: 21321 - protein, 325 aa, Arabidopsis thaliana
  peptide (1)..(325): Ceres Seq. ID no. 12334091
  misc_feature (119)..(300): Pfam Name: Trehalose-phosphatase Pfam Description: Trehalose-phosphatase
  misc_feature (103)..(300): Homolog of NCBI NO: 15227161 NR Description: putative trehalose-6-phosphate phosphatase
  misc_feature (1)..(300): Homolog of NCBI NO: 25354595 NR Description: trehalose-phosphatase (EC 3.1.3.12) B
  misc_feature (1)..(300): Homolog of NCBI NO: 15218205 NR Description: trehalose-6-phosphate phosphatase (AtTPPB)
  misc_feature (1)..(300): Homolog of NCBI NO: 25354597 NR Description: probable trehalose-phosphatase [imported] -
  misc_feature (1)..(300): Homolog of NCBI NO: 21554408 NR Description: trehalose-phosphatase, putative [Arabidopsis
  misc_feature (1)..(300): Homolog of NCBI NO: 18399940 NR Description: trehalose-phosphatase, putative
  misc_feature (41)..(300): Homolog of NCBI NO: 30692524 NR Description: trehalose-6-phosphate phosphatase, putative
  misc_feature (3)..(315): Homolog of NCBI NO: 30683008 NR Description: trehalose-6-phosphate phosphatase, putative
  misc_feature (3)..(315): Homolog of NCBI NO: 11282598 NR Description: trehalose-6-phosphate phosphatase-like protein -
  misc_feature (1)..(300): Homolog of NCBI NO: 15238360 NR Description: trehalose-6-phosphate phosphatase; protein id:
MVSQNVVVSDAKTGIITVSTVSNSSVFTPTAQKPPTAPGYISVSKKKLLKNLEINGADQSQRLNSWVDSMRASSPTHLKSLSSFSSEEEHNSWIKRHPSALNMFERIIEEARGKQIVMFLDYDGTLSPIVDDPDRAFMTSKMRRTVKKMAKCFPTSIVTGRCIDKVYSFVKLAELYYAGSHGMDIKGPTKGFSRYNKDKPSVLYQPAGDFLPMIDEVYKQLVEKTKSTPGAKVENNKFCLSVHFRCVDEKKWSELASKVRSVVKNYPTLKLSQGRKVFEIRPIIKWNKGKALEFLLESLGETLFGRLLNFIFAYLNSFINNNISS

SEQ ID NO: 21322 - protein, 256 aa, Arabidopsis thaliana
  peptide (1)..(256): Ceres Seq. ID no. 12334092
  misc_feature (50)..(231): Pfam Name: Trehalose-phosphatase Pfam Description: Trehalose-phosphatase
  misc_feature (34)..(231): Homolog of NCBI NO: 15227161 NR Description: putative trehalose-6-phosphate phosphatase
  misc_feature (1)..(231): Homolog of NCBI NO: 25354595 NR Description: trehalose-phosphatase (EC 3.1.3.12) B
  misc_feature (1)..(231): Homolog of NCBI NO: 15218205 NR Description: trehalose-6-phosphate phosphatase (AtTPPB)
  misc_feature (1)..(231): Homolog of NCBI NO: 25354597 NR Description: probable trehalose-phosphatase [imported] -
  misc_feature (1)..(231): Homolog of NCBI NO: 21554408 NR Description: trehalose-phosphatase, putative [Arabidopsis
  misc_feature (1)..(231): Homolog of NCBI NO: 18399940 NR Description: trehalose-phosphatase, putative
  misc_feature (1)..(231): Homolog of NCBI NO: 30692524 NR Description: trehalose-6-phosphate phosphatase, putative
  misc_feature (1)..(246): Homolog of NCBI NO: 30683008 NR Description: trehalose-6-phosphate phosphatase, putative
  misc_feature (1)..(246): Homolog of NCBI NO: 11282598 NR Description: trehalose-6-phosphate phosphatase-like protein -
  misc_feature (1)..(231): Homolog of NCBI NO: 15238360 NR Description: trehalose-6-phosphate phosphatase; protein id:
MRASSPTHLKSLSSFSSEEEHNSWIKRHPSALNMFERIIEEARGKQIVMFLDYDGTLSPIVDDPDRAFMTSKMRRTVKKMAKCFPTSIVTGRCIDKVYSFVKLAELYYAGSHGMDIKGPTKGFSRYNKDKPSVLYQPAGDFLPMIDEVYKQLVEKTKSTPGAKVENNKFCLSVHFRCVDEKKWSELASKVRSVVKNYPTLKLSQGRKVFEIRPIIKWNKGKALEFLLESLGETLFGRLLNFIFAYLNSFINNNISS

SEQ ID NO: 21323 - protein, 223 aa, Arabidopsis thaliana
  peptide (1)..(223): Ceres Seq. ID no. 12334093
  misc_feature (17)..(198): Pfam Name: Trehalose-phosphatase Pfam Description: Trehalose-phosphatase
  misc_feature (1)..(198): Homolog of NCBI NO: 15227161 NR Description: putative trehalose-6-phosphate phosphatase
  misc_feature (1)..(198): Homolog of NCBI NO: 25354595 NR Description: trehalose-phosphatase (EC 3.1.3.12) B
  misc_feature (1)..(198): Homolog of NCBI NO: 15218205 NR Description: trehalose-6-phosphate phosphatase (AtTPPB)
  misc_feature (1)..(198): Homolog of NCBI NO: 25354597 NR Description: probable trehalose-phosphatase [imported] -
  misc_feature (1)..(198): Homolog of NCBI NO: 21554408 NR Description: trehalose-phosphatase, putative [Arabidopsis
  misc_feature (1)..(198): Homolog of NCBI NO: 18399940 NR Description: trehalose-phosphatase, putative
  misc_feature (1)..(198): Homolog of NCBI NO: 30692524 NR Description: trehalose-6-phosphate phosphatase, putative
  misc_feature (1)..(213): Homolog of NCBI NO: 30683008 NR Description: trehalose-6-phosphate phosphatase, putative
  misc_feature (1)..(213): Homolog of NCBI NO: 11282598 NR Description: trehalose-6-phosphate phosphatase-like protein -
  misc_feature (1)..(198): Homolog of NCBI NO: 15238360 NR Description: trehalose-6-phosphate phosphatase; protein id:
MFERIIEEARGKQIVMFLDYDGTLSPIVDDPDRAFMTSKMRRTVKKMAKCFPTSIVTGRCIDKVYSFVKLAELYYAGSHGMDIKGPTKGFSRYNKDKPSVLYQPAGDFLPMIDEVYKQLVEKTKSTPGAKVENNKFCLSVHFRCVDEKKWSELASKVRSVVKNYPTLKLSQGRKVFEIRPIIKWNKGKALEFLLESLGETLFGRLLNFIFAYLNSFINNNISS

SEQ ID NO: 21324 - DNA, 1391 bp, Arabidopsis thaliana
  misc_feature (1)..(1391): Ceres Seq. ID no. 13488285
  misc_feature: MA Experiment ID: 108561 Result: Down-regulated in Transcription
  misc_feature: MA Experiment 108561 PARAMETER Experiment Name: At_100uM_ABA_cDNA_P Parameter: Timepoint (hr) Value: 6
  misc_feature: MA Experiment 108561 PARAMETER Experiment Name: At_100uM_ABA_cDNA_P Parameter: Tissue Value: Aerial
  misc_feature: MA Experiment 108561 PARAMETER Experiment Name: At_100uM_ABA_cDNA_P Parameter: Treatment Value: 100uM ABA vs. No Treatment
  misc_feature: MA Experiment ID: 108569 Result: Up-regulated in Transcription
  misc_feature: MA Experiment 108569 PARAMETER Experiment Name: At_0.001%_MeJA__cDNA_P Parameter: Timepoint (hr) Value: 6
  misc_feature: MA Experiment 108569 PARAMETER Experiment Name: At_0.001%_MeJA__cDNA_P Parameter: Tissue Value: Aerial
  misc_feature: MA Experiment 108569 PARAMETER Experiment Name: At_0.001%_MeJA__cDNA_P Parameter: Treatment Value: 0.001% MeJA vs. No Treatment
  misc_feature: MA Experiment ID: 108572 Result: Down-regulated in Transcription
  misc_feature: MA Experiment 108572 PARAMETER Experiment Name: At_Drought_cDNA_P Parameter: Timepoint (hr) Value: 1
  misc_feature: MA Experiment 108572 PARAMETER Experiment Name: At_Drought_cDNA_P Parameter: Tissue Value: Aerial
  misc_feature: MA Experiment 108572 PARAMETER Experiment Name: At_Drought_cDNA_P Parameter: Treatment Value: Drought vs. No Drought
  misc_feature: MA Experiment ID: 108576 Result: Down-regulated in Transcription
  misc_feature: MA Experiment 108576 PARAMETER Experiment Name: At_42deg_Heat_cDNA_P Parameter: Temperature (deg C) Value: 42 vs. 22
  misc_feature: MA Experiment 108576 PARAMETER Experiment Name: At_42deg_Heat_cDNA_P Parameter: Timepoint (hr) Value: 1
  misc_feature: MA Experiment 108576 PARAMETER Experiment Name: At_42deg_Heat_cDNA_P Parameter: Tissue Value: Aerial
  misc_feature: MA Experiment ID: 108668 Result: Down-regulated in Transcription
  misc_feature: MA Experiment 108668 PARAMETER Experiment Name: At_2mM_SA_cDNA_P Parameter: Plant Line Value: WS
  misc_feature: MA Experiment 108668 PARAMETER Experiment Name: At_2mM_SA_cDNA_P Parameter: Timepoint (hr) Value: 6
  misc_feature: MA Experiment 108668 PARAMETER Experiment Name: At_2mM_SA_cDNA_P Parameter: Treatment Value: 2mM SA vs. No Treatment
  misc_feature: MA Experiment ID: 20000169 Result: Down-regulated in Transcription
  misc_feature: MA Experiment 20000169 PARAMETER Experiment Name: At_100uM_ABA_P Parameter: Age (day) Value: 14
  misc_feature: MA Experiment 20000169 PARAMETER Experiment Name: At_100uM_ABA_P Parameter: Organism Value: A. thaliana
  misc_feature: MA Experiment 20000169 PARAMETER Experiment Name: At_100uM_ABA_P Parameter: Plant Line Value: WS
  misc_feature: MA Experiment 20000169 PARAMETER Experiment Name: At_100uM_ABA_P Parameter: Timepoint (hr) Value: 6
  misc_feature: MA Experiment 20000169 PARAMETER Experiment Name: At_100uM_ABA_P Parameter: Tissue Value: Aerial
  misc_feature: MA Experiment 20000169 PARAMETER Experiment Name: At_100uM_ABA_P Parameter: Treatment Value: 100uM ABA vs. No Treatment
  misc_feature: MA Experiment ID: 20000171 Result: Down-regulated in Transcription
  misc_feature: MA Experiment 20000171 PARAMETER Experiment Name: At_42deg_Heat_P Parameter: Age (day) Value: 14
  misc_feature: MA Experiment 20000171 PARAMETER Experiment Name: At_42deg_Heat_P Parameter: Organism Value: A. thaliana
  misc_feature: MA Experiment 20000171 PARAMETER Experiment Name: At_42deg_Heat_P Parameter: Plant Line Value: WS
  misc_feature: MA Experiment 20000171 PARAMETER Experiment Name: At_42deg_Heat_P Parameter: Temperature (deg C) Value: 42 vs. 22
  misc_feature: MA Experiment 20000171 PARAMETER Experiment Name: At_42deg_Heat_P Parameter: Timepoint (hr) Value: 1
  misc_feature: MA Experiment 20000171 PARAMETER Experiment Name: At_42deg_Heat_P Parameter: Tissue Value: Aerial
  misc_feature: MA Experiment ID: 20000173 Result: Down-regulated in Transcription
  misc_feature: MA Experiment 20000173 PARAMETER Experiment Name: At_42deg_Heat_P Parameter: Age (day) Value: 14
  misc_feature: MA Experiment 20000173 PARAMETER Experiment Name: At_42deg_Heat_P Parameter: Organism Value: A. thaliana
  misc_feature: MA Experiment 20000173 PARAMETER Experiment Name: At_42deg_Heat_P Parameter: Plant Line Value: WS
  misc_feature: MA Experiment 20000173 PARAMETER Experiment Name: At_42deg_Heat_P Parameter: Temperature (deg C) Value: 42 vs. 22
  misc_feature: MA Experiment 20000173 PARAMETER Experiment Name: At_42deg_Heat_P Parameter: Timepoint (hr) Value: 6
  misc_feature: MA Experiment 20000173 PARAMETER Experiment Name: At_42deg_Heat_P Parameter: Tissue Value: Aerial
  misc_feature: MA Experiment ID: 20000180 Result: Up-regulated in Transcription
  misc_feature: MA Experiment 20000180 PARAMETER Experiment Name: At_Germinating_Seeds_P Parameter: Age (hr) Value: 24 vs. 0
  misc_feature: MA Experiment 20000180 PARAMETER Experiment Name: At_Germinating_Seeds_P Parameter: Tissue Value: Germinating Seeds
  misc_feature: MA Experiment ID: 20000182 Result: Down-regulated in Transcription
  misc_feature: MA Experiment 20000182 PARAMETER Experiment Name: At_2mM_SA_P Parameter: Age (day) Value: 14
  misc_feature: MA Experiment 20000182 PARAMETER Experiment Name: At_2mM_SA_P Parameter: Organism Value: A. thaliana
  misc_feature: MA Experiment 20000182 PARAMETER Experiment Name: At_2mM_SA_P Parameter: Plant Line Value: WS
  misc_feature: MA Experiment 20000182 PARAMETER Experiment Name: At_2mM_SA_P Parameter: Timepoint (hr) Value: 6
  misc_feature: MA Experiment 20000182 PARAMETER Experiment Name: At_2mM_SA_P Parameter: Tissue Value: Aerial
  misc_feature: MA Experiment 20000182 PARAMETER Experiment Name: At_2mM_SA_P Parameter: Treatment Value: 2mM SA vs. No Treatment
  misc_feature: MA Experiment ID: 20000184 Result: Up-regulated in Transcription
  misc_feature: MA Experiment 20000184 PARAMETER Experiment Name: At_Shoots__P Parameter: Age (day) Value: 7
  misc_feature: MA Experiment 20000184 PARAMETER Experiment Name: At_Shoots__P Parameter: Tissue Value: Shoots vs. Whole Plant
  misc_feature: MA Experiment ID: 20000227 Result: Up-regulated in Transcription
  misc_feature: MA Experiment 20000227 PARAMETER Experiment Name: At_Root-Tips-vs-Tops_P Parameter: Tissue Value: Root Tips vs. Root Tops
  misc_feature: MA Experiment ID: 20000234 Result: Up-regulated in Transcription
  misc_feature: MA Experiment 20000234 PARAMETER Experiment Name: At_Siliques_P Parameter: Age (day) Value: 21
  misc_feature: MA Experiment 20000234 PARAMETER Experiment Name: At_Siliques_P Parameter: Organism Value: A. thaliana
  misc_feature: MA Experiment 20000234 PARAMETER Experiment Name: At_Siliques_P Parameter: Plant Line Value: WS
  misc_feature: MA Experiment 20000234 PARAMETER Experiment Name: At_Siliques_P Parameter: Tissue Value: Less Than 5mm Siliques vs. Whole Plant
  misc_feature: MA Experiment ID: 20000264 Result: Up-regulated in Transcription
  misc_feature: MA Experiment 20000264 PARAMETER Experiment Name: At_Open_Flower_P Parameter: Age (day) Value: 21
  misc_feature: MA Experiment 20000264 PARAMETER Experiment Name: At_Open_Flower_P Parameter: Plant Line Value: WS
  misc_feature: MA Experiment 20000264 PARAMETER Experiment Name: At_Open_Flower_P Parameter: Tissue Value: Open Flower vs. Whole Plant
  misc_feature: MA Experiment ID: 20000265 Result: Up-regulated in Transcription
  misc_feature: MA Experiment 20000265 PARAMETER Experiment Name: At_Open_Flower_P Parameter: Age (day) Value: 21
  misc_feature: MA Experiment 20000265 PARAMETER Experiment Name: At_Open_Flower_P Parameter: Plant Line Value: WS
  misc_feature: MA Experiment 20000265 PARAMETER Experiment Name: At_Open_Flower_P Parameter: Tissue Value: Closed Flower vs. Whole Plant
  misc_feature: MA Experiment ID: 20000267 Result: Down-regulated in Transcription
  misc_feature: MA Experiment 20000267 PARAMETER Experiment Name: At_Drought_P Parameter: Age (day) Value: 7
  misc_feature: MA Experiment 20000267 PARAMETER Experiment Name: At_Drought_P Parameter: Organism Value: A. thaliana
  misc_feature: MA Experiment 20000267 PARAMETER Experiment Name: At_Drought_P Parameter: Plant Line Value: WS
  misc_feature: MA Experiment 20000267 PARAMETER Experiment Name: At_Drought_P Parameter: Timepoint (hr) Value: 6
  misc_feature: MA Experiment 20000267 PARAMETER Experiment Name: At_Drought_P Parameter: Tissue Value: Whole Plant
  misc_feature: MA Experiment 20000267 PARAMETER Experiment Name: At_Drought_P Parameter: Treatment Value: Drought vs. No Drought
  misc_feature: MA Experiment ID: 20000286 Result: Up-regulated in Transcription
  misc_feature: MA Experiment 20000286 PARAMETER Experiment Name: At_Open_Flower_P Parameter: Age (day) Value: 21
  misc_feature: MA Experiment 20000286 PARAMETER Experiment Name: At_Open_Flower_P Parameter: Plant Line Value: WS
  misc_feature: MA Experiment 20000286 PARAMETER Experiment Name: At_Open_Flower_P Parameter: Tissue Value: Half Open vs. Whole Plant
  misc_feature: MA Experiment ID: 20000436 Result: Down-regulated in Transcription
  misc_feature: MA Experiment 20000436 PARAMETER Experiment Name: At_Drought_P Parameter: Age (day) Value: 7
  misc_feature: MA Experiment 20000436 PARAMETER Experiment Name: At_Drought_P Parameter: Organism Value: A. thaliana
  misc_feature: MA Experiment 20000436 PARAMETER Experiment Name: At_Drought_P Parameter: Plant Line Value: WS
  misc_feature: MA Experiment 20000436 PARAMETER Experiment Name: At_Drought_P Parameter: Timepoint (hr) Value: 12
  misc_feature: MA Experiment 20000436 PARAMETER Experiment Name: At_Drought_P Parameter: Tissue Value: Whole Plant
  misc_feature: MA Experiment 20000436 PARAMETER Experiment Name: At_Drought_P Parameter: Treatment Value: Drought vs. No Drought
  misc_feature: MA Experiment ID: 20000437 Result: Down-regulated in Transcription
  misc_feature: MA Experiment 20000437 PARAMETER Experiment Name: At_Drought_P Parameter: Age (day) Value: 8
  misc_feature: MA Experiment 20000437 PARAMETER Experiment Name: At_Drought_P Parameter: Organism Value: A. thaliana
  misc_feature: MA Experiment 20000437 PARAMETER Experiment Name: At_Drought_P Parameter: Plant Line Value: WS
  misc_feature: MA Experiment 20000437 PARAMETER Experiment Name: At_Drought_P Parameter: Timepoint (hr) Value: 24
  misc_feature: MA Experiment 20000437 PARAMETER Experiment Name: At_Drought_P Parameter: Tissue Value: Whole Plant
  misc_feature: MA Experiment 20000437 PARAMETER Experiment Name: At_Drought_P Parameter: Treatment Value: Drought vs. No Drought
  misc_feature: MA Experiment ID: 20000438 Result: Up-regulated in Transcription
  misc_feature: MA Experiment 20000438 PARAMETER Experiment Name: At_Shoots__P Parameter: Age (day) Value: 14
  misc_feature: MA Experiment 20000438 PARAMETER Experiment Name: At_Shoots__P Parameter: Tissue Value: Shoots vs. Whole Plant
  misc_feature: MA Experiment ID: 20000527 Result: Down-regulated in Transcription
  misc_feature: MA Experiment 20000527 PARAMETER Experiment Name: At_10percent_PEG_P Parameter: Age (day) Value: 20
  misc_feature: MA Experiment 20000527 PARAMETER Experiment Name: At_10percent_PEG_P Parameter: Organism Value: A. thaliana
  misc_feature: MA Experiment 20000527 PARAMETER Experiment Name: At_10percent_PEG_P Parameter: Plant Line Value: WS
  misc_feature: MA Experiment 20000527 PARAMETER Experiment Name: At_10percent_PEG_P Parameter: Timepoint (day) Value: 20
  misc_feature: MA Experiment 20000527 PARAMETER Experiment Name: At_10percent_PEG_P Parameter: Tissue Value: Whole Plant
  misc_feature: MA Experiment 20000527 PARAMETER Experiment Name: At_10percent_PEG_P Parameter: Treatment Value: 10percent PEG vs. No Treatment
  misc_feature: MA Experiment ID: 20000794 Result: Up-regulated in Transcription
  misc_feature: MA Experiment 20000794 PARAMETER Experiment Name: At_Petals_P Parameter: Age (day) Value: 23-25 days
  misc_feature: MA Experiment 20000794 PARAMETER Experiment Name: At_Petals_P Parameter: Plant Line Value: WS
  misc_feature: MA Experiment 20000794 PARAMETER Experiment Name: At_Petals_P Parameter: Tissue Value: Petals vs. Whole plant
  misc_feature: MA Experiment ID: 20001450 Result: Up-regulated in Transcription
  misc_feature: MA Experiment 20001450 PARAMETER Experiment Name: At_Far-red-induction_P Parameter: Age (day) Value: 7
  misc_feature: MA Experiment 20001450 PARAMETER Experiment Name: At_Far-red-induction_P Parameter: Light Value: Far-red vs. White
  misc_feature: MA Experiment 20001450 PARAMETER Experiment Name: At_Far-red-induction_P Parameter: Organism Value: A. thaliana
  misc_feature: MA Experiment 20001450 PARAMETER Experiment Name: At_Far-red-induction_P Parameter: Plant Line Value: Columbia
  misc_feature: MA Experiment 20001450 PARAMETER Experiment Name: At_Far-red-induction_P Parameter: Timepoint (hr) Value: 8
  misc_feature: MA Experiment 20001450 PARAMETER Experiment Name: At_Far-red-induction_P Parameter: Tissue Value: Whole Plant
  misc_feature: MA Experiment ID: 20001554 Result: Down-regulated in Transcription
  misc_feature: MA Experiment 20001554 PARAMETER Experiment Name: At_Drought_Soil_Dry_P Parameter: Age (day) Value: 21
  misc_feature: MA Experiment 20001554 PARAMETER Experiment Name: At_Drought_Soil_Dry_P Parameter: Organism Value: A. thaliana
  misc_feature: MA Experiment 20001554 PARAMETER Experiment Name: At_Drought_Soil_Dry_P Parameter: Plant Line Value: WS
  misc_feature: MA Experiment 20001554 PARAMETER Experiment Name: At_Drought_Soil_Dry_P Parameter: Post Timepoint (hr) Value: None
  misc_feature: MA Experiment 20001554 PARAMETER Experiment Name: At_Drought_Soil_Dry_P Parameter: Post-Treatment Value: None
  misc_feature: MA Experiment 20001554 PARAMETER Experiment Name: At_Drought_Soil_Dry_P Parameter: Timepoint (day) Value: 7
  misc_feature: MA Experiment 20001554 PARAMETER Experiment Name: At_Drought_Soil_Dry_P Parameter: Treatment Value: Drought vs. No Drought
  misc_feature: MA Experiment ID: 20001555 Result: Down-regulated in Transcription
  misc_feature: MA Experiment 20001555 PARAMETER Experiment Name: At_Drought_Soil_Dry_P Parameter: Age (day) Value: 24
  misc_feature: MA Experiment 20001555 PARAMETER Experiment Name: At_Drought_Soil_Dry_P Parameter: Organism Value: A. thaliana
  misc_feature: MA Experiment 20001555 PARAMETER Experiment Name: At_Drought_Soil_Dry_P Parameter: Plant Line Value: WS
  misc_feature: MA Experiment 20001555 PARAMETER Experiment Name: At_Drought_Soil_Dry_P Parameter: Post Timepoint (hr) Value: None
  misc_feature: MA Experiment 20001555 PARAMETER Experiment Name: At_Drought_Soil_Dry_P Parameter: Post-Treatment Value: None
  misc_feature: MA Experiment 20001555 PARAMETER Experiment Name: At_Drought_Soil_Dry_P Parameter: Timepoint (day) Value: 10
  misc_feature: MA Experiment 20001555 PARAMETER Experiment Name: At_Drought_Soil_Dry_P Parameter: Treatment Value: Drought vs. No Drought
  misc_feature: MA Experiment ID: 20001556 Result: Down-regulated in Transcription
  misc_feature: MA Experiment 20001556 PARAMETER Experiment Name: At_Drought_Soil_Dry_P Parameter: Age (day) Value: 26
  misc_feature: MA Experiment 20001556 PARAMETER Experiment Name: At_Drought_Soil_Dry_P Parameter: Organism Value: A. thaliana
  misc_feature: MA Experiment 20001556 PARAMETER Experiment Name: At_Drought_Soil_Dry_P Parameter: Plant Line Value: WS
  misc_feature: MA Experiment 20001556 PARAMETER Experiment Name: At_Drought_Soil_Dry_P Parameter: Post Timepoint (hr) Value: None
  misc_feature: MA Experiment 20001556 PARAMETER Experiment Name: At_Drought_Soil_Dry_P Parameter: Post-Treatment Value: None
  misc_feature: MA Experiment 20001556 PARAMETER Experiment Name: At_Drought_Soil_Dry_P Parameter: Timepoint (day) Value: 12
  misc_feature: MA Experiment 20001556 PARAMETER Experiment Name: At_Drought_Soil_Dry_P Parameter: Treatment Value: Drought vs. No Drought
  misc_feature: MA Experiment ID: 20001559 Result: Down-regulated in Transcription
  misc_feature: MA Experiment 20001559 PARAMETER Experiment Name: At_Drought_Soil_Dry_P Parameter: Age (day) Value: 28
  misc_feature: MA Experiment 20001559 PARAMETER Experiment Name: At_Drought_Soil_Dry_P Parameter: Organism Value: A. thaliana
  misc_feature: MA Experiment 20001559 PARAMETER Experiment Name: At_Drought_Soil_Dry_P Parameter: Plant Line Value: WS
  misc_feature: MA Experiment 20001559 PARAMETER Experiment Name: At_Drought_Soil_Dry_P Parameter: Post Timepoint (hr) Value: 29
  misc_feature: MA Experiment 20001559 PARAMETER Experiment Name: At_Drought_Soil_Dry_P Parameter: Post-Treatment Value: Re-Water vs. No Drought
  misc_feature: MA Experiment 20001559 PARAMETER Experiment Name: At_Drought_Soil_Dry_P Parameter: Timepoint (day) Value: 14
  misc_feature: MA Experiment 20001559 PARAMETER Experiment Name: At_Drought_Soil_Dry_P Parameter: Treatment Value: Drought vs. No Drought
  misc_feature: MA Experiment ID: 20001757 Result: Up-regulated in Transcription
  misc_feature: MA Experiment 20001757 PARAMETER Experiment Name: At_50mM_NH4NO3_L-to-H_P Parameter: Timepoint (hr) Value: 6
  misc_feature: MA Experiment 20001757 PARAMETER Experiment Name: At_50mM_NH4NO3_L-to-H_P Parameter: Tissue Value: Leaf
  misc_feature: MA Experiment 20001757 PARAMETER Experiment Name: At_50mM_NH4NO3_L-to-H_P Parameter: Treatment Value: 50mM NH4NO3 vs 100mM Mannitol
  misc_feature: MA Experiment ID: 20001904 Result: Down-regulated in Transcription
  misc_feature: MA Experiment 20001904 PARAMETER Experiment Name: At_Drought_Reproduction_P Parameter: Age (day) Value: 37
  misc_feature: MA Experiment 20001904 PARAMETER Experiment Name: At_Drought_Reproduction_P Parameter: Organism Value: A. thaliana
  misc_feature: MA Experiment 20001904 PARAMETER Experiment Name: At_Drought_Reproduction_P Parameter: Plant Line Value: WS
  misc_feature: MA Experiment 20001904 PARAMETER Experiment Name: At_Drought_Reproduction_P Parameter: Timepoint (day) Value: 7
  misc_feature: MA Experiment 20001904 PARAMETER Experiment Name: At_Drought_Reproduction_P Parameter: Tissue Value: Rosettes
  misc_feature: MA Experiment 20001904 PARAMETER Experiment Name: At_Drought_Reproduction_P Parameter: Treatment Value: Drought vs. No Drought
  misc_feature: MA Experiment ID: 20001906 Result: Down-regulated in Transcription
  misc_feature: MA Experiment 20001906 PARAMETER Experiment Name: At_Drought_Reproduction_P Parameter: Age (day) Value: 35
  misc_feature: MA Experiment 20001906 PARAMETER Experiment Name: At_Drought_Reproduction_P Parameter: Organism Value: A. thaliana
  misc_feature: MA Experiment 20001906 PARAMETER Experiment Name: At_Drought_Reproduction_P Parameter: Plant Line Value: WS
  misc_feature: MA Experiment 20001906 PARAMETER Experiment Name: At_Drought_Reproduction_P Parameter: Timepoint (day) Value: 5
  misc_feature: MA Experiment 20001906 PARAMETER Experiment Name: At_Drought_Reproduction_P Parameter: Tissue Value: Siliques
  misc_feature: MA Experiment 20001906 PARAMETER Experiment Name: At_Drought_Reproduction_P Parameter: Treatment Value: Drought vs. No Drought
  misc_feature: MA Experiment ID: 20001908 Result: Down-regulated in Transcription
  misc_feature: MA Experiment 20001908 PARAMETER Experiment Name: At_Drought_Reproduction_P Parameter: Age (day) Value: 40
  misc_feature: MA Experiment 20001908 PARAMETER Experiment Name: At_Drought_Reproduction_P Parameter: Organism Value: A. thaliana
  misc_feature: MA Experiment 20001908 PARAMETER Experiment Name: At_Drought_Reproduction_P Parameter: Plant Line Value: WS
  misc_feature: MA Experiment 20001908 PARAMETER Experiment Name: At_Drought_Reproduction_P Parameter: Timepoint (day) Value: 10
  misc_feature: MA Experiment 20001908 PARAMETER Experiment Name: At_Drought_Reproduction_P Parameter: Tissue Value: Siliques
  misc_feature: MA Experiment 20001908 PARAMETER Experiment Name: At_Drought_Reproduction_P Parameter: Treatment Value: Drought vs. No Drought
  misc_feature: MA Experiment ID: 20001911 Result: Down-regulated in Transcription
  misc_feature: MA Experiment 20001911 PARAMETER Experiment Name: At_Drought_Reproduction_P Parameter: Age (day) Value: 40
  misc_feature: MA Experiment 20001911 PARAMETER Experiment Name: At_Drought_Reproduction_P Parameter: Organism Value: A. thaliana
  misc_feature: MA Experiment 20001911 PARAMETER Experiment Name: At_Drought_Reproduction_P Parameter: Plant Line Value: WS
  misc_feature: MA Experiment 20001911 PARAMETER Experiment Name: At_Drought_Reproduction_P Parameter: Timepoint (day) Value: 10
  misc_feature: MA Experiment 20001911 PARAMETER Experiment Name: At_Drought_Reproduction_P Parameter: Tissue Value: Flowers
  misc_feature: MA Experiment 20001911 PARAMETER Experiment Name: At_Drought_Reproduction_P Parameter: Treatment Value: Drought vs. No Drought
gcactctatatcaaacatttcttttaaaaatgagaaagttgttggcatcgccgtttagttcattactcgccgtcgttttcatttccgtcatctccgtcgtcagatgctgctctcctaaagatcagacggctctcaatgctttcaagtcgtcactgagcgaaccaaacctcggtatcttcaacacttggtctgaaaacactgattgttgcaaggaatggtacggtatcagctgcgatcctgattcgggtcgggtcactgatatttctctccggggagaatctgaagacgccattttccaaaaggcaggccggtccggttatatgtccggttcgattgatccagcagtttgtgacttaaccgcactcacttccctcgttctcgccgactggaaaggaatcaccggagagattcctccgtgcattacttccctagcttcgctccgtatcctcgatctcgccggcaacaagatcaccggggagattcccgcggaaatcggcaaactctcgaaactcgctgttttaaacctcgccgagaatcaaatgtccggcgagattccggcgtcactgacgtcactcatcgagttgaagcatcttgaattgacggaaaatggaatcaccggcgtgatcccggccgatttcggatcgttgaagatgttgagcagagttttactgggccgtaacgaactaaccgggtcaattccagagtcgatctcgggtatggaacggttagcggatctggatctatccaaaaaccatatcgaaggtccgatacccgaatggatgggtaacatgaaggtactctcacttttgaatctcgattgcaattcgttaaccggtccaatccccggttcgcttcttagcaattccggtttagatgttgccaatttgagccgaaatgcgttggaaggaactatacccgacgttttcgggtcaaaaacgtatttagtttcgcttgatctgtcacacaatagtctatcgggtcggatcccggattcgttgtcgtcagctaagtttgtgggacatttggatattagccataacaagctttgtgggcgtattccaacgggttttccttttgatcaccttgaagctacgtcgtttagtgacaaccaatgtctctgcggtggccctttgacgacgtcatgttaataacaaggatatggtttctggttttactgaaccgggttattctttttgctgttgctcttgttcgttgtatcaaacttgtgatattttgcttttcatttcttcgtctttcagattttagtttctaaagctaagatatgttactggcaacggacaggtacaccgatccaatatggtttgcggtctatgtacaatgaatccggatgtaaaatcaaaagcaatgttatagaatttaatttcaagatc

SEQ ID NO: 21325 - protein, 381 aa, Arabidopsis thaliana
  peptide (1)..(381): Ceres Seq. ID no. 13488286
  misc_feature (241)..(264): Pfam Name: Leucine Rich Repeat Pfam Description: Leucine Rich Repeat
  misc_feature (241)..(264): Pfam Name: Leucine Rich Repeat Pfam Description: Leucine Rich Repeat
  misc_feature (241)..(264): Pfam Name: Leucine Rich Repeat Pfam Description: Leucine Rich Repeat
  misc_feature (24)..(347): Homolog of NCBI NO: 21536600 NR Description: putative disease resistance protein [Arabidopsis
  misc_feature (18)..(347): Homolog of NCBI NO: 15225296 NR Description: disease resistance protien-related (LRR)
  misc_feature (59)..(377): Homolog of NCBI NO: 25004882 NR Description: polygalacturonase inhibitor-like protein [Cicer
  misc_feature (24)..(377): Homolog of NCBI NO: 15239943 NR Description: leucine rich repeat protein family [Arabidopsis
  misc_feature (24)..(377): Homolog of NCBI NO: 14532722 NR Description: unknown protein [Arabidopsis thaliana]
  misc_feature (24)..(347): Homolog of NCBI NO: 21536600 NR Description: putative disease resistance protein [Arabidopsis
  misc_feature (59)..(377): Homolog of NCBI NO: 25004882 NR Description: polygalacturonase inhibitor-like protein [Cicer
  misc_feature (24)..(377): Homolog of NCBI NO: 14532722 NR Description: unknown protein [Arabidopsis thaliana]
  misc_feature (24)..(377): Homolog of NCBI NO: 15239943 NR Description: leucine rich repeat protein family [Arabidopsis
  misc_feature (59)..(377): Homolog of NCBI NO: 25004882 NR Description: polygalacturonase inhibitor-like protein [Cicer
  misc_feature (18)..(347): Homolog of NCBI NO: 15225296 NR Description: disease resistance protien-related (LRR)
  misc_feature (24)..(347): Homolog of NCBI NO: 21536600 NR Description: putative disease resistance protein [Arabidopsis
  misc_feature (10)..(381): Homolog of NCBI NO: 15230539 NR Description: DNA-damage-repair/toleration protein, putative
  misc_feature (62)..(381): Homolog of NCBI NO: 421844 NR Description: DRT100 protein precursor - Arabidopsis thaliana
  misc_feature (14)..(379): Homolog of NCBI NO: 38566726 NR Description: leucine rich repeat protein [Cicer arietinum]
  misc_feature (20)..(377): Homolog of NCBI NO: 15232373 NR Description: disease resistance protein family (LRR)
  misc_feature (24)..(377): Homolog of NCBI NO: 21593689 NR Description: leucine rich repeat protein, putative
  misc_feature (10)..(381): Homolog of NCBI NO: 15230539 NR Description: DNA-damage-repair/toleration protein, putative
  misc_feature (62)..(381): Homolog of NCBI NO: 421844 NR Description: DRT100 protein precursor - Arabidopsis thaliana
  misc_feature (14)..(379): Homolog of NCBI NO: 38566726 NR Description: leucine rich repeat protein [Cicer arietinum]
  misc_feature (20)..(377): Homolog of NCBI NO: 15232373 NR Description: disease resistance protein family (LRR)
  misc_feature (24)..(377): Homolog of NCBI NO: 21593689 NR Description: leucine rich repeat protein, putative
  misc_feature (24)..(377): Homolog of NCBI NO: 14532722 NR Description: unknown protein [Arabidopsis thaliana]
  misc_feature (24)..(377): Homolog of NCBI NO: 15239943 NR Description: leucine rich repeat protein family [Arabidopsis
  misc_feature (18)..(347): Homolog of NCBI NO: 15225296 NR Description: disease resistance protien-related (LRR)
  misc_feature (24)..(377): Homolog of NCBI NO: 21593689 NR Description: leucine rich repeat protein, putative
  misc_feature (20)..(377): Homolog of NCBI NO: 15232373 NR Description: disease resistance protein family (LRR)
  misc_feature (14)..(379): Homolog of NCBI NO: 38566726 NR Description: leucine rich repeat protein [Cicer arietinum]
  misc_feature (62)..(381): Homolog of NCBI NO: 421844 NR Description: DRT100 protein precursor - Arabidopsis thaliana
  misc_feature (10)..(381): Homolog of NCBI NO: 15230539 NR Description: DNA-damage-repair/toleration protein, putative
TLYQTFLLKMRKLLASPFSSLLAVVFISVISVVRCCSPKDQTALNAFKSSLSEPNLGIFNTWSENTDCCKEWYGISCDPDSGRVTDISLRGESEDAIFQKAGRSGYMSGSIDPAVCDLTALTSLVLADWKGITGEIPPCITSLASLRILDLAGNKITGEIPAEIGKLSKLAVLNLAENQMSGEIPASLTSLIELKHLELTENGITGVIPADFGSLKMLSRVLLGRNELTGSIPESISGMERLADLDLSKNHIEGPIPEWMGNMKVLSLLNLDCNSLTGPIPGSLLSNSGLDVANLSRNALEGTIPDVFGSKTYLVSLDLSHNSLSGRIPDSLSSAKFVGHLDISHNKLCGRIPTGFPFDHLEATSFSDNQCLCGGPLTTSC

SEQ ID NO: 21326 - protein, 372 aa, Arabidopsis thaliana
  peptide (1)..(372): Ceres Seq. ID no. 13488287
  misc_feature (232)..(255): Pfam Name: Leucine Rich Repeat Pfam Description: Leucine Rich Repeat
  misc_feature (232)..(255): Pfam Name: Leucine Rich Repeat Pfam Description: Leucine Rich Repeat
  misc_feature (232)..(255): Pfam Name: Leucine Rich Repeat Pfam Description: Leucine Rich Repeat
  misc_feature (15)..(338): Homolog of NCBI NO: 21536600 NR Description: putative disease resistance protein [Arabidopsis
  misc_feature (9)..(338): Homolog of NCBI NO: 15225296 NR Description: disease resistance protien-related (LRR)
  misc_feature (50)..(368): Homolog of NCBI NO: 25004882 NR Description: polygalacturonase inhibitor-like protein [Cicer
  misc_feature (15)..(368): Homolog of NCBI NO: 15239943 NR Description: leucine rich repeat protein family [Arabidopsis
  misc_feature (15)..(368): Homolog of NCBI NO: 14532722 NR Description: unknown protein [Arabidopsis thaliana]
  misc_feature (15)..(368): Homolog of NCBI NO: 14532722 NR Description: unknown protein [Arabidopsis thaliana]
  misc_feature (11)..(368): Homolog of NCBI NO: 15232373 NR Description: disease resistance protein family (LRR)
  misc_feature (53)..(372): Homolog of NCBI NO: 421844 NR Description: DRT100 protein precursor - Arabidopsis thaliana
  misc_feature (15)..(368): Homolog of NCBI NO: 15239943 NR Description: leucine rich repeat protein family [Arabidopsis
  misc_feature (50)..(368): Homolog of NCBI NO: 25004882 NR Description: polygalacturonase inhibitor-like protein [Cicer
  misc_feature (9)..(338): Homolog of NCBI NO: 15225296 NR Description: disease resistance protien-related (LRR)
  misc_feature (15)..(338): Homolog of NCBI NO: 21536600 NR Description: putative disease resistance protein [Arabidopsis
  misc_feature (15)..(368): Homolog of NCBI NO: 15239943 NR Description: leucine rich repeat protein family [Arabidopsis
  misc_feature (50)..(368): Homolog of NCBI NO: 25004882 NR Description: polygalacturonase inhibitor-like protein [Cicer
  misc_feature (9)..(338): Homolog of NCBI NO: 15225296 NR Description: disease resistance protien-related (LRR)
  misc_feature (15)..(338): Homolog of NCBI NO: 21536600 NR Description: putative disease resistance protein [Arabidopsis
  misc_feature (1)..(372): Homolog of NCBI NO: 15230539 NR Description: DNA-damage-repair/toleration protein, putative
  misc_feature (1)..(372): Homolog of NCBI NO: 15230539 NR Description: DNA-damage-repair/toleration protein, putative
  misc_feature (53)..(372): Homolog of NCBI NO: 421844 NR Description: DRT100 protein precursor - Arabidopsis thaliana
  misc_feature (5)..(370): Homolog of NCBI NO: 38566726 NR Description: leucine rich repeat protein [Cicer arietinum]
  misc_feature (11)..(368): Homolog of NCBI NO: 15232373 NR Description: disease resistance protein family (LRR)
  misc_feature (15)..(368): Homolog of NCBI NO: 21593689 NR Description: leucine rich repeat protein, putative
  misc_feature (15)..(368): Homolog of NCBI NO: 14532722 NR Description: unknown protein [Arabidopsis thaliana]
  misc_feature (5)..(370): Homolog of NCBI NO: 38566726 NR Description: leucine rich repeat protein [Cicer arietinum]
  misc_feature (15)..(368): Homolog of NCBI NO: 21593689 NR Description: leucine rich repeat protein, putative
  misc_feature (15)..(368): Homolog of NCBI NO: 21593689 NR Description: leucine rich repeat protein, putative
  misc_feature (11)..(368): Homolog of NCBI NO: 15232373 NR Description: disease resistance protein family (LRR)
  misc_feature (5)..(370): Homolog of NCBI NO: 38566726 NR Description: leucine rich repeat protein [Cicer arietinum]
  misc_feature (53)..(372): Homolog of NCBI NO: 421844 NR Description: DRT100 protein precursor - Arabidopsis thaliana
  misc_feature (1)..(372): Homolog of NCBI NO: 15230539 NR Description: DNA-damage-repair/toleration protein, putative
MRKLLASPFSSLLAVVFISVISVVRCCSPKDQTALNAFKSSLSEPNLGIFNTWSENTDCCKEWYGISCDPDSGRVTDISLRGESEDAIFQKAGRSGYMSGSIDPAVCDLTALTSLVLADWKGITGEIPPCITSLASLRILDLAGNKITGEIPAEIGKLSKLAVLNLAENQMSGEIPASLTSLIELKHLELTENGITGVIPADFGSLKMLSRVLLGRNELTGSIPESISGMERLADLDLSKNHIEGPIPEWMGNMKVLSLLNLDCNSLTGPIPGSLLSNSGLDVANLSRNALEGTIPDVFGSKTYLVSLDLSHNSLSGRIPDSLSSAKFVGHLDISHNKLCGRIPTGFPFDHLEATSFSDNQCLCGGPLTTSC

SEQ ID NO: 21327 - protein, 275 aa, Arabidopsis thaliana
  peptide (1)..(275): Ceres Seq. ID no. 13488288
  misc_feature (135)..(158): Pfam Name: Leucine Rich Repeat Pfam Description: Leucine Rich Repeat
  misc_feature (135)..(158): Pfam Name: Leucine Rich Repeat Pfam Description: Leucine Rich Repeat
  misc_feature (135)..(158): Pfam Name: Leucine Rich Repeat Pfam Description: Leucine Rich Repeat
  misc_feature (1)..(241): Homolog of NCBI NO: 21536600 NR Description: putative disease resistance protein [Arabidopsis
  misc_feature (1)..(241): Homolog of NCBI NO: 15225296 NR Description: disease resistance protien-related (LRR)
  misc_feature (1)..(271): Homolog of NCBI NO: 25004882 NR Description: polygalacturonase inhibitor-like protein [Cicer
  misc_feature (1)..(271): Homolog of NCBI NO: 15239943 NR Description: leucine rich repeat protein family [Arabidopsis
  misc_feature (1)..(271): Homolog of NCBI NO: 14532722 NR Description: unknown protein [Arabidopsis thaliana]
  misc_feature (1)..(241): Homolog of NCBI NO: 21536600 NR Description: putative disease resistance protein [Arabidopsis
  misc_feature (1)..(271): Homolog of NCBI NO: 25004882 NR Description: polygalacturonase inhibitor-like protein [Cicer
  misc_feature (1)..(271): Homolog of NCBI NO: 14532722 NR Description: unknown protein [Arabidopsis thaliana]
  misc_feature (1)..(241): Homolog of NCBI NO: 21536600 NR Description: putative disease resistance protein [Arabidopsis
  misc_feature (1)..(275): Homolog of NCBI NO: 15230539 NR Description: DNA-damage-repair/toleration protein, putative
  misc_feature (1)..(275): Homolog of NCBI NO: 421844 NR Description: DRT100 protein precursor - Arabidopsis thaliana
  misc_feature (1)..(273): Homolog of NCBI NO: 38566726 NR Description: leucine rich repeat protein [Cicer arietinum]
  misc_feature (1)..(275): Homolog of NCBI NO: 15230539 NR Description: DNA-damage-repair/toleration protein, putative
  misc_feature (1)..(275): Homolog of NCBI NO: 421844 NR Description: DRT100 protein precursor - Arabidopsis thaliana
  misc_feature (1)..(273): Homolog of NCBI NO: 38566726 NR Description: leucine rich repeat protein [Cicer arietinum]
  misc_feature (1)..(271): Homolog of NCBI NO: 15232373 NR Description: disease resistance protein family (LRR)
  misc_feature (1)..(271): Homolog of NCBI NO: 21593689 NR Description: leucine rich repeat protein, putative
  misc_feature (1)..(271): Homolog of NCBI NO: 15232373 NR Description: disease resistance protein family (LRR)
  misc_feature (1)..(271): Homolog of NCBI NO: 21593689 NR Description: leucine rich repeat protein, putative
  misc_feature (1)..(271): Homolog of NCBI NO: 14532722 NR Description: unknown protein [Arabidopsis thaliana]
  misc_feature (1)..(271): Homolog of NCBI NO: 15239943 NR Description: leucine rich repeat protein family [Arabidopsis
  misc_feature (1)..(271): Homolog of NCBI NO: 25004882 NR Description: polygalacturonase inhibitor-like protein [Cicer
  misc_feature (1)..(241): Homolog of NCBI NO: 15225296 NR Description: disease resistance protien-related (LRR)
  misc_feature (1)..(271): Homolog of NCBI NO: 15239943 NR Description: leucine rich repeat protein family [Arabidopsis
  misc_feature (1)..(241): Homolog of NCBI NO: 15225296 NR Description: disease resistance protien-related (LRR)
  misc_feature (1)..(271): Homolog of NCBI NO: 21593689 NR Description: leucine rich repeat protein, putative
  misc_feature (1)..(271): Homolog of NCBI NO: 15232373 NR Description: disease resistance protein family (LRR)
  misc_feature (1)..(273): Homolog of NCBI NO: 38566726 NR Description: leucine rich repeat protein [Cicer arietinum]
  misc_feature (1)..(275): Homolog of NCBI NO: 421844 NR Description: DRT100 protein precursor - Arabidopsis thaliana
  misc_feature (1)..(275): Homolog of NCBI NO: 15230539 NR Description: DNA-damage-repair/toleration protein, putative
MSGSIDPAVCDLTALTSLVLADWKGITGEIPPCITSLASLRILDLAGNKITGEIPAEIGKLSKLAVLNLAENQMSGEIPASLTSLIELKHLELTENGITGVIPADFGSLKMLSRVLLGRNELTGSIPESISGMERLADLDLSKNHIEGPIPEWMGNMKVLSLLNLDCNSLTGPIPGSLLSNSGLDVANLSRNALEGTIPDVFGSKTYLVSLDLSHNSLSGRIPDSLSSAKFVGHLDISHNKLCGRIPTGFPFDHLEATSFSDNQCLCGGPLTTSC

SEQ ID NO: 21328 - DNA, 1776 bp, Arabidopsis thaliana
  misc_feature (1)..(1776): Ceres Seq. ID no. 12334196
  misc_feature: MA Experiment ID: 108461 Result: Up-regulated in Transcription
  misc_feature: MA Experiment 108461 PARAMETER Experiment Name: At_Germinating_Seeds_cDNA_P Parameter: Age (day) Value: 1 vs. 0
  misc_feature: MA Experiment 108461 PARAMETER Experiment Name: At_Germinating_Seeds_cDNA_P Parameter: Tissue Value: Germinating Seeds
  misc_feature: MA Experiment ID: 108573 Result: Up-regulated in Transcription
  misc_feature: MA Experiment 108573 PARAMETER Experiment Name: At_Drought_cDNA_P Parameter: Timepoint (hr) Value: 6
  misc_feature: MA Experiment 108573 PARAMETER Experiment Name: At_Drought_cDNA_P Parameter: Tissue Value: Aerial
  misc_feature: MA Experiment 108573 PARAMETER Experiment Name: At_Drought_cDNA_P Parameter: Treatment Value: Drought vs. No Drought
  misc_feature: MA Experiment ID: 108595 Result: Down-regulated in Transcription
  misc_feature: MA Experiment 108595 PARAMETER Experiment Name: At_Ler-pi_Ovule_cDNA_P Parameter: Plant Line Value: null
  misc_feature: MA Experiment ID: 108608 Result: Down-regulated in Transcription
  misc_feature: MA Experiment 108608 PARAMETER Experiment Name: At_100uM_ABA_cDNA_P Parameter: Timepoint (hr) Value: 1
  misc_feature: MA Experiment 108608 PARAMETER Experiment Name: At_100uM_ABA_cDNA_P Parameter: Tissue Value: Aerial
  misc_feature: MA Experiment 108608 PARAMETER Experiment Name: At_100uM_ABA_cDNA_P Parameter: Treatment Value: 100uM ABA vs. No Treatment
  misc_feature: MA Experiment ID: 20000069 Result: Up-regulated in Transcription
  misc_feature: MA Experiment 20000069 PARAMETER Experiment Name: At_100uM_ABA_Mutants_cDNA_P Parameter: Plant Line Value: CS23
  misc_feature: MA Experiment 20000069 PARAMETER Experiment Name: At_100uM_ABA_Mutants_cDNA_P Parameter: Timepoint (hr) Value: 6
  misc_feature: MA Experiment 20000069 PARAMETER Experiment Name: At_100uM_ABA_Mutants_cDNA_P Parameter: Tissue Value: Aerial
  misc_feature: MA Experiment 20000069 PARAMETER Experiment Name: At_100uM_ABA_Mutants_cDNA_P Parameter: Treatment Value: 100uM ABA vs. No Treatment
  misc_feature: MA Experiment ID: 20000087 Result: Up-regulated in Transcription
  misc_feature: MA Experiment 20000087 PARAMETER Experiment Name: At_100uM_ABA_Mutants_cDNA_P Parameter: Plant Line Value: WS
  misc_feature: MA Experiment 20000087 PARAMETER Experiment Name: At_100uM_ABA_Mutants_cDNA_P Parameter: Timepoint (hr) Value: 6
  misc_feature: MA Experiment 20000087 PARAMETER Experiment Name: At_100uM_ABA_Mutants_cDNA_P Parameter: Tissue Value: Aerial
  misc_feature: MA Experiment 20000087 PARAMETER Experiment Name: At_100uM_ABA_Mutants_cDNA_P Parameter: Treatment Value: 100uM ABA vs. No Treatment
  misc_feature: MA Experiment ID: 20000089 Result: Up-regulated in Transcription
  misc_feature: MA Experiment ID: 20000090 Result: Up-regulated in Transcription
  misc_feature: MA Experiment ID: 20000112 Result: Down-regulated in Transcription
  misc_feature: MA Experiment 20000112 PARAMETER Experiment Name: At_42deg_Heat_cDNA_P Parameter: Temperature (deg C) Value: 42 vs. 22
  misc_feature: MA Experiment 20000112 PARAMETER Experiment Name: At_42deg_Heat_cDNA_P Parameter: Timepoint (hr) Value: 2
  misc_feature: MA Experiment 20000112 PARAMETER Experiment Name: At_42deg_Heat_cDNA_P Parameter: Tissue Value: Aerial
  misc_feature: MA Experiment ID: 20000117 Result: Up-regulated in Transcription
  misc_feature: MA Experiment 20000117 PARAMETER Experiment Name: At_100uM_ABA_Mutants_cDNA_P Parameter: Plant Line Value: Columbia
  misc_feature: MA Experiment 20000117 PARAMETER Experiment Name: At_100uM_ABA_Mutants_cDNA_P Parameter: Timepoint (hr) Value: 6
  misc_feature: MA Experiment 20000117 PARAMETER Experiment Name: At_100uM_ABA_Mutants_cDNA_P Parameter: Tissue Value: Aerial
  misc_feature: MA Experiment 20000117 PARAMETER Experiment Name: At_100uM_ABA_Mutants_cDNA_P Parameter: Treatment Value: 100uM ABA vs. No Treatment
  misc_feature: MA Experiment ID: 20000173 Result: Down-regulated in Transcription
  misc_feature: MA Experiment 20000173 PARAMETER Experiment Name: At_42deg_Heat_P Parameter: Age (day) Value: 14
  misc_feature: MA Experiment 20000173 PARAMETER Experiment Name: At_42deg_Heat_P Parameter: Organism Value: A. thaliana
  misc_feature: MA Experiment 20000173 PARAMETER Experiment Name: At_42deg_Heat_P Parameter: Plant Line Value: WS
  misc_feature: MA Experiment 20000173 PARAMETER Experiment Name: At_42deg_Heat_P Parameter: Temperature (deg C) Value: 42 vs. 22
  misc_feature: MA Experiment 20000173 PARAMETER Experiment Name: At_42deg_Heat_P Parameter: Timepoint (hr) Value: 6
  misc_feature: MA Experiment 20000173 PARAMETER Experiment Name: At_42deg_Heat_P Parameter: Tissue Value: Aerial
  misc_feature: MA Experiment ID: 20000180 Result: Up-regulated in Transcription
  misc_feature: MA Experiment 20000180 PARAMETER Experiment Name: At_Germinating_Seeds_P Parameter: Age (hr) Value: 24 vs. 0
  misc_feature: MA Experiment 20000180 PARAMETER Experiment Name: At_Germinating_Seeds_P Parameter: Tissue Value: Germinating Seeds
  misc_feature: MA Experiment ID: 20000213 Result: Up-regulated in Transcription
  misc_feature: MA Experiment 20000213 PARAMETER Experiment Name: At_4deg_Cold_P Parameter: Timepoint (hr) Value: 2
  misc_feature: MA Experiment ID: 20000214 Result: Up-regulated in Transcription
  misc_feature: MA Experiment 20000214 PARAMETER Experiment Name: At_4deg_Cold_P Parameter: Timepoint (hr) Value: 6
  misc_feature: MA Experiment ID: 20000234 Result: Down-regulated in Transcription
  misc_feature: MA Experiment 20000234 PARAMETER Experiment Name: At_Siliques_P Parameter: Age (day) Value: 21
  misc_feature: MA Experiment 20000234 PARAMETER Experiment Name: At_Siliques_P Parameter: Organism Value: A. thaliana
  misc_feature: MA Experiment 20000234 PARAMETER Experiment Name: At_Siliques_P Parameter: Plant Line Value: WS
  misc_feature: MA Experiment 20000234 PARAMETER Experiment Name: At_Siliques_P Parameter: Tissue Value: Less Than 5mm Siliques vs. Whole Plant
  misc_feature: MA Experiment ID: 20000264 Result: Down-regulated in Transcription
  misc_feature: MA Experiment 20000264 PARAMETER Experiment Name: At_Open_Flower_P Parameter: Age (day) Value: 21
  misc_feature: MA Experiment 20000264 PARAMETER Experiment Name: At_Open_Flower_P Parameter: Plant Line Value: WS
  misc_feature: MA Experiment 20000264 PARAMETER Experiment Name: At_Open_Flower_P Parameter: Tissue Value: Open Flower vs. Whole Plant
  misc_feature: MA Experiment ID: 20000265 Result: Down-regulated in Transcription
  misc_feature: MA Experiment 20000265 PARAMETER Experiment Name: At_Open_Flower_P Parameter: Age (day) Value: 21
  misc_feature: MA Experiment 20000265 PARAMETER Experiment Name: At_Open_Flower_P Parameter: Plant Line Value: WS
  misc_feature: MA Experiment 20000265 PARAMETER Experiment Name: At_Open_Flower_P Parameter: Tissue Value: Closed Flower vs. Whole Plant
  misc_feature: MA Experiment ID: 20000286 Result: Down-regulated in Transcription
  misc_feature: MA Experiment 20000286 PARAMETER Experiment Name: At_Open_Flower_P Parameter: Age (day) Value: 21
  misc_feature: MA Experiment 20000286 PARAMETER Experiment Name: At_Open_Flower_P Parameter: Plant Line Value: WS
  misc_feature: MA Experiment 20000286 PARAMETER Experiment Name: At_Open_Flower_P Parameter: Tissue Value: Half Open vs. Whole Plant
  misc_feature: MA Experiment ID: 20000436 Result: Up-regulated in Transcription
  misc_feature: MA Experiment 20000436 PARAMETER Experiment Name: At_Drought_P Parameter: Age (day) Value: 7
  misc_feature: MA Experiment 20000436 PARAMETER Experiment Name: At_Drought_P Parameter: Organism Value: A. thaliana
  misc_feature: MA Experiment 20000436 PARAMETER Experiment Name: At_Drought_P Parameter: Plant Line Value: WS
  misc_feature: MA Experiment 20000436 PARAMETER Experiment Name: At_Drought_P Parameter: Timepoint (hr) Value: 12
  misc_feature: MA Experiment 20000436 PARAMETER Experiment Name: At_Drought_P Parameter: Tissue Value: Whole Plant
  misc_feature: MA Experiment 20000436 PARAMETER Experiment Name: At_Drought_P Parameter: Treatment Value: Drought vs. No Drought
  misc_feature: MA Experiment ID: 20000437 Result: Up-regulated in Transcription
  misc_feature: MA Experiment 20000437 PARAMETER Experiment Name: At_Drought_P Parameter: Age (day) Value: 8
  misc_feature: MA Experiment 20000437 PARAMETER Experiment Name: At_Drought_P Parameter: Organism Value: A. thaliana
  misc_feature: MA Experiment 20000437 PARAMETER Experiment Name: At_Drought_P Parameter: Plant Line Value: WS
  misc_feature: MA Experiment 20000437 PARAMETER Experiment Name: At_Drought_P Parameter: Timepoint (hr) Value: 24
  misc_feature: MA Experiment 20000437 PARAMETER Experiment Name: At_Drought_P Parameter: Tissue Value: Whole Plant
  misc_feature: MA Experiment 20000437 PARAMETER Experiment Name: At_Drought_P Parameter: Treatment Value: Drought vs. No Drought
  misc_feature: MA Experiment ID: 20000438 Result: Down-regulated in Transcription
  misc_feature: MA Experiment 20000438 PARAMETER Experiment Name: At_Shoots__P Parameter: Age (day) Value: 14
  misc_feature: MA Experiment 20000438 PARAMETER Experiment Name: At_Shoots__P Parameter: Tissue Value: Shoots vs. Whole Plant
  misc_feature: MA Experiment ID: 20001248 Result: Up-regulated in Transcription
  misc_feature: MA Experiment 20001248 PARAMETER Experiment Name: At_Far-red-induction_P Parameter: Age (day) Value: 7
  misc_feature: MA Experiment 20001248 PARAMETER Experiment Name: At_Far-red-induction_P Parameter: Light Value: Far-red vs. White
  misc_feature: MA Experiment 20001248 PARAMETER Experiment Name: At_Far-red-induction_P Parameter: Organism Value: A. thaliana
  misc_feature: MA Experiment 20001248 PARAMETER Experiment Name: At_Far-red-induction_P Parameter: Plant Line Value: Columbia
  misc_feature: MA Experiment 20001248 PARAMETER Experiment Name: At_Far-red-induction_P Parameter: Timepoint (hr) Value: 4
  misc_feature: MA Experiment 20001248 PARAMETER Experiment Name: At_Far-red-induction_P Parameter: Tissue Value: Whole Plant
  misc_feature: MA Experiment ID: 20001450 Result: Up-regulated in Transcription
  misc_feature: MA Experiment 20001450 PARAMETER Experiment Name: At_Far-red-induction_P Parameter: Age (day) Value: 7
  misc_feature: MA Experiment 20001450 PARAMETER Experiment Name: At_Far-red-induction_P Parameter: Light Value: Far-red vs. White
  misc_feature: MA Experiment 20001450 PARAMETER Experiment Name: At_Far-red-induction_P Parameter: Organism Value: A. thaliana
  misc_feature: MA Experiment 20001450 PARAMETER Experiment Name: At_Far-red-induction_P Parameter: Plant Line Value: Columbia
  misc_feature: MA Experiment 20001450 PARAMETER Experiment Name: At_Far-red-induction_P Parameter: Timepoint (hr) Value: 8
  misc_feature: MA Experiment 20001450 PARAMETER Experiment Name: At_Far-red-induction_P Parameter: Tissue Value: Whole Plant
  misc_feature: MA Experiment ID: 20001451 Result: Up-regulated in Transcription
  misc_feature: MA Experiment 20001451 PARAMETER Experiment Name: At_Far-red-induction_P Parameter: Age (day) Value: 7
  misc_feature: MA Experiment 20001451 PARAMETER Experiment Name: At_Far-red-induction_P Parameter: Light Value: Far-red vs. White
  misc_feature: MA Experiment 20001451 PARAMETER Experiment Name: At_Far-red-induction_P Parameter: Organism Value: A. thaliana
  misc_feature: MA Experiment 20001451 PARAMETER Experiment Name: At_Far-red-induction_P Parameter: Plant Line Value: Columbia
  misc_feature: MA Experiment 20001451 PARAMETER Experiment Name: At_Far-red-induction_P Parameter: Timepoint (hr) Value: 24
  misc_feature: MA Experiment 20001451 PARAMETER Experiment Name: At_Far-red-induction_P Parameter: Tissue Value: Whole Plant
  misc_feature: MA Experiment ID: 20001555 Result: Up-regulated in Transcription
  misc_feature: MA Experiment 20001555 PARAMETER Experiment Name: At_Drought_Soil_Dry_P Parameter: Age (day) Value: 24
  misc_feature: MA Experiment 20001555 PARAMETER Experiment Name: At_Drought_Soil_Dry_P Parameter: Organism Value: A. thaliana
  misc_feature: MA Experiment 20001555 PARAMETER Experiment Name: At_Drought_Soil_Dry_P Parameter: Plant Line Value: WS
  misc_feature: MA Experiment 20001555 PARAMETER Experiment Name: At_Drought_Soil_Dry_P Parameter: Post Timepoint (hr) Value: None
  misc_feature: MA Experiment 20001555 PARAMETER Experiment Name: At_Drought_Soil_Dry_P Parameter: Post-Treatment Value: None
  misc_feature: MA Experiment 20001555 PARAMETER Experiment Name: At_Drought_Soil_Dry_P Parameter: Timepoint (day) Value: 10
  misc_feature: MA Experiment 20001555 PARAMETER Experiment Name: At_Drought_Soil_Dry_P Parameter: Treatment Value: Drought vs. No Drought
  misc_feature: MA Experiment ID: 20001558 Result: Down-regulated in Transcription
  misc_feature: MA Experiment 20001558 PARAMETER Experiment Name: At_Drought_Soil_Dry_P Parameter: Age (day) Value: 27
  misc_feature: MA Experiment 20001558 PARAMETER Experiment Name: At_Drought_Soil_Dry_P Parameter: Organism Value: A. thaliana
  misc_feature: MA Experiment 20001558 PARAMETER Experiment Name: At_Drought_Soil_Dry_P Parameter: Plant Line Value: WS
  misc_feature: MA Experiment 20001558 PARAMETER Experiment Name: At_Drought_Soil_Dry_P Parameter: Post Timepoint (hr) Value: 6
  misc_feature: MA Experiment 20001558 PARAMETER Experiment Name: At_Drought_Soil_Dry_P Parameter: Post-Treatment Value: Re-Water vs. No Drought
  misc_feature: MA Experiment 20001558 PARAMETER Experiment Name: At_Drought_Soil_Dry_P Parameter: Timepoint (day) Value: 13
  misc_feature: MA Experiment 20001558 PARAMETER Experiment Name: At_Drought_Soil_Dry_P Parameter: Treatment Value: Drought vs. No Drought
  misc_feature: MA Experiment ID: 20001559 Result: Up-regulated in Transcription
  misc_feature: MA Experiment 20001559 PARAMETER Experiment Name: At_Drought_Soil_Dry_P Parameter: Age (day) Value: 28
  misc_feature: MA Experiment 20001559 PARAMETER Experiment Name: At_Drought_Soil_Dry_P Parameter: Organism Value: A. thaliana
  misc_feature: MA Experiment 20001559 PARAMETER Experiment Name: At_Drought_Soil_Dry_P Parameter: Plant Line Value: WS
  misc_feature: MA Experiment 20001559 PARAMETER Experiment Name: At_Drought_Soil_Dry_P Parameter: Post Timepoint (hr) Value: 29
  misc_feature: MA Experiment 20001559 PARAMETER Experiment Name: At_Drought_Soil_Dry_P Parameter: Post-Treatment Value: Re-Water vs. No Drought
  misc_feature: MA Experiment 20001559 PARAMETER Experiment Name: At_Drought_Soil_Dry_P Parameter: Timepoint (day) Value: 14
  misc_feature: MA Experiment 20001559 PARAMETER Experiment Name: At_Drought_Soil_Dry_P Parameter: Treatment Value: Drought vs. No Drought
  misc_feature: MA Experiment ID: 20001560 Result: Down-regulated in Transcription
  misc_feature: MA Experiment 20001560 PARAMETER Experiment Name: At_Drought_Soil_Dry_P Parameter: Age (day) Value: 28
  misc_feature: MA Experiment 20001560 PARAMETER Experiment Name: At_Drought_Soil_Dry_P Parameter: Organism Value: A. thaliana
  misc_feature: MA Experiment 20001560 PARAMETER Experiment Name: At_Drought_Soil_Dry_P Parameter: Plant Line Value: WS
  misc_feature: MA Experiment 20001560 PARAMETER Experiment Name: At_Drought_Soil_Dry_P Parameter: Post Timepoint (hr) Value: None
  misc_feature: MA Experiment 20001560 PARAMETER Experiment Name: At_Drought_Soil_Dry_P Parameter: Post-Treatment Value: None
  misc_feature: MA Experiment 20001560 PARAMETER Experiment Name: At_Drought_Soil_Dry_P Parameter: Timepoint (day) Value: 14
  misc_feature: MA Experiment 20001560 PARAMETER Experiment Name: At_Drought_Soil_Dry_P Parameter: Treatment Value: Drought vs. No Drought
gttaaaagctctcacacaaccaccgttctccgtcacggtggcgctttattctctcatcggagcgcctcaccggtggcagacggtgtcgttgttcctctcctaaaacctccatcaatcaccatctctttacacagagctctaaccaaaatcttcgagagatggggcagagtatgagctgtggaagtcgaccggagcacggaatattcgcctctgtacagtgcggcgatatcatcactatccgtcgtgtgatggcgacggagcctagtctgttgaatcaaactactccttatgatcgtcactctgttcttcatgtcgctgctgctaatggtcagatcgagattttgtcattgcttttggaacgatttacgaatccagatttgttgaatcgtcacaagcagactccgttaatgttggctgcgatgtatggaagaatctcttgtgtgaagaagctagctgaagttggagctaatattttgatgtttgattctgtgaatcgaagaacatgtttgcattacgctgcttattatggacatgctaattgtgttcaagctattctctctgctgctcaatcaagtcctgttgctgtccattggggatatgcgagatttgtgaacataagagatgataaaggagcgactccgttgcatttagctgctcgacagagacgacctgaatgtgtgaatgttttgttggatagtggttctcttgtttgtgcatctactagtgtatatggttctccaggaagcacacctcttcatttagcagctagaagtggatctatagattgtgtcagaaagttgcttgcttggggtgctgatcgtcttcaacgagacgcttctgggagaataccttatgtggttgcgatgaagcataagcatggagcatgtggagccttacttaatccgtcctctgcagagccacttgtttggccatcaccattaaagttcatcagtgagcttaatgacgaggcgaaacttctcttagagcaggctttaatggaggctaacagggagagagagaaaaccatcctcaaaggaacagcttattccttaccatcaccctctttctctgacacggatgataacatgtccgaggtgagtgatacggaactgtgctgcatttgctttgagcaagtatgtacaattgaagttaaagactgtggtcaccaaatgtgtgcacaatgcacacttgcactgtgctgtcacaacaaaccaaacccaacgacctcaaccgtgactccaccggtctgtccgttctgtagaagcaccattgcatgtttagtcgtcgcccagaacaacaacaacaacaacgaaaagagcaaaagcctagatgatgttgttgttgttgatcgtgaggcaggtgatgttagctcctccaaattcagaaaacatagaagatcaataaaccttggcgaagaaagcagcagcttcatgggactatcaactattggatcattcggtaggataaccggccgtggctcgggaaggatcgcagccgaaaacgagctgatggacaaaccaatattgtgagggatcgattccgttttaagggacattttggggcatgggggagcaataaaaaagatgaggggatgaaattgtgagaatgtataaaatatagatgaatttatgttagatcttttgttgaagggaggaagattgaaataaggaaaaagatgtggggaggtgtgtaatgcaaggatttgttgtttctttgattaagtttggcccaaaattgtttgttgttacttgatatgaaagggaaacccataatctc

SEQ ID NO: 21329 - protein, 456 aa, Arabidopsis thaliana
  peptide (1)..(456): Ceres Seq. ID no. 12334197
  misc_feature (112)..(145): Pfam Name: Ankyrin repeat Pfam Description: Ankyrin repeat
  misc_feature (315)..(371): Homolog of NCBI NO: 15240746 NR Description: putative protein; protein id: At5g07270.1
  misc_feature (1)..(207): Homolog of NCBI NO: 15240746 NR Description: putative protein; protein id: At5g07270.1
  misc_feature (1)..(134): Homolog of NCBI NO: 37573164 NR Description: receptor-like kinase Xa21-binding protein 3-like
  misc_feature (125)..(429): Homolog of NCBI NO: 37573164 NR Description: receptor-like kinase Xa21-binding protein 3-like
  misc_feature (279)..(454): Homolog of NCBI NO: 25044835 NR Description: RING zinc finger protein [Ananas comosus]
  misc_feature (1)..(216): Homolog of NCBI NO: 16226319 NR Description: At2g28840/F8N16.13 [Arabidopsis thaliana]
  misc_feature (1)..(389): Homolog of NCBI NO: 34906062 NR Description: putative receptor-like kinase Xa21-binding
  misc_feature (1)..(454): Homolog of NCBI NO: 14279688 NR Description: receptor-like kinase Xa21-binding protein 3
  misc_feature (31)..(456): Homolog of NCBI NO: 25408016 NR Description: probable RING zinc finger ankyrin protein
  misc_feature (1)..(456): Homolog of NCBI NO: 30684032 NR Description: RING zinc finger ankyrin protein -related
MGQSMSCGSRPEHGIFASVQCGDIITIRRVMATEPSLLNQTTPYDRHSVLHVAAANGQIEILSLLLERFTNPDLLNRHKQTPLMLAAMYGRISCVKKLAEVGANILMFDSVNRRTCLHYAAYYGHANCVQAILSAAQSSPVAVHWGYARFVNIRDDKGATPLHLAARQRRPECVNVLLDSGSLVCASTSVYGSPGSTPLHLAARSGSIDCVRKLLAWGADRLQRDASGRIPYVVAMKHKHGACGALLNPSSAEPLVWPSPLKFISELNDEAKLLLEQALMEANREREKTILKGTAYSLPSPSFSDTDDNMSEVSDTELCCICFEQVCTIEVKDCGHQMCAQCTLALCCHNKPNPTTSTVTPPVCPFCRSTIACLVVAQNNNNNNEKSKSLDDVVVVDREAGDVSSSKFRKHRRSINLGEESSSFMGLSTIGSFGRITGRGSGRIAAENELMDKPIL

SEQ ID NO: 21330 - protein, 452 aa, Arabidopsis thaliana
  peptide (1)..(452): Ceres Seq. ID no. 12334198
  misc_feature (108)..(141): Pfam Name: Ankyrin repeat Pfam Description: Ankyrin repeat
  misc_feature (311)..(367): Homolog of NCBI NO: 15240746 NR Description: putative protein; protein id: At5g07270.1
  misc_feature (1)..(203): Homolog of NCBI NO: 15240746 NR Description: putative protein; protein id: At5g07270.1
  misc_feature (1)..(130): Homolog of NCBI NO: 37573164 NR Description: receptor-like kinase Xa21-binding protein 3-like
  misc_feature (121)..(425): Homolog of NCBI NO: 37573164 NR Description: receptor-like kinase Xa21-binding protein 3-like
  misc_feature (275)..(450): Homolog of NCBI NO: 25044835 NR Description: RING zinc finger protein [Ananas comosus]
  misc_feature (1)..(212): Homolog of NCBI NO: 16226319 NR Description: At2g28840/F8N16.13 [Arabidopsis thaliana]
  misc_feature (1)..(385): Homolog of NCBI NO: 34906062 NR Description: putative receptor-like kinase Xa21-binding
  misc_feature (1)..(450): Homolog of NCBI NO: 14279688 NR Description: receptor-like kinase Xa21-binding protein 3
  misc_feature (27)..(452): Homolog of NCBI NO: 25408016 NR Description: probable RING zinc finger ankyrin protein
  misc_feature (1)..(452): Homolog of NCBI NO: 30684032 NR Description: RING zinc finger ankyrin protein -related
MSCGSRPEHGIFASVQCGDIITIRRVMATEPSLLNQTTPYDRHSVLHVAAANGQIEILSLLLERFTNPDLLNRHKQTPLMLAAMYGRISCVKKLAEVGANILMFDSVNRRTCLHYAAYYGHANCVQAILSAAQSSPVAVHWGYARFVNIRDDKGATPLHLAARQRRPECVNVLLDSGSLVCASTSVYGSPGSTPLHLAARSGSIDCVRKLLAWGADRLQRDASGRIPYVVAMKHKHGACGALLNPSSAEPLVWPSPLKFISELNDEAKLLLEQALMEANREREKTILKGTAYSLPSPSFSDTDDNMSEVSDTELCCICFEQVCTIEVKDCGHQMCAQCTLALCCHNKPNPTTSTVTPPVCPFCRSTIACLVVAQNNNNNNEKSKSLDDVVVVDREAGDVSSSKFRKHRRSINLGEESSSFMGLSTIGSFGRITGRGSGRIAAENELMDKPIL

SEQ ID NO: 21331 - protein, 426 aa, Arabidopsis thaliana
  peptide (1)..(426): Ceres Seq. ID no. 12334199
  misc_feature (82)..(115): Pfam Name: Ankyrin repeat Pfam Description: Ankyrin repeat
  misc_feature (285)..(341): Homolog of NCBI NO: 15240746 NR Description: putative protein; protein id: At5g07270.1
  misc_feature (1)..(177): Homolog of NCBI NO: 15240746 NR Description: putative protein; protein id: At5g07270.1
  misc_feature (1)..(104): Homolog of NCBI NO: 37573164 NR Description: receptor-like kinase Xa21-binding protein 3-like
  misc_feature (95)..(399): Homolog of NCBI NO: 37573164 NR Description: receptor-like kinase Xa21-binding protein 3-like
  misc_feature (249)..(424): Homolog of NCBI NO: 25044835 NR Description: RING zinc finger protein [Ananas comosus]
  misc_feature (1)..(186): Homolog of NCBI NO: 16226319 NR Description: At2g28840/F8N16.13 [Arabidopsis thaliana]
  misc_feature (1)..(359): Homolog of NCBI NO: 34906062 NR Description: putative receptor-like kinase Xa21-binding
  misc_feature (1)..(424): Homolog of NCBI NO: 14279688 NR Description: receptor-like kinase Xa21-binding protein 3
  misc_feature (1)..(426): Homolog of NCBI NO: 25408016 NR Description: probable RING zinc finger ankyrin protein
  misc_feature (1)..(426): Homolog of NCBI NO: 30684032 NR Description: RING zinc finger ankyrin protein -related
MATEPSLLNQTTPYDRHSVLHVAAANGQIEILSLLLERFTNPDLLNRHKQTPLMLAAMYGRISCVKKLAEVGANILMFDSVNRRTCLHYAAYYGHANCVQAILSAAQSSPVAVHWGYARFVNIRDDKGATPLHLAARQRRPECVNVLLDSGSLVCASTSVYGSPGSTPLHLAARSGSIDCVRKLLAWGADRLQRDASGRIPYVVAMKHKHGACGALLNPSSAEPLVWPSPLKFISELNDEAKLLLEQALMEANREREKTILKGTAYSLPSPSFSDTDDNMSEVSDTELCCICFEQVCTIEVKDCGHQMCAQCTLALCCHNKPNPTTSTVTPPVCPFCRSTIACLVVAQNNNNNNEKSKSLDDVVVVDREAGDVSSSKFRKHRRSINLGEESSSFMGLSTIGSFGRITGRGSGRIAAENELMDKPIL

SEQ ID NO: 21332 - DNA, 1311 bp, Arabidopsis thaliana
  misc_feature (1)..(1311): Ceres Seq. ID no. 13489810
  misc_feature: MA Experiment ID: 108462 Result: Down-regulated in Transcription
  misc_feature: MA Experiment 108462 PARAMETER Experiment Name: At_Germinating_Seeds_cDNA_P Parameter: Age (day) Value: 2 vs. 0
  misc_feature: MA Experiment 108462 PARAMETER Experiment Name: At_Germinating_Seeds_cDNA_P Parameter: Tissue Value: Germinating Seeds
  misc_feature: MA Experiment ID: 108463 Result: Down-regulated in Transcription
  misc_feature: MA Experiment 108463 PARAMETER Experiment Name: At_Germinating_Seeds_cDNA_P Parameter: Age (day) Value: 3 vs. 0
  misc_feature: MA Experiment 108463 PARAMETER Experiment Name: At_Germinating_Seeds_cDNA_P Parameter: Tissue Value: Germinating Seeds
  misc_feature: MA Experiment ID: 108464 Result: Down-regulated in Transcription
  misc_feature: MA Experiment 108464 PARAMETER Experiment Name: At_Germinating_Seeds_cDNA_P Parameter: Age (day) Value: 4 vs. 0
  misc_feature: MA Experiment 108464 PARAMETER Experiment Name: At_Germinating_Seeds_cDNA_P Parameter: Tissue Value: Germinating Seeds
  misc_feature: MA Experiment ID: 108573 Result: Up-regulated in Transcription
  misc_feature: MA Experiment 108573 PARAMETER Experiment Name: At_Drought_cDNA_P Parameter: Timepoint (hr) Value: 6
  misc_feature: MA Experiment 108573 PARAMETER Experiment Name: At_Drought_cDNA_P Parameter: Tissue Value: Aerial
  misc_feature: MA Experiment 108573 PARAMETER Experiment Name: At_Drought_cDNA_P Parameter: Treatment Value: Drought vs. No Drought
  misc_feature: MA Experiment ID: 108585 Result: Down-regulated in Transcription
  misc_feature: MA Experiment 108585 PARAMETER Experiment Name: At_5mM_NaNP_cDNA_P Parameter: Timepoint (hr) Value: 6
  misc_feature: MA Experiment 108585 PARAMETER Experiment Name: At_5mM_NaNP_cDNA_P Parameter: Tissue Value: Aerial
  misc_feature: MA Experiment 108585 PARAMETER Experiment Name: At_5mM_NaNP_cDNA_P Parameter: Treatment Value: null
  misc_feature: MA Experiment ID: 108595 Result: Down-regulated in Transcription
  misc_feature: MA Experiment 108595 PARAMETER Experiment Name: At_Ler-pi_Ovule_cDNA_P Parameter: Plant Line Value: null
  misc_feature: MA Experiment ID: 108607 Result: Down-regulated in Transcription
  misc_feature: MA Experiment 108607 PARAMETER Experiment Name: At_100uM_ABA_cDNA_P Parameter: Timepoint (hr) Value: 4
  misc_feature: MA Experiment 108607 PARAMETER Experiment Name: At_100uM_ABA_cDNA_P Parameter: Tissue Value: Aerial
  misc_feature: MA Experiment 108607 PARAMETER Experiment Name: At_100uM_ABA_cDNA_P Parameter: Treatment Value: 100uM ABA vs. No Treatment
  misc_feature: MA Experiment ID: 108668 Result: Down-regulated in Transcription
  misc_feature: MA Experiment 108668 PARAMETER Experiment Name: At_2mM_SA_cDNA_P Parameter: Plant Line Value: WS
  misc_feature: MA Experiment 108668 PARAMETER Experiment Name: At_2mM_SA_cDNA_P Parameter: Timepoint (hr) Value: 6
  misc_feature: MA Experiment 108668 PARAMETER Experiment Name: At_2mM_SA_cDNA_P Parameter: Treatment Value: 2mM SA vs. No Treatment
  misc_feature: MA Experiment ID: 20000069 Result: Up-regulated in Transcription
  misc_feature: MA Experiment 20000069 PARAMETER Experiment Name: At_100uM_ABA_Mutants_cDNA_P Parameter: Plant Line Value: CS23
  misc_feature: MA Experiment 20000069 PARAMETER Experiment Name: At_100uM_ABA_Mutants_cDNA_P Parameter: Timepoint (hr) Value: 6
  misc_feature: MA Experiment 20000069 PARAMETER Experiment Name: At_100uM_ABA_Mutants_cDNA_P Parameter: Tissue Value: Aerial
  misc_feature: MA Experiment 20000069 PARAMETER Experiment Name: At_100uM_ABA_Mutants_cDNA_P Parameter: Treatment Value: 100uM ABA vs. No Treatment
  misc_feature: MA Experiment ID: 20000070 Result: Up-regulated in Transcription
  misc_feature: MA Experiment 20000070 PARAMETER Experiment Name: At_100uM_ABA_Mutants_cDNA_P Parameter: Plant Line Value: CS24
  misc_feature: MA Experiment 20000070 PARAMETER Experiment Name: At_100uM_ABA_Mutants_cDNA_P Parameter: Timepoint (hr) Value: 6
  misc_feature: MA Experiment 20000070 PARAMETER Experiment Name: At_100uM_ABA_Mutants_cDNA_P Parameter: Tissue Value: Aerial
  misc_feature: MA Experiment 20000070 PARAMETER Experiment Name: At_100uM_ABA_Mutants_cDNA_P Parameter: Treatment Value: 100uM ABA vs. No Treatment
  misc_feature: MA Experiment ID: 20000071 Result: Up-regulated in Transcription
  misc_feature: MA Experiment 20000071 PARAMETER Experiment Name: At_100uM_ABA_Mutants_cDNA_P Parameter: Plant Line Value: CS8104
  misc_feature: MA Experiment 20000071 PARAMETER Experiment Name: At_100uM_ABA_Mutants_cDNA_P Parameter: Timepoint (hr) Value: 6
  misc_feature: MA Experiment 20000071 PARAMETER Experiment Name: At_100uM_ABA_Mutants_cDNA_P Parameter: Tissue Value: Aerial
  misc_feature: MA Experiment 20000071 PARAMETER Experiment Name: At_100uM_ABA_Mutants_cDNA_P Parameter: Treatment Value: 100uM ABA vs. No Treatment
  misc_feature: MA Experiment ID: 20000072 Result: Up-regulated in Transcription
  misc_feature: MA Experiment 20000072 PARAMETER Experiment Name: At_100uM_ABA_Mutants_cDNA_P Parameter: Plant Line Value: CS8105
  misc_feature: MA Experiment 20000072 PARAMETER Experiment Name: At_100uM_ABA_Mutants_cDNA_P Parameter: Timepoint (hr) Value: 6
  misc_feature: MA Experiment 20000072 PARAMETER Experiment Name: At_100uM_ABA_Mutants_cDNA_P Parameter: Tissue Value: Aerial
  misc_feature: MA Experiment 20000072 PARAMETER Experiment Name: At_100uM_ABA_Mutants_cDNA_P Parameter: Treatment Value: 100uM ABA vs. No Treatment
  misc_feature: MA Experiment ID: 20000086 Result: Up-regulated in Transcription
  misc_feature: MA Experiment 20000086 PARAMETER Experiment Name: At_100uM_ABA_Mutants_cDNA_P Parameter: Plant Line Value: CS22
  misc_feature: MA Experiment 20000086 PARAMETER Experiment Name: At_100uM_ABA_Mutants_cDNA_P Parameter: Timepoint (hr) Value: 6
  misc_feature: MA Experiment 20000086 PARAMETER Experiment Name: At_100uM_ABA_Mutants_cDNA_P Parameter: Tissue Value: Aerial
  misc_feature: MA Experiment 20000086 PARAMETER Experiment Name: At_100uM_ABA_Mutants_cDNA_P Parameter: Treatment Value: 100uM ABA vs. No Treatment
  misc_feature: MA Experiment ID: 20000088 Result: Up-regulated in Transcription
  misc_feature: MA Experiment 20000088 PARAMETER Experiment Name: At_100uM_ABA_Mutants_cDNA_P Parameter: Plant Line Value: Landsberg
  misc_feature: MA Experiment 20000088 PARAMETER Experiment Name: At_100uM_ABA_Mutants_cDNA_P Parameter: Timepoint (hr) Value: 6
  misc_feature: MA Experiment 20000088 PARAMETER Experiment Name: At_100uM_ABA_Mutants_cDNA_P Parameter: Tissue Value: Aerial
  misc_feature: MA Experiment 20000088 PARAMETER Experiment Name: At_100uM_ABA_Mutants_cDNA_P Parameter: Treatment Value: 100uM ABA vs. No Treatment
  misc_feature: MA Experiment ID: 20000089 Result: Up-regulated in Transcription
  misc_feature: MA Experiment ID: 20000090 Result: Up-regulated in Transcription
  misc_feature: MA Experiment ID: 20000111 Result: Down-regulated in Transcription
  misc_feature: MA Experiment 20000111 PARAMETER Experiment Name: At_42deg_Heat_cDNA_P Parameter: Temperature (deg C) Value: 42 vs. 22
  misc_feature: MA Experiment 20000111 PARAMETER Experiment Name: At_42deg_Heat_cDNA_P Parameter: Timepoint (hr) Value: 6
  misc_feature: MA Experiment 20000111 PARAMETER Experiment Name: At_42deg_Heat_cDNA_P Parameter: Tissue Value: Aerial
  misc_feature: MA Experiment ID: 20000117 Result: Up-regulated in Transcription
  misc_feature: MA Experiment 20000117 PARAMETER Experiment Name: At_100uM_ABA_Mutants_cDNA_P Parameter: Plant Line Value: Columbia
  misc_feature: MA Experiment 20000117 PARAMETER Experiment Name: At_100uM_ABA_Mutants_cDNA_P Parameter: Timepoint (hr) Value: 6
  misc_feature: MA Experiment 20000117 PARAMETER Experiment Name: At_100uM_ABA_Mutants_cDNA_P Parameter: Tissue Value: Aerial
  misc_feature: MA Experiment 20000117 PARAMETER Experiment Name: At_100uM_ABA_Mutants_cDNA_P Parameter: Treatment Value: 100uM ABA vs. No Treatment
  misc_feature: MA Experiment ID: 20000314 Result: Down-regulated in Transcription
  misc_feature: MA Experiment 20000314 PARAMETER Experiment Name: At_14day_Shoots-Roots_Sub_P Parameter: Age (day) Value: 14
  misc_feature: MA Experiment 20000314 PARAMETER Experiment Name: At_14day_Shoots-Roots_Sub_P Parameter: Organism Value: A. thaliana
  misc_feature: MA Experiment 20000314 PARAMETER Experiment Name: At_14day_Shoots-Roots_Sub_P Parameter: Plant Line Value: WS
  misc_feature: MA Experiment 20000314 PARAMETER Experiment Name: At_14day_Shoots-Roots_Sub_P Parameter: Tissue Value: Roots vs. Whole Plant
  misc_feature: MA Experiment ID: 20000315 Result: Down-regulated in Transcription
  misc_feature: MA Experiment 20000315 PARAMETER Experiment Name: At_14day_Shoots-Roots_Sub_P Parameter: Age (day) Value: 14
  misc_feature: MA Experiment 20000315 PARAMETER Experiment Name: At_14day_Shoots-Roots_Sub_P Parameter: Organism Value: A. thaliana
  misc_feature: MA Experiment 20000315 PARAMETER Experiment Name: At_14day_Shoots-Roots_Sub_P Parameter: Plant Line Value: WS
  misc_feature: MA Experiment 20000315 PARAMETER Experiment Name: At_14day_Shoots-Roots_Sub_P Parameter: Tissue Value: Shoots vs. Whole Plant
  misc_feature: MA Experiment ID: 20000328 Result: Down-regulated in Transcription
  misc_feature: MA Experiment 20000328 PARAMETER Experiment Name: At_42deg_Heat_Sub_P Parameter: Age (day) Value: 14
  misc_feature: MA Experiment 20000328 PARAMETER Experiment Name: At_42deg_Heat_Sub_P Parameter: Organism Value: A. thaliana
  misc_feature: MA Experiment 20000328 PARAMETER Experiment Name: At_42deg_Heat_Sub_P Parameter: Plant Line Value: WS
  misc_feature: MA Experiment 20000328 PARAMETER Experiment Name: At_42deg_Heat_Sub_P Parameter: Temperature (deg C) Value: 42 vs. 22
  misc_feature: MA Experiment 20000328 PARAMETER Experiment Name: At_42deg_Heat_Sub_P Parameter: Timepoint (hr) Value: 6
  misc_feature: MA Experiment 20000328 PARAMETER Experiment Name: At_42deg_Heat_Sub_P Parameter: Tissue Value: Aerial
actgcaaattttgatattttgggttttagcagtgaagtttgcgaaaatggcgtcttcggtttttctatccagtttctcgtcatcgtcttctttgcaactctgctcttcctttcacggcgagtacttagctccgtcgagatgctttctcggagctccggtcacttcctcttctttatcactctccggtaagaagaactcatattctccgagacagttccatgtttctgccaagaaagtttctgggttagaggaagccattagaatcagaaaaatgagagagcttgaaactaaatcaaaagttaggagaaatccaccattaagacgtggaagagtatcgcctcgtcttcttgtacctgatcacattccaaggcctccttatgttgagtctggtgtattaccggatatatcaagtgagttccagattcctggtcctgaaggcattgcgaaaatgagagctgcttgcgagcttgctgctcgggttttaaactatgctggaactttggttaagccatctgttacgactaatgaaatcgataaagctgtgcatgatatgattattgaagctggtgcttatccttcacctcttggatatggtggatttcctaaaagtgtgtgtacttcagttaatgagtgtatgtgtcacggaataccagattctcgccagctacagagcggggatataatcaacatcgatgtcacggtttacttggatggttaccatggagatacgtcgagaactttcttctgtggagaagttgacgaaggtttcaaacgacttgtgaaggttacggaagaatgtttggagagaggtattgcagtttgtaaagacggagcaagcttcaagaaaatcgggaaaagaatcagtgagcatgcggaaaagttcggctacaacgttgtggagcggtttgttgggcatggtgttggaccagtattccactccgaacctcttatatatcattaccgaaatgatgagcctggactaatggttgagggacagacattcacaattgaaccgattctcacgattggaaccacagaatgtgtaacatggccagacaactggactactctgacagcagatggtggcgtcgctgctcagtttgagcataccattctgattactagaactggttcagagattcttaccaaatgctaaaactattcacattgatcatttccatttcaccttttatttgctgatcatttaaggtccatagtataaattcattatctttgagaccatagtctaacaatttgtgttagtgccatcttttaagatctcaagattagtttgctattaaaaattttccc

SEQ ID NO: 21333 - protein, 384 aa, Arabidopsis thaliana
  peptide (1)..(384): Ceres Seq. ID no. 13489811
  misc_feature (105)..(382): Homolog of NCBI NO: 23018702 NR Description: hypothetical protein [Thermobifida fusca]
  misc_feature (106)..(384): Homolog of NCBI NO: 25289731 NR Description: methionyl aminopeptidase-like protein
  misc_feature (73)..(384): Homolog of NCBI NO: 18419957 NR Description: methionyl aminopeptidase-related protein
  misc_feature (48)..(383): Homolog of NCBI NO: 34394646 NR Description: putative methionine aminopeptidase I (MAP1)
  misc_feature (59)..(384): Homolog of NCBI NO: 38345794 NR Description: OSJNBa0085I10.11 [Oryza sativa (japonica
  misc_feature (74)..(382): Homolog of NCBI NO: 11320958 NR Description: methionine aminopeptidase-like protein
  misc_feature (74)..(382): Homolog of NCBI NO: 15230872 NR Description: methionine aminopeptidase -related [Arabidopsis
  misc_feature (74)..(382): Homolog of NCBI NO: 7939560 NR Description: methionine aminopeptidase-like protein
  misc_feature (16)..(384): Homolog of NCBI NO: 11320956 NR Description: methionine aminopeptidase-like protein
  misc_feature (16)..(384): Homolog of NCBI NO: 15222218 NR Description: methionine aminopeptidase I (MAP1) -related
LQILIFWVLAVKFAKMASSVFLSSFSSSSSLQLCSSFHGEYLAPSRCFLGAPVTSSSLSLSGKKNSYSPRQFHVSAKKVSGLEEAIRIRKMRELETKSKVRRNPPLRRGRVSPRLLVPDHIPRPPYVESGVLPDISSEFQIPGPEGIAKMRAACELAARVLNYAGTLVKPSVTTNEIDKAVHDMIIEAGAYPSPLGYGGFPKSVCTSVNECMCHGIPDSRQLQSGDIINIDVTVYLDGYHGDTSRTFFCGEVDEGFKRLVKVTEECLERGIAVCKDGASFKKIGKRISEHAEKFGYNVVERFVGHGVGPVFHSEPLIYHYRNDEPGLMVEGQTFTIEPILTIGTTECVTWPDNWTTLTADGGVAAQFEHTILITRTGSEILTKC

SEQ ID NO: 21334 - protein, 369 aa, Arabidopsis thaliana
  peptide (1)..(369): Ceres Seq. ID no. 13489812
  misc_feature (90)..(367): Homolog of NCBI NO: 23018702 NR Description: hypothetical protein [Thermobifida fusca]
  misc_feature (91)..(369): Homolog of NCBI NO: 25289731 NR Description: methionyl aminopeptidase-like protein
  misc_feature (58)..(369): Homolog of NCBI NO: 18419957 NR Description: methionyl aminopeptidase-related protein
  misc_feature (33)..(368): Homolog of NCBI NO: 34394646 NR Description: putative methionine aminopeptidase I (MAP1)
  misc_feature (44)..(369): Homolog of NCBI NO: 38345794 NR Description: OSJNBa0085I10.11 [Oryza sativa (japonica
  misc_feature (59)..(367): Homolog of NCBI NO: 11320958 NR Description: methionine aminopeptidase-like protein
  misc_feature (59)..(367): Homolog of NCBI NO: 15230872 NR Description: methionine aminopeptidase -related [Arabidopsis
  misc_feature (59)..(367): Homolog of NCBI NO: 7939560 NR Description: methionine aminopeptidase-like protein
  misc_feature (1)..(369): Homolog of NCBI NO: 11320956 NR Description: methionine aminopeptidase-like protein
  misc_feature (1)..(369): Homolog of NCBI NO: 15222218 NR Description: methionine aminopeptidase I (MAP1) -related
MASSVFLSSFSSSSSLQLCSSFHGEYLAPSRCFLGAPVTSSSLSLSGKKNSYSPRQFHVSAKKVSGLEEAIRIRKMRELETKSKVRRNPPLRRGRVSPRLLVPDHIPRPPYVESGVLPDISSEFQIPGPEGIAKMRAACELAARVLNYAGTLVKPSVTTNEIDKAVHDMIIEAGAYPSPLGYGGFPKSVCTSVNECMCHGIPDSRQLQSGDIINIDVTVYLDGYHGDTSRTFFCGEVDEGFKRLVKVTEECLERGIAVCKDGASFKKIGKRISEHAEKFGYNVVERFVGHGVGPVFHSEPLIYHYRNDEPGLMVEGQTFTIEPILTIGTTECVTWPDNWTTLTADGGVAAQFEHTILITRTGSEILTKC

SEQ ID NO: 21335 - protein, 294 aa, Arabidopsis thaliana
  peptide (1)..(294): Ceres Seq. ID no. 13489813
  misc_feature (15)..(292): Homolog of NCBI NO: 23018702 NR Description: hypothetical protein [Thermobifida fusca]
  misc_feature (16)..(294): Homolog of NCBI NO: 25289731 NR Description: methionyl aminopeptidase-like protein
  misc_feature (1)..(294): Homolog of NCBI NO: 18419957 NR Description: methionyl aminopeptidase-related protein
  misc_feature (1)..(293): Homolog of NCBI NO: 34394646 NR Description: putative methionine aminopeptidase I (MAP1)
  misc_feature (1)..(294): Homolog of NCBI NO: 38345794 NR Description: OSJNBa0085I10.11 [Oryza sativa (japonica
  misc_feature (1)..(292): Homolog of NCBI NO: 11320958 NR Description: methionine aminopeptidase-like protein
  misc_feature (1)..(292): Homolog of NCBI NO: 15230872 NR Description: methionine aminopeptidase -related [Arabidopsis
  misc_feature (1)..(292): Homolog of NCBI NO: 7939560 NR Description: methionine aminopeptidase-like protein
  misc_feature (1)..(294): Homolog of NCBI NO: 11320956 NR Description: methionine aminopeptidase-like protein
  misc_feature (1)..(294): Homolog of NCBI NO: 15222218 NR Description: methionine aminopeptidase I (MAP1) -related
MRELETKSKVRRNPPLRRGRVSPRLLVPDHIPRPPYVESGVLPDISSEFQIPGPEGIAKMRAACELAARVLNYAGTLVKPSVTTNEIDKAVHDMIIEAGAYPSPLGYGGFPKSVCTSVNECMCHGIPDSRQLQSGDIINIDVTVYLDGYHGDTSRTFFCGEVDEGFKRLVKVTEECLERGIAVCKDGASFKKIGKRISEHAEKFGYNVVERFVGHGVGPVFHSEPLIYHYRNDEPGLMVEGQTFTIEPILTIGTTECVTWPDNWTTLTADGGVAAQFEHTILITRTGSEILTKC

SEQ ID NO: 21336 - DNA, 973 bp, Arabidopsis thaliana
  misc_feature (1)..(973): Ceres Seq. ID no. 12420547
  misc_feature: MA Experiment ID: 20000441 Result: Down-regulated in Transcription
  misc_feature: MA Experiment 20000441 PARAMETER Experiment Name: At_1uM_BR-BRZ__P Parameter: Tissue Value: Shoot Apices
  misc_feature: MA Experiment 20000441 PARAMETER Experiment Name: At_1uM_BR-BRZ__P Parameter: Treatment Value: 1uM BR vs. No Treatment
  misc_feature: MA Experiment ID: 20000443 Result: Down-regulated in Transcription
  misc_feature: MA Experiment 20000443 PARAMETER Experiment Name: At_1uM_BR-BRZ__P Parameter: Tissue Value: Shoot Apices
  misc_feature: MA Experiment 20000443 PARAMETER Experiment Name: At_1uM_BR-BRZ__P Parameter: Treatment Value: 1uM BRZ vs. No Treatment
aatttccatcaaattatttttcttttccttcttatgtaaattattccttatctatccaaattcgtcttcttgagtgaatttttaaagcgaatctcgacaaaactagctctcaaaaggggttttgggagttaccttttgtttctcagattttcccacattttcttggaagtaactgaaatggtgagaggaaagatcgaaatcaagaagattgagaacgtgacaagtagacaagtcacgttttcgaagcgaaggagtggtctctttaagaaggctcatgagctttctgttctatgtgatgctcaagtggcagctatgatcttctctcagaaaggaagattatatgaattcgctagctccgatatcaggaacacgataaagcgatacgctgagtacaagagagagtatttcgttgcagaaactcatcctatagagcaatacgtgcaggggctaaagaaggaaatggtgacaatggtgaaaaagattgaagtgcttgaagtccataaccggaagatgatgggacaaagtttggattcttgttcggtaaaagaactttcagagatagccacacaaatagagaaaagccttcatatggttagattaagaaaggctaagttatatgaagatgagctacagaaactaaaagccaaggagaggcaactcaaggacgagagagtcaggctttctctaaaggttggagaaagaccaatggggatgccgtcgggaagcaaagagaaagaggatgttgaaactgatctatttattggatttctgaagaaccgaccataaaatcgtccttggtcattaaacgtcatttctagctatctatctcaattaatgttatgtatatgagtaatagtgtttcaaaatttcaatcacttgtctttttgtataaactcagaataatgtaatgtgtaagagttctaactatgcttttgtttgtggatgtaatgtaatgtaaactcttaagtttctg

SEQ ID NO: 21337 - protein, 202 aa, Arabidopsis thaliana
  peptide (1)..(202): Ceres Seq. ID no. 12420548
  misc_feature (85)..(171): Pfam Name: K-box region Pfam Description: K-box region
  misc_feature (1)..(202): Homolog of NCBI NO: 13384066 NR Description: MADS-box transcription factor FBP28 [Petunia x
  misc_feature (1)..(196): Homolog of NCBI NO: 30171307 NR Description: MADS-box protein [Brassica rapa subsp. pekinensis]
  misc_feature (1)..(196): Homolog of NCBI NO: 30575598 NR Description: SOC1-like floral activator MADS3 [Eucalyptus
  misc_feature (1)..(196): Homolog of NCBI NO: 30983946 NR Description: SOC1-like floral activator [Eucalyptus
  misc_feature (1)..(196): Homolog of NCBI NO: 30575600 NR Description: SOC1-like floral activator MADS4 [Eucalyptus
  misc_feature (1)..(145): Homolog of NCBI NO: 30696115 NR Description: MADS-box protein [Arabidopsis thaliana]
  misc_feature (1)..(196): Homolog of NCBI NO: 13384058 NR Description: MADS-box transcription factor FBP22 [Petunia x
  misc_feature (1)..(201): Homolog of NCBI NO: 18424559 NR Description: MADS-box protein
  misc_feature (1)..(196): Homolog of NCBI NO: 8809681 NR Description: MADS box transcription factor-like [Arabidopsis
  misc_feature (1)..(202): Homolog of NCBI NO: 15242208 NR Description: MADS-box protein; protein id: At5g51860.1
MVRGKIEIKKIENVTSRQVTFSKRRSGLFKKAHELSVLCDAQVAAMIFSQKGRLYEFASSDIRNTIKRYAEYKREYFVAETHPIEQYVQGLKKEMVTMVKKIEVLEVHNRKMMGQSLDSCSVKELSEIATQIEKSLHMVRLRKAKLYEDELQKLKAKERQLKDERVRLSLKVGERPMGMPSGSKEKEDVETDLFIGFLKNRP

SEQ ID NO: 21338 - protein, 157 aa, Arabidopsis thaliana
  peptide (1)..(157): Ceres Seq. ID no. 12420549
  misc_feature (40)..(126): Pfam Name: K-box region Pfam Description: K-box region
  misc_feature (1)..(151): Homolog of NCBI NO: 30171307 NR Description: MADS-box protein [Brassica rapa subsp. pekinensis]
  misc_feature (1)..(151): Homolog of NCBI NO: 30575598 NR Description: SOC1-like floral activator MADS3 [Eucalyptus
  misc_feature (1)..(151): Homolog of NCBI NO: 30983946 NR Description: SOC1-like floral activator [Eucalyptus
  misc_feature (1)..(151): Homolog of NCBI NO: 30575600 NR Description: SOC1-like floral activator MADS4 [Eucalyptus
  misc_feature (1)..(100): Homolog of NCBI NO: 30696115 NR Description: MADS-box protein [Arabidopsis thaliana]
  misc_feature (1)..(157): Homolog of NCBI NO: 13384066 NR Description: MADS-box transcription factor FBP28 [Petunia x
  misc_feature (1)..(151): Homolog of NCBI NO: 13384058 NR Description: MADS-box transcription factor FBP22 [Petunia x
  misc_feature (1)..(156): Homolog of NCBI NO: 18424559 NR Description: MADS-box protein
  misc_feature (1)..(151): Homolog of NCBI NO: 8809681 NR Description: MADS box transcription factor-like [Arabidopsis
  misc_feature (1)..(157): Homolog of NCBI NO: 15242208 NR Description: MADS-box protein; protein id: At5g51860.1
MIFSQKGRLYEFASSDIRNTIKRYAEYKREYFVAETHPIEQYVQGLKKEMVTMVKKIEVLEVHNRKMMGQSLDSCSVKELSEIATQIEKSLHMVRLRKAKLYEDELQKLKAKERQLKDERVRLSLKVGERPMGMPSGSKEKEDVETDLFIGFLKNRP

SEQ ID NO: 21339 - protein, 108 aa, Arabidopsis thaliana
  peptide (1)..(108): Ceres Seq. ID no. 12420550
  misc_feature (1)..(77): Pfam Name: K-box region Pfam Description: K-box region
  misc_feature (1)..(108): Homolog of NCBI NO: 13384066 NR Description: MADS-box transcription factor FBP28 [Petunia x
  misc_feature (1)..(102): Homolog of NCBI NO: 30171307 NR Description: MADS-box protein [Brassica rapa subsp. pekinensis]
  misc_feature (1)..(102): Homolog of NCBI NO: 30575598 NR Description: SOC1-like floral activator MADS3 [Eucalyptus
  misc_feature (1)..(102): Homolog of NCBI NO: 30983946 NR Description: SOC1-like floral activator [Eucalyptus
  misc_feature (1)..(102): Homolog of NCBI NO: 30575600 NR Description: SOC1-like floral activator MADS4 [Eucalyptus
  misc_feature (1)..(51): Homolog of NCBI NO: 30696115 NR Description: MADS-box protein [Arabidopsis thaliana]
  misc_feature (1)..(102): Homolog of NCBI NO: 13384058 NR Description: MADS-box transcription factor FBP22 [Petunia x
  misc_feature (1)..(107): Homolog of NCBI NO: 18424559 NR Description: MADS-box protein
  misc_feature (1)..(102): Homolog of NCBI NO: 8809681 NR Description: MADS box transcription factor-like [Arabidopsis
  misc_feature (1)..(108): Homolog of NCBI NO: 15242208 NR Description: MADS-box protein; protein id: At5g51860.1
MVTMVKKIEVLEVHNRKMMGQSLDSCSVKELSEIATQIEKSLHMVRLRKAKLYEDELQKLKAKERQLKDERVRLSLKVGERPMGMPSGSKEKEDVETDLFIGFLKNRP

SEQ ID NO: 21340 - DNA, 1440 bp, Arabidopsis thaliana
  misc_feature (1)..(1440): Ceres Seq. ID no. 12337386
  misc_feature: MA Experiment ID: 20000180 Result: Up-regulated in Transcription
  misc_feature: MA Experiment 20000180 PARAMETER Experiment Name: At_Germinating_Seeds_P Parameter: Age (hr) Value: 24 vs. 0
  misc_feature: MA Experiment 20000180 PARAMETER Experiment Name: At_Germinating_Seeds_P Parameter: Tissue Value: Germinating Seeds
  misc_feature: MA Experiment ID: 20000182 Result: Down-regulated in Transcription
  misc_feature: MA Experiment 20000182 PARAMETER Experiment Name: At_2mM_SA_P Parameter: Age (day) Value: 14
  misc_feature: MA Experiment 20000182 PARAMETER Experiment Name: At_2mM_SA_P Parameter: Organism Value: A. thaliana
  misc_feature: MA Experiment 20000182 PARAMETER Experiment Name: At_2mM_SA_P Parameter: Plant Line Value: WS
  misc_feature: MA Experiment 20000182 PARAMETER Experiment Name: At_2mM_SA_P Parameter: Timepoint (hr) Value: 6
  misc_feature: MA Experiment 20000182 PARAMETER Experiment Name: At_2mM_SA_P Parameter: Tissue Value: Aerial
  misc_feature: MA Experiment 20000182 PARAMETER Experiment Name: At_2mM_SA_P Parameter: Treatment Value: 2mM SA vs. No Treatment
  misc_feature: MA Experiment ID: 20000185 Result: Down-regulated in Transcription
  misc_feature: MA Experiment 20000185 PARAMETER Experiment Name: At_Roots__P Parameter: Age (day) Value: 7 vs. 21
  misc_feature: MA Experiment 20000185 PARAMETER Experiment Name: At_Roots__P Parameter: Organism Value: A. thaliana
  misc_feature: MA Experiment 20000185 PARAMETER Experiment Name: At_Roots__P Parameter: Tissue Value: Roots vs. Whole Plant
  misc_feature: MA Experiment ID: 20000437 Result: Down-regulated in Transcription
  misc_feature: MA Experiment 20000437 PARAMETER Experiment Name: At_Drought_P Parameter: Age (day) Value: 8
  misc_feature: MA Experiment 20000437 PARAMETER Experiment Name: At_Drought_P Parameter: Organism Value: A. thaliana
  misc_feature: MA Experiment 20000437 PARAMETER Experiment Name: At_Drought_P Parameter: Plant Line Value: WS
  misc_feature: MA Experiment 20000437 PARAMETER Experiment Name: At_Drought_P Parameter: Timepoint (hr) Value: 24
  misc_feature: MA Experiment 20000437 PARAMETER Experiment Name: At_Drought_P Parameter: Tissue Value: Whole Plant
  misc_feature: MA Experiment 20000437 PARAMETER Experiment Name: At_Drought_P Parameter: Treatment Value: Drought vs. No Drought
  misc_feature: MA Experiment ID: 20000438 Result: Up-regulated in Transcription
  misc_feature: MA Experiment 20000438 PARAMETER Experiment Name: At_Shoots__P Parameter: Age (day) Value: 14
  misc_feature: MA Experiment 20000438 PARAMETER Experiment Name: At_Shoots__P Parameter: Tissue Value: Shoots vs. Whole Plant
  misc_feature: MA Experiment ID: 20000439 Result: Down-regulated in Transcription
  misc_feature: MA Experiment 20000439 PARAMETER Experiment Name: At_Roots__P Parameter: Age (day) Value: 14 vs. 21
  misc_feature: MA Experiment 20000439 PARAMETER Experiment Name: At_Roots__P Parameter: Organism Value: A. thaliana
  misc_feature: MA Experiment 20000439 PARAMETER Experiment Name: At_Roots__P Parameter: Tissue Value: Roots vs. Whole Plant
aaaacacaacataaaacgtacttcttcttcaaaacgcgaaaccacactgtaagttacgtacaccaccacctatcctcaccattcatcatcgacacgtggctggtttaactcaaatcaacgctgaatccaaatacccatttccatttttaaccgtggttggattgttttgagagttgaaggaagaagatgacgtctgacggagcaacgtcgacgtcagctgcagctgcagcagcagcgatggcgacgaggaggaaaccgtcgtggagagagagggagaacaatcggagaagagagcggcggagaagagctgttgcggcgaagatttatactggtcttagagctcaaggtaactacaatcttccaaaacattgtgacaacaatgaggttcttaaggctctttgttctgaagctggttgggttgttgaagaagacggaactacttatcgcaagggacacaagcctctacctggtgacatggctggatcatcttctcgagcaactccttactcttcccataaccaaagtcctctttcttccacttttgatagccccatcttatcttaccaagtcagtccttcctcttcttcattcccgagtccttctcgagttggtgatccacacaatatctccacaatcttccctttcctcaggaatggtggtattccttcatcgcttcctccacttagaatctcaaacagtgctcctgtcactccaccagtgtcatccccaacttctagaaaccccaaaccattgcctacttgggaatcttttaccaaacaatccatgtccatggctgctaaacagtcaatgacttctttgaactacccgttttatgcggtgtctgcacctgccagtcctactcatcatcgccagttccatgctccggctactatacctgaatgtgatgagtctgactcttccactgttgattctggtcattggataagctttcaaaagtttgcacaacaacagccattctctgcctctatggtgccaacctcgcctaccttcaatctcgtgaaacctgcaccacagcaattgtctccaaacacagcagcaatccaagagattggtcaaagctccgagtttaagtttgagaacagccaagttaagccatgggaaggggagaggatccatgatgtggctatggaggatctagagctcacgcttggaaatggtaaagctcatagttgagatgaagtatacatgaacctgttatgtcatgtcggaaggaaggattggagaatgagaattagtgtgttgttcattcagttcatggttttggttcttgttctagaatcgatattcattgtaccagtgagtttgtttcacaacgcattatttgtagatagaatgtttaagatgtatgtttctattatcattccttttaggtcttgaaaacattacaaatatattacatgattaagtggcttgaaatgc

SEQ ID NO: 21341 - protein, 335 aa, Arabidopsis thaliana
  peptide (1)..(335): Ceres Seq. ID no. 12337387
  misc_feature (200)..(335): Homolog of NCBI NO: 13937167 NR Description: At1g19350/F18O14_4 [Arabidopsis thaliana]
  misc_feature (9)..(273): Homolog of NCBI NO: 33146833 NR Description: putative mature anther-specific protein LAT61
  misc_feature (21)..(280): Homolog of NCBI NO: 14626761 NR Description: mature anther-specific protein LAT61
  misc_feature (22)..(333): Homolog of NCBI NO: 15215731 NR Description: AT4g36780/C7A10_580 [Arabidopsis thaliana]
  misc_feature (1)..(333): Homolog of NCBI NO: 25352558 NR Description: unknown protein F9E10.7 [imported] - Arabidopsis
  misc_feature (1)..(333): Homolog of NCBI NO: 18086461 NR Description: At1g75080/F9E10_7 [Arabidopsis thaliana]
  misc_feature (1)..(333): Homolog of NCBI NO: 18410764 NR Description: expressed protein
  misc_feature (1)..(335): Homolog of NCBI NO: 21592457 NR Description: unknown [Arabidopsis thaliana]
  misc_feature (1)..(335): Homolog of NCBI NO: 6651069 NR Description: 107 protein [Arabidopsis thaliana]
  misc_feature (1)..(335): Homolog of NCBI NO: 18394728 NR Description: expressed protein
  misc_feature (200)..(335): Homolog of NCBI NO: 13937167 NR Description: At1g19350/F18O14_4 [Arabidopsis thaliana]
  misc_feature (9)..(273): Homolog of NCBI NO: 33146833 NR Description: putative mature anther-specific protein LAT61
  misc_feature (21)..(280): Homolog of NCBI NO: 14626761 NR Description: mature anther-specific protein LAT61
  misc_feature (22)..(333): Homolog of NCBI NO: 15215731 NR Description: AT4g36780/C7A10_580 [Arabidopsis thaliana]
  misc_feature (1)..(333): Homolog of NCBI NO: 25352558 NR Description: unknown protein F9E10.7 [imported] - Arabidopsis
  misc_feature (1)..(333): Homolog of NCBI NO: 18086461 NR Description: At1g75080/F9E10_7 [Arabidopsis thaliana]
  misc_feature (1)..(333): Homolog of NCBI NO: 18410764 NR Description: expressed protein
  misc_feature (1)..(335): Homolog of NCBI NO: 21592457 NR Description: unknown [Arabidopsis thaliana]
  misc_feature (1)..(335): Homolog of NCBI NO: 6651069 NR Description: 107 protein [Arabidopsis thaliana]
  misc_feature (1)..(335): Homolog of NCBI NO: 18394728 NR Description: expressed protein
MTSDGATSTSAAAAAAAMATRRKPSWRERENNRRRERRRRAVAAKIYTGLRAQGNYNLPKHCDNNEVLKALCSEAGWVVEEDGTTYRKGHKPLPGDMAGSSSRATPYSSHNQSPLSSTFDSPILSYQVSPSSSSFPSPSRVGDPHNISTIFPFLRNGGIPSSLPPLRISNSAPVTPPVSSPTSRNPKPLPTWESFTKQSMSMAAKQSMTSLNYPFYAVSAPASPTHHRQFHAPATIPECDESDSSTVDSGHWISFQKFAQQQPFSASMVPTSPTFNLVKPAPQQLSPNTAAIQEIGQSSEFKFENSQVKPWEGERIHDVAMEDLELTLGNGKAHS

SEQ ID NO: 21342 - protein, 318 aa, Arabidopsis thaliana
  peptide (1)..(318): Ceres Seq. ID no. 12337388
  misc_feature (183)..(318): Homolog of NCBI NO: 13937167 NR Description: At1g19350/F18O14_4 [Arabidopsis thaliana]
  misc_feature (1)..(256): Homolog of NCBI NO: 33146833 NR Description: putative mature anther-specific protein LAT61
  misc_feature (4)..(263): Homolog of NCBI NO: 14626761 NR Description: mature anther-specific protein LAT61
  misc_feature (5)..(316): Homolog of NCBI NO: 15215731 NR Description: AT4g36780/C7A10_580 [Arabidopsis thaliana]
  misc_feature (1)..(316): Homolog of NCBI NO: 25352558 NR Description: unknown protein F9E10.7 [imported] - Arabidopsis
  misc_feature (1)..(316): Homolog of NCBI NO: 18086461 NR Description: At1g75080/F9E10_7 [Arabidopsis thaliana]
  misc_feature (1)..(316): Homolog of NCBI NO: 18410764 NR Description: expressed protein
  misc_feature (1)..(318): Homolog of NCBI NO: 21592457 NR Description: unknown [Arabidopsis thaliana]
  misc_feature (1)..(318): Homolog of NCBI NO: 6651069 NR Description: 107 protein [Arabidopsis thaliana]
  misc_feature (1)..(318): Homolog of NCBI NO: 18394728 NR Description: expressed protein
  misc_feature (183)..(318): Homolog of NCBI NO: 13937167 NR Description: At1g19350/F18O14_4 [Arabidopsis thaliana]
  misc_feature (1)..(256): Homolog of NCBI NO: 33146833 NR Description: putative mature anther-specific protein LAT61
  misc_feature (4)..(263): Homolog of NCBI NO: 14626761 NR Description: mature anther-specific protein LAT61
  misc_feature (5)..(316): Homolog of NCBI NO: 15215731 NR Description: AT4g36780/C7A10_580 [Arabidopsis thaliana]
  misc_feature (1)..(316): Homolog of NCBI NO: 25352558 NR Description: unknown protein F9E10.7 [imported] - Arabidopsis
  misc_feature (1)..(316): Homolog of NCBI NO: 18086461 NR Description: At1g75080/F9E10_7 [Arabidopsis thaliana]
  misc_feature (1)..(316): Homolog of NCBI NO: 18410764 NR Description: expressed protein
  misc_feature (1)..(318): Homolog of NCBI NO: 21592457 NR Description: unknown [Arabidopsis thaliana]
  misc_feature (1)..(318): Homolog of NCBI NO: 6651069 NR Description: 107 protein [Arabidopsis thaliana]
  misc_feature (1)..(318): Homolog of NCBI NO: 18394728 NR Description: expressed protein
MATRRKPSWRERENNRRRERRRRAVAAKIYTGLRAQGNYNLPKHCDNNEVLKALCSEAGWVVEEDGTTYRKGHKPLPGDMAGSSSRATPYSSHNQSPLSSTFDSPILSYQVSPSSSSFPSPSRVGDPHNISTIFPFLRNGGIPSSLPPLRISNSAPVTPPVSSPTSRNPKPLPTWESFTKQSMSMAAKQSMTSLNYPFYAVSAPASPTHHRQFHAPATIPECDESDSSTVDSGHWISFQKFAQQQPFSASMVPTSPTFNLVKPAPQQLSPNTAAIQEIGQSSEFKFENSQVKPWEGERIHDVAMEDLELTLGNGKAHS

SEQ ID NO: 21343 - protein, 239 aa, Arabidopsis thaliana
  peptide (1)..(239): Ceres Seq. ID no. 12337389
  misc_feature (104)..(239): Homolog of NCBI NO: 13937167 NR Description: At1g19350/F18O14_4 [Arabidopsis thaliana]
  misc_feature (1)..(177): Homolog of NCBI NO: 33146833 NR Description: putative mature anther-specific protein LAT61
  misc_feature (1)..(184): Homolog of NCBI NO: 14626761 NR Description: mature anther-specific protein LAT61
  misc_feature (1)..(237): Homolog of NCBI NO: 15215731 NR Description: AT4g36780/C7A10_580 [Arabidopsis thaliana]
  misc_feature (1)..(237): Homolog of NCBI NO: 25352558 NR Description: unknown protein F9E10.7 [imported] - Arabidopsis
  misc_feature (1)..(237): Homolog of NCBI NO: 18086461 NR Description: At1g75080/F9E10_7 [Arabidopsis thaliana]
  misc_feature (1)..(237): Homolog of NCBI NO: 18410764 NR Description: expressed protein
  misc_feature (1)..(239): Homolog of NCBI NO: 21592457 NR Description: unknown [Arabidopsis thaliana]
  misc_feature (1)..(239): Homolog of NCBI NO: 6651069 NR Description: 107 protein [Arabidopsis thaliana]
  misc_feature (1)..(239): Homolog of NCBI NO: 18394728 NR Description: expressed protein
  misc_feature (104)..(239): Homolog of NCBI NO: 13937167 NR Description: At1g19350/F18O14_4 [Arabidopsis thaliana]
  misc_feature (1)..(177): Homolog of NCBI NO: 33146833 NR Description: putative mature anther-specific protein LAT61
  misc_feature (1)..(184): Homolog of NCBI NO: 14626761 NR Description: mature anther-specific protein LAT61
  misc_feature (1)..(237): Homolog of NCBI NO: 15215731 NR Description: AT4g36780/C7A10_580 [Arabidopsis thaliana]
  misc_feature (1)..(237): Homolog of NCBI NO: 25352558 NR Description: unknown protein F9E10.7 [imported] - Arabidopsis
  misc_feature (1)..(237): Homolog of NCBI NO: 18086461 NR Description: At1g75080/F9E10_7 [Arabidopsis thaliana]
  misc_feature (1)..(237): Homolog of NCBI NO: 18410764 NR Description: expressed protein
  misc_feature (1)..(239): Homolog of NCBI NO: 21592457 NR Description: unknown [Arabidopsis thaliana]
  misc_feature (1)..(239): Homolog of NCBI NO: 6651069 NR Description: 107 protein [Arabidopsis thaliana]
  misc_feature (1)..(239): Homolog of NCBI NO: 18394728 NR Description: expressed protein
MAGSSSRATPYSSHNQSPLSSTFDSPILSYQVSPSSSSFPSPSRVGDPHNISTIFPFLRNGGIPSSLPPLRISNSAPVTPPVSSPTSRNPKPLPTWESFTKQSMSMAAKQSMTSLNYPFYAVSAPASPTHHRQFHAPATIPECDESDSSTVDSGHWISFQKFAQQQPFSASMVPTSPTFNLVKPAPQQLSPNTAAIQEIGQSSEFKFENSQVKPWEGERIHDVAMEDLELTLGNGKAHS

SEQ ID NO: 21344 - DNA, 1105 bp, Arabidopsis thaliana
  misc_feature (1)..(1105): Ceres Seq. ID no. 12332676
  misc_feature: MA Experiment ID: 108434 Result: Down-regulated in Transcription
  misc_feature: MA Experiment 108434 PARAMETER Experiment Name: At_Root_Tips_cDNA_P Parameter: Tissue Value: Root Tips
  misc_feature: MA Experiment ID: 108461 Result: Up-regulated in Transcription
  misc_feature: MA Experiment 108461 PARAMETER Experiment Name: At_Germinating_Seeds_cDNA_P Parameter: Age (day) Value: 1 vs. 0
  misc_feature: MA Experiment 108461 PARAMETER Experiment Name: At_Germinating_Seeds_cDNA_P Parameter: Tissue Value: Germinating Seeds
  misc_feature: MA Experiment ID: 108462 Result: Up-regulated in Transcription
  misc_feature: MA Experiment 108462 PARAMETER Experiment Name: At_Germinating_Seeds_cDNA_P Parameter: Age (day) Value: 2 vs. 0
  misc_feature: MA Experiment 108462 PARAMETER Experiment Name: At_Germinating_Seeds_cDNA_P Parameter: Tissue Value: Germinating Seeds
  misc_feature: MA Experiment ID: 108463 Result: Up-regulated in Transcription
  misc_feature: MA Experiment 108463 PARAMETER Experiment Name: At_Germinating_Seeds_cDNA_P Parameter: Age (day) Value: 3 vs. 0
  misc_feature: MA Experiment 108463 PARAMETER Experiment Name: At_Germinating_Seeds_cDNA_P Parameter: Tissue Value: Germinating Seeds
  misc_feature: MA Experiment ID: 108464 Result: Up-regulated in Transcription
  misc_feature: MA Experiment 108464 PARAMETER Experiment Name: At_Germinating_Seeds_cDNA_P Parameter: Age (day) Value: 4 vs. 0
  misc_feature: MA Experiment 108464 PARAMETER Experiment Name: At_Germinating_Seeds_cDNA_P Parameter: Tissue Value: Germinating Seeds
  misc_feature: MA Experiment ID: 108574 Result: Down-regulated in Transcription
  misc_feature: MA Experiment 108574 PARAMETER Experiment Name: At_Wounding__cDNA_P Parameter: Timepoint (hr) Value: 1
  misc_feature: MA Experiment 108574 PARAMETER Experiment Name: At_Wounding__cDNA_P Parameter: Tissue Value: Aerial
  misc_feature: MA Experiment 108574 PARAMETER Experiment Name: At_Wounding__cDNA_P Parameter: Treatment Value: Wounding vs. No Wounding
  misc_feature: MA Experiment ID: 108579 Result: Down-regulated in Transcription
  misc_feature: MA Experiment 108579 PARAMETER Experiment Name: At_4deg_Cold_cDNA_P Parameter: Temperature (deg C) Value: 4 vs. 22
  misc_feature: MA Experiment 108579 PARAMETER Experiment Name: At_4deg_Cold_cDNA_P Parameter: Timepoint (hr) Value: 6
  misc_feature: MA Experiment 108579 PARAMETER Experiment Name: At_4deg_Cold_cDNA_P Parameter: Tissue Value: Aerial
  misc_feature: MA Experiment ID: 108595 Result: Down-regulated in Transcription
  misc_feature: MA Experiment 108595 PARAMETER Experiment Name: At_Ler-pi_Ovule_cDNA_P Parameter: Plant Line Value: null
  misc_feature: MA Experiment ID: 20000069 Result: Up-regulated in Transcription
  misc_feature: MA Experiment 20000069 PARAMETER Experiment Name: At_100uM_ABA_Mutants_cDNA_P Parameter: Plant Line Value: CS23
  misc_feature: MA Experiment 20000069 PARAMETER Experiment Name: At_100uM_ABA_Mutants_cDNA_P Parameter: Timepoint (hr) Value: 6
  misc_feature: MA Experiment 20000069 PARAMETER Experiment Name: At_100uM_ABA_Mutants_cDNA_P Parameter: Tissue Value: Aerial
  misc_feature: MA Experiment 20000069 PARAMETER Experiment Name: At_100uM_ABA_Mutants_cDNA_P Parameter: Treatment Value: 100uM ABA vs. No Treatment
  misc_feature: MA Experiment ID: 20000087 Result: Up-regulated in Transcription
  misc_feature: MA Experiment 20000087 PARAMETER Experiment Name: At_100uM_ABA_Mutants_cDNA_P Parameter: Plant Line Value: WS
  misc_feature: MA Experiment 20000087 PARAMETER Experiment Name: At_100uM_ABA_Mutants_cDNA_P Parameter: Timepoint (hr) Value: 6
  misc_feature: MA Experiment 20000087 PARAMETER Experiment Name: At_100uM_ABA_Mutants_cDNA_P Parameter: Tissue Value: Aerial
  misc_feature: MA Experiment 20000087 PARAMETER Experiment Name: At_100uM_ABA_Mutants_cDNA_P Parameter: Treatment Value: 100uM ABA vs. No Treatment
  misc_feature: MA Experiment ID: 20000112 Result: Down-regulated in Transcription
  misc_feature: MA Experiment 20000112 PARAMETER Experiment Name: At_42deg_Heat_cDNA_P Parameter: Temperature (deg C) Value: 42 vs. 22
  misc_feature: MA Experiment 20000112 PARAMETER Experiment Name: At_42deg_Heat_cDNA_P Parameter: Timepoint (hr) Value: 2
  misc_feature: MA Experiment 20000112 PARAMETER Experiment Name: At_42deg_Heat_cDNA_P Parameter: Tissue Value: Aerial
  misc_feature: MA Experiment ID: 20000113 Result: Down-regulated in Transcription
  misc_feature: MA Experiment 20000113 PARAMETER Experiment Name: At_42deg_Heat_cDNA_P Parameter: Temperature (deg C) Value: 42 vs. 22
  misc_feature: MA Experiment 20000113 PARAMETER Experiment Name: At_42deg_Heat_cDNA_P Parameter: Timepoint (hr) Value: 8
  misc_feature: MA Experiment 20000113 PARAMETER Experiment Name: At_42deg_Heat_cDNA_P Parameter: Tissue Value: Aerial
  misc_feature: MA Experiment ID: 20000171 Result: Down-regulated in Transcription
  misc_feature: MA Experiment 20000171 PARAMETER Experiment Name: At_42deg_Heat_P Parameter: Age (day) Value: 14
  misc_feature: MA Experiment 20000171 PARAMETER Experiment Name: At_42deg_Heat_P Parameter: Organism Value: A. thaliana
  misc_feature: MA Experiment 20000171 PARAMETER Experiment Name: At_42deg_Heat_P Parameter: Plant Line Value: WS
  misc_feature: MA Experiment 20000171 PARAMETER Experiment Name: At_42deg_Heat_P Parameter: Temperature (deg C) Value: 42 vs. 22
  misc_feature: MA Experiment 20000171 PARAMETER Experiment Name: At_42deg_Heat_P Parameter: Timepoint (hr) Value: 1
  misc_feature: MA Experiment 20000171 PARAMETER Experiment Name: At_42deg_Heat_P Parameter: Tissue Value: Aerial
  misc_feature: MA Experiment ID: 20000173 Result: Down-regulated in Transcription
  misc_feature: MA Experiment 20000173 PARAMETER Experiment Name: At_42deg_Heat_P Parameter: Age (day) Value: 14
  misc_feature: MA Experiment 20000173 PARAMETER Experiment Name: At_42deg_Heat_P Parameter: Organism Value: A. thaliana
  misc_feature: MA Experiment 20000173 PARAMETER Experiment Name: At_42deg_Heat_P Parameter: Plant Line Value: WS
  misc_feature: MA Experiment 20000173 PARAMETER Experiment Name: At_42deg_Heat_P Parameter: Temperature (deg C) Value: 42 vs. 22
  misc_feature: MA Experiment 20000173 PARAMETER Experiment Name: At_42deg_Heat_P Parameter: Timepoint (hr) Value: 6
  misc_feature: MA Experiment 20000173 PARAMETER Experiment Name: At_42deg_Heat_P Parameter: Tissue Value: Aerial
  misc_feature: MA Experiment ID: 20000180 Result: Up-regulated in Transcription
  misc_feature: MA Experiment 20000180 PARAMETER Experiment Name: At_Germinating_Seeds_P Parameter: Age (hr) Value: 24 vs. 0
  misc_feature: MA Experiment 20000180 PARAMETER Experiment Name: At_Germinating_Seeds_P Parameter: Tissue Value: Germinating Seeds
  misc_feature: MA Experiment ID: 20000213 Result: Down-regulated in Transcription
  misc_feature: MA Experiment 20000213 PARAMETER Experiment Name: At_4deg_Cold_P Parameter: Timepoint (hr) Value: 2
  misc_feature: MA Experiment ID: 20000224 Result: Down-regulated in Transcription
  misc_feature: MA Experiment ID: 20000234 Result: Down-regulated in Transcription
  misc_feature: MA Experiment 20000234 PARAMETER Experiment Name: At_Siliques_P Parameter: Age (day) Value: 21
  misc_feature: MA Experiment 20000234 PARAMETER Experiment Name: At_Siliques_P Parameter: Organism Value: A. thaliana
  misc_feature: MA Experiment 20000234 PARAMETER Experiment Name: At_Siliques_P Parameter: Plant Line Value: WS
  misc_feature: MA Experiment 20000234 PARAMETER Experiment Name: At_Siliques_P Parameter: Tissue Value: Less Than 5mm Siliques vs. Whole Plant
  misc_feature: MA Experiment ID: 20000235 Result: Down-regulated in Transcription
  misc_feature: MA Experiment 20000235 PARAMETER Experiment Name: At_Siliques_P Parameter: Age (day) Value: 21
  misc_feature: MA Experiment 20000235 PARAMETER Experiment Name: At_Siliques_P Parameter: Organism Value: A. thaliana
  misc_feature: MA Experiment 20000235 PARAMETER Experiment Name: At_Siliques_P Parameter: Plant Line Value: WS
  misc_feature: MA Experiment 20000235 PARAMETER Experiment Name: At_Siliques_P Parameter: Tissue Value: 5-10mm Siliques vs. Whole Plant
  misc_feature: MA Experiment ID: 20000268 Result: Down-regulated in Transcription
  misc_feature: MA Experiment 20000268 PARAMETER Experiment Name: At_100mM_NaCl__P Parameter: Age (day) Value: 14
  misc_feature: MA Experiment 20000268 PARAMETER Experiment Name: At_100mM_NaCl__P Parameter: Organism Value: A. thaliana
  misc_feature: MA Experiment 20000268 PARAMETER Experiment Name: At_100mM_NaCl__P Parameter: Plant Line Value: WS
  misc_feature: MA Experiment 20000268 PARAMETER Experiment Name: At_100mM_NaCl__P Parameter: Timepoint (hr) Value: 6
  misc_feature: MA Experiment 20000268 PARAMETER Experiment Name: At_100mM_NaCl__P Parameter: Tissue Value: Whole Plant
  misc_feature: MA Experiment 20000268 PARAMETER Experiment Name: At_100mM_NaCl__P Parameter: Treatment Value: 100mM NaCl vs. No Treatment
  misc_feature: MA Experiment ID: 20000794 Result: Up-regulated in Transcription
  misc_feature: MA Experiment 20000794 PARAMETER Experiment Name: At_Petals_P Parameter: Age (day) Value: 23-25 days
  misc_feature: MA Experiment 20000794 PARAMETER Experiment Name: At_Petals_P Parameter: Plant Line Value: WS
  misc_feature: MA Experiment 20000794 PARAMETER Experiment Name: At_Petals_P Parameter: Tissue Value: Petals vs. Whole plant
  misc_feature: MA Experiment ID: 20001248 Result: Up-regulated in Transcription
  misc_feature: MA Experiment 20001248 PARAMETER Experiment Name: At_Far-red-induction_P Parameter: Age (day) Value: 7
  misc_feature: MA Experiment 20001248 PARAMETER Experiment Name: At_Far-red-induction_P Parameter: Light Value: Far-red vs. White
  misc_feature: MA Experiment 20001248 PARAMETER Experiment Name: At_Far-red-induction_P Parameter: Organism Value: A. thaliana
  misc_feature: MA Experiment 20001248 PARAMETER Experiment Name: At_Far-red-induction_P Parameter: Plant Line Value: Columbia
  misc_feature: MA Experiment 20001248 PARAMETER Experiment Name: At_Far-red-induction_P Parameter: Timepoint (hr) Value: 4
  misc_feature: MA Experiment 20001248 PARAMETER Experiment Name: At_Far-red-induction_P Parameter: Tissue Value: Whole Plant
  misc_feature: MA Experiment ID: 20001450 Result: Up-regulated in Transcription
  misc_feature: MA Experiment 20001450 PARAMETER Experiment Name: At_Far-red-induction_P Parameter: Age (day) Value: 7
  misc_feature: MA Experiment 20001450 PARAMETER Experiment Name: At_Far-red-induction_P Parameter: Light Value: Far-red vs. White
  misc_feature: MA Experiment 20001450 PARAMETER Experiment Name: At_Far-red-induction_P Parameter: Organism Value: A. thaliana
  misc_feature: MA Experiment 20001450 PARAMETER Experiment Name: At_Far-red-induction_P Parameter: Plant Line Value: Columbia
  misc_feature: MA Experiment 20001450 PARAMETER Experiment Name: At_Far-red-induction_P Parameter: Timepoint (hr) Value: 8
  misc_feature: MA Experiment 20001450 PARAMETER Experiment Name: At_Far-red-induction_P Parameter: Tissue Value: Whole Plant
  misc_feature: MA Experiment ID: 20001451 Result: Up-regulated in Transcription
  misc_feature: MA Experiment 20001451 PARAMETER Experiment Name: At_Far-red-induction_P Parameter: Age (day) Value: 7
  misc_feature: MA Experiment 20001451 PARAMETER Experiment Name: At_Far-red-induction_P Parameter: Light Value: Far-red vs. White
  misc_feature: MA Experiment 20001451 PARAMETER Experiment Name: At_Far-red-induction_P Parameter: Organism Value: A. thaliana
  misc_feature: MA Experiment 20001451 PARAMETER Experiment Name: At_Far-red-induction_P Parameter: Plant Line Value: Columbia
  misc_feature: MA Experiment 20001451 PARAMETER Experiment Name: At_Far-red-induction_P Parameter: Timepoint (hr) Value: 24
  misc_feature: MA Experiment 20001451 PARAMETER Experiment Name: At_Far-red-induction_P Parameter: Tissue Value: Whole Plant
  misc_feature: MA Experiment ID: 20001555 Result: Down-regulated in Transcription
  misc_feature: MA Experiment 20001555 PARAMETER Experiment Name: At_Drought_Soil_Dry_P Parameter: Age (day) Value: 24
  misc_feature: MA Experiment 20001555 PARAMETER Experiment Name: At_Drought_Soil_Dry_P Parameter: Organism Value: A. thaliana
  misc_feature: MA Experiment 20001555 PARAMETER Experiment Name: At_Drought_Soil_Dry_P Parameter: Plant Line Value: WS
  misc_feature: MA Experiment 20001555 PARAMETER Experiment Name: At_Drought_Soil_Dry_P Parameter: Post Timepoint (hr) Value: None
  misc_feature: MA Experiment 20001555 PARAMETER Experiment Name: At_Drought_Soil_Dry_P Parameter: Post-Treatment Value: None
  misc_feature: MA Experiment 20001555 PARAMETER Experiment Name: At_Drought_Soil_Dry_P Parameter: Timepoint (day) Value: 10
  misc_feature: MA Experiment 20001555 PARAMETER Experiment Name: At_Drought_Soil_Dry_P Parameter: Treatment Value: Drought vs. No Drought
  misc_feature: MA Experiment ID: 20001556 Result: Down-regulated in Transcription
  misc_feature: MA Experiment 20001556 PARAMETER Experiment Name: At_Drought_Soil_Dry_P Parameter: Age (day) Value: 26
  misc_feature: MA Experiment 20001556 PARAMETER Experiment Name: At_Drought_Soil_Dry_P Parameter: Organism Value: A. thaliana
  misc_feature: MA Experiment 20001556 PARAMETER Experiment Name: At_Drought_Soil_Dry_P Parameter: Plant Line Value: WS
  misc_feature: MA Experiment 20001556 PARAMETER Experiment Name: At_Drought_Soil_Dry_P Parameter: Post Timepoint (hr) Value: None
  misc_feature: MA Experiment 20001556 PARAMETER Experiment Name: At_Drought_Soil_Dry_P Parameter: Post-Treatment Value: None
  misc_feature: MA Experiment 20001556 PARAMETER Experiment Name: At_Drought_Soil_Dry_P Parameter: Timepoint (day) Value: 12
  misc_feature: MA Experiment 20001556 PARAMETER Experiment Name: At_Drought_Soil_Dry_P Parameter: Treatment Value: Drought vs. No Drought
  misc_feature: MA Experiment ID: 20001559 Result: Down-regulated in Transcription
  misc_feature: MA Experiment 20001559 PARAMETER Experiment Name: At_Drought_Soil_Dry_P Parameter: Age (day) Value: 28
  misc_feature: MA Experiment 20001559 PARAMETER Experiment Name: At_Drought_Soil_Dry_P Parameter: Organism Value: A. thaliana
  misc_feature: MA Experiment 20001559 PARAMETER Experiment Name: At_Drought_Soil_Dry_P Parameter: Plant Line Value: WS
  misc_feature: MA Experiment 20001559 PARAMETER Experiment Name: At_Drought_Soil_Dry_P Parameter: Post Timepoint (hr) Value: 29
  misc_feature: MA Experiment 20001559 PARAMETER Experiment Name: At_Drought_Soil_Dry_P Parameter: Post-Treatment Value: Re-Water vs. No Drought
  misc_feature: MA Experiment 20001559 PARAMETER Experiment Name: At_Drought_Soil_Dry_P Parameter: Timepoint (day) Value: 14
  misc_feature: MA Experiment 20001559 PARAMETER Experiment Name: At_Drought_Soil_Dry_P Parameter: Treatment Value: Drought vs. No Drought
  misc_feature: MA Experiment ID: 20001761 Result: Up-regulated in Transcription
  misc_feature: MA Experiment 20001761 PARAMETER Experiment Name: At_50mM_NH4NO3_L-to-H_P Parameter: Timepoint (hr) Value: 4
  misc_feature: MA Experiment 20001761 PARAMETER Experiment Name: At_50mM_NH4NO3_L-to-H_P Parameter: Tissue Value: Siliques
  misc_feature: MA Experiment 20001761 PARAMETER Experiment Name: At_50mM_NH4NO3_L-to-H_P Parameter: Treatment Value: 50mM NH4NO3 vs 100mM Mannitol
  misc_feature: MA Experiment ID: 20001905 Result: Down-regulated in Transcription
  misc_feature: MA Experiment 20001905 PARAMETER Experiment Name: At_Drought_Reproduction_P Parameter: Age (day) Value: 40
  misc_feature: MA Experiment 20001905 PARAMETER Experiment Name: At_Drought_Reproduction_P Parameter: Organism Value: A. thaliana
  misc_feature: MA Experiment 20001905 PARAMETER Experiment Name: At_Drought_Reproduction_P Parameter: Plant Line Value: WS
  misc_feature: MA Experiment 20001905 PARAMETER Experiment Name: At_Drought_Reproduction_P Parameter: Timepoint (day) Value: 10
  misc_feature: MA Experiment 20001905 PARAMETER Experiment Name: At_Drought_Reproduction_P Parameter: Tissue Value: Rosettes
  misc_feature: MA Experiment 20001905 PARAMETER Experiment Name: At_Drought_Reproduction_P Parameter: Treatment Value: Drought vs. No Drought
  misc_feature: MA Experiment ID: 20001906 Result: Down-regulated in Transcription
  misc_feature: MA Experiment 20001906 PARAMETER Experiment Name: At_Drought_Reproduction_P Parameter: Age (day) Value: 35
  misc_feature: MA Experiment 20001906 PARAMETER Experiment Name: At_Drought_Reproduction_P Parameter: Organism Value: A. thaliana
  misc_feature: MA Experiment 20001906 PARAMETER Experiment Name: At_Drought_Reproduction_P Parameter: Plant Line Value: WS
  misc_feature: MA Experiment 20001906 PARAMETER Experiment Name: At_Drought_Reproduction_P Parameter: Timepoint (day) Value: 5
  misc_feature: MA Experiment 20001906 PARAMETER Experiment Name: At_Drought_Reproduction_P Parameter: Tissue Value: Siliques
  misc_feature: MA Experiment 20001906 PARAMETER Experiment Name: At_Drought_Reproduction_P Parameter: Treatment Value: Drought vs. No Drought
  misc_feature: MA Experiment ID: 20001911 Result: Down-regulated in Transcription
  misc_feature: MA Experiment 20001911 PARAMETER Experiment Name: At_Drought_Reproduction_P Parameter: Age (day) Value: 40
  misc_feature: MA Experiment 20001911 PARAMETER Experiment Name: At_Drought_Reproduction_P Parameter: Organism Value: A. thaliana
  misc_feature: MA Experiment 20001911 PARAMETER Experiment Name: At_Drought_Reproduction_P Parameter: Plant Line Value: WS
  misc_feature: MA Experiment 20001911 PARAMETER Experiment Name: At_Drought_Reproduction_P Parameter: Timepoint (day) Value: 10
  misc_feature: MA Experiment 20001911 PARAMETER Experiment Name: At_Drought_Reproduction_P Parameter: Tissue Value: Flowers
  misc_feature: MA Experiment 20001911 PARAMETER Experiment Name: At_Drought_Reproduction_P Parameter: Treatment Value: Drought vs. No Drought
gttgtgcaaaagaacagaatgagttctaagtttgatatcggctccttaagcatagtaatgactctgcttatttgcttcttattattatctttggctccaaaacttgaggctgagctcgcaacggtccaacatgctccaaaccccgatggctctatcagttttctggtgattggagattggggtaggcatggactctacaaccaatcccaagttgccctccagatggggagaatcggggaggagatggatatcaattttgtggtatcgacgggtgataacatctacgataacgggatgaaaagtatcgatgatcccgcctttcaactctcctttagtaatatctacacttctcctagcctgcaaaagccttggtaccttgtattggggaatcacgactatagaggagatgttgaggcacaattgagtcctatcctcagatctatggatagccgttggatttgcatgagatccttcatcgttgacgctgagatcgcagagctcttctttgtcgacacaactccttttgtagatgcttatttcctcagtccacaagaccaaacttacgactggagcggcgtatcaccgcgaaaatcctaccttcagaccatcttaacggagttggagatgggtctaagagaatcaagtgcaaaatggaaaattgtggtgggtcaccatgctataaagagtgcttccattcatgggaataccaaagagcttgaatctctcctcttacccatccttgaggcgaataaagttgatctctatatgaacggtcatgatcattgcttgcaacatataagcacatcacaaagcccaattcagtttctaacgagtggtggtgggtcaaaggcatggagaggctattacaattggacaacaccagaggatatgaaatttttctacgatggacaaggtttcatgtcagttaagatcactagatcagaattgagtgtcgttttttatgatgtctccggcaatagtttgcataagtgggacacatcgaaaatgttagactcggatttttatttcccattgtaattcacatgaaaatcagttaaagcacataaattctacatataaataaatatgattactatgagtggtt

SEQ ID NO: 21345 - protein, 345 aa, Arabidopsis thaliana
  peptide (1)..(345): Ceres Seq. ID no. 12332677
  misc_feature (52)..(263): Pfam Name: Calcineurin-like phosphoesterase Pfam Description: Calcineurin-like phosphoesterase
  misc_feature (37)..(339): Homolog of NCBI NO: 39918795 NR Description: putative acid phosphatase [Lupinus luteus]
  misc_feature (15)..(337): Homolog of NCBI NO: 21536860 NR Description: acid phosphatase type 5 [Arabidopsis thaliana]
  misc_feature (2)..(337): Homolog of NCBI NO: 18401643 NR Description: acid phosphatase type 5
  misc_feature (7)..(335): Homolog of NCBI NO: 22325419 NR Description: putative purple acid phosphatase
  misc_feature (37)..(343): Homolog of NCBI NO: 25752249 NR Description: probable acid phosphatase (EC 3.1.3.2) F10B6.10
  misc_feature (37)..(343): Homolog of NCBI NO: 30911094 NR Description: putative purple acid phosphatase [Arabidopsis
  misc_feature (37)..(343): Homolog of NCBI NO: 30683951 NR Description: calcineurin-like phosphoesterase family
  misc_feature (7)..(345): Homolog of NCBI NO: 25752248 NR Description: probable acid phosphatase (EC 3.1.3.2) F4F7.38
  misc_feature (7)..(345): Homolog of NCBI NO: 22329781 NR Description: hypothetical protein
VVQKNRMSSKFDIGSLSIVMTLLICFLLLSLAPKLEAELATVQHAPNPDGSISFLVIGDWGRHGLYNQSQVALQMGRIGEEMDINFVVSTGDNIYDNGMKSIDDPAFQLSFSNIYTSPSLQKPWYLVLGNHDYRGDVEAQLSPILRSMDSRWICMRSFIVDAEIAELFFVDTTPFVDAYFLSPQDQTYDWSGVSPRKSYLQTILTELEMGLRESSAKWKIVVGHHAIKSASIHGNTKELESLLLPILEANKVDLYMNGHDHCLQHISTSQSPIQFLTSGGGSKAWRGYYNWTTPEDMKFFYDGQGFMSVKITRSELSVVFYDVSGNSLHKWDTSKMLDSDFYFPL

SEQ ID NO: 21346 - protein, 339 aa, Arabidopsis thaliana
  peptide (1)..(339): Ceres Seq. ID no. 12332678
  misc_feature (46)..(257): Pfam Name: Calcineurin-like phosphoesterase Pfam Description: Calcineurin-like phosphoesterase
  misc_feature (31)..(333): Homolog of NCBI NO: 39918795 NR Description: putative acid phosphatase [Lupinus luteus]
  misc_feature (9)..(331): Homolog of NCBI NO: 21536860 NR Description: acid phosphatase type 5 [Arabidopsis thaliana]
  misc_feature (1)..(331): Homolog of NCBI NO: 18401643 NR Description: acid phosphatase type 5
  misc_feature (1)..(329): Homolog of NCBI NO: 22325419 NR Description: putative purple acid phosphatase
  misc_feature (31)..(337): Homolog of NCBI NO: 25752249 NR Description: probable acid phosphatase (EC 3.1.3.2) F10B6.10
  misc_feature (31)..(337): Homolog of NCBI NO: 30911094 NR Description: putative purple acid phosphatase [Arabidopsis
  misc_feature (31)..(337): Homolog of NCBI NO: 30683951 NR Description: calcineurin-like phosphoesterase family
  misc_feature (1)..(339): Homolog of NCBI NO: 25752248 NR Description: probable acid phosphatase (EC 3.1.3.2) F4F7.38
  misc_feature (1)..(339): Homolog of NCBI NO: 22329781 NR Description: hypothetical protein
MSSKFDIGSLSIVMTLLICFLLLSLAPKLEAELATVQHAPNPDGSISFLVIGDWGRHGLYNQSQVALQMGRIGEEMDINFVVSTGDNIYDNGMKSIDDPAFQLSFSNIYTSPSLQKPWYLVLGNHDYRGDVEAQLSPILRSMDSRWICMRSFIVDAEIAELFFVDTTPFVDAYFLSPQDQTYDWSGVSPRKSYLQTILTELEMGLRESSAKWKIVVGHHAIKSASIHGNTKELESLLLPILEANKVDLYMNGHDHCLQHISTSQSPIQFLTSGGGSKAWRGYYNWTTPEDMKFFYDGQGFMSVKITRSELSVVFYDVSGNSLHKWDTSKMLDSDFYFPL

SEQ ID NO: 21347 - protein, 326 aa, Arabidopsis thaliana
  peptide (1)..(326): Ceres Seq. ID no. 12332679
  misc_feature (33)..(244): Pfam Name: Calcineurin-like phosphoesterase Pfam Description: Calcineurin-like phosphoesterase
  misc_feature (18)..(320): Homolog of NCBI NO: 39918795 NR Description: putative acid phosphatase [Lupinus luteus]
  misc_feature (1)..(318): Homolog of NCBI NO: 21536860 NR Description: acid phosphatase type 5 [Arabidopsis thaliana]
  misc_feature (1)..(318): Homolog of NCBI NO: 18401643 NR Description: acid phosphatase type 5
  misc_feature (1)..(316): Homolog of NCBI NO: 22325419 NR Description: putative purple acid phosphatase
  misc_feature (18)..(324): Homolog of NCBI NO: 25752249 NR Description: probable acid phosphatase (EC 3.1.3.2) F10B6.10
  misc_feature (18)..(324): Homolog of NCBI NO: 30911094 NR Description: putative purple acid phosphatase [Arabidopsis
  misc_feature (18)..(324): Homolog of NCBI NO: 30683951 NR Description: calcineurin-like phosphoesterase family
  misc_feature (1)..(326): Homolog of NCBI NO: 25752248 NR Description: probable acid phosphatase (EC 3.1.3.2) F4F7.38
  misc_feature (1)..(326): Homolog of NCBI NO: 22329781 NR Description: hypothetical protein
MTLLICFLLLSLAPKLEAELATVQHAPNPDGSISFLVIGDWGRHGLYNQSQVALQMGRIGEEMDINFVVSTGDNIYDNGMKSIDDPAFQLSFSNIYTSPSLQKPWYLVLGNHDYRGDVEAQLSPILRSMDSRWICMRSFIVDAEIAELFFVDTTPFVDAYFLSPQDQTYDWSGVSPRKSYLQTILTELEMGLRESSAKWKIVVGHHAIKSASIHGNTKELESLLLPILEANKVDLYMNGHDHCLQHISTSQSPIQFLTSGGGSKAWRGYYNWTTPEDMKFFYDGQGFMSVKITRSELSVVFYDVSGNSLHKWDTSKMLDSDFYFPL

SEQ ID NO: 21348 - DNA, 2273 bp, Arabidopsis thaliana
  misc_feature (1)..(2273): Ceres Seq. ID no. 13499581
  misc_feature: MA Experiment ID: 108573 Result: Up-regulated in Transcription
  misc_feature: MA Experiment 108573 PARAMETER Experiment Name: At_Drought_cDNA_P Parameter: Timepoint (hr) Value: 6
  misc_feature: MA Experiment 108573 PARAMETER Experiment Name: At_Drought_cDNA_P Parameter: Tissue Value: Aerial
  misc_feature: MA Experiment 108573 PARAMETER Experiment Name: At_Drought_cDNA_P Parameter: Treatment Value: Drought vs. No Drought
  misc_feature: MA Experiment ID: 108595 Result: Down-regulated in Transcription
  misc_feature: MA Experiment 108595 PARAMETER Experiment Name: At_Ler-pi_Ovule_cDNA_P Parameter: Plant Line Value: null
  misc_feature: MA Experiment ID: 20000068 Result: Down-regulated in Transcription
  misc_feature: MA Experiment ID: 20000069 Result: Down-regulated in Transcription
  misc_feature: MA Experiment 20000069 PARAMETER Experiment Name: At_100uM_ABA_Mutants_cDNA_P Parameter: Plant Line Value: CS23
  misc_feature: MA Experiment 20000069 PARAMETER Experiment Name: At_100uM_ABA_Mutants_cDNA_P Parameter: Timepoint (hr) Value: 6
  misc_feature: MA Experiment 20000069 PARAMETER Experiment Name: At_100uM_ABA_Mutants_cDNA_P Parameter: Tissue Value: Aerial
  misc_feature: MA Experiment 20000069 PARAMETER Experiment Name: At_100uM_ABA_Mutants_cDNA_P Parameter: Treatment Value: 100uM ABA vs. No Treatment
  misc_feature: MA Experiment ID: 20000087 Result: Down-regulated in Transcription
  misc_feature: MA Experiment 20000087 PARAMETER Experiment Name: At_100uM_ABA_Mutants_cDNA_P Parameter: Plant Line Value: WS
  misc_feature: MA Experiment 20000087 PARAMETER Experiment Name: At_100uM_ABA_Mutants_cDNA_P Parameter: Timepoint (hr) Value: 6
  misc_feature: MA Experiment 20000087 PARAMETER Experiment Name: At_100uM_ABA_Mutants_cDNA_P Parameter: Tissue Value: Aerial
  misc_feature: MA Experiment 20000087 PARAMETER Experiment Name: At_100uM_ABA_Mutants_cDNA_P Parameter: Treatment Value: 100uM ABA vs. No Treatment
  misc_feature: MA Experiment ID: 20000113 Result: Down-regulated in Transcription
  misc_feature: MA Experiment 20000113 PARAMETER Experiment Name: At_42deg_Heat_cDNA_P Parameter: Temperature (deg C) Value: 42 vs. 22
  misc_feature: MA Experiment 20000113 PARAMETER Experiment Name: At_42deg_Heat_cDNA_P Parameter: Timepoint (hr) Value: 8
  misc_feature: MA Experiment 20000113 PARAMETER Experiment Name: At_42deg_Heat_cDNA_P Parameter: Tissue Value: Aerial
  misc_feature: MA Experiment ID: 20000224 Result: Down-regulated in Transcription
aacactagcaagcaaaaattcttcatcgactcaaattcaaaaactcatctctctctatctctatttctctggttccatagctcaccgtcgcatcgcagatctactccttccgcaataaattttaccggcggaggtatcagatctcgccgatctgttgtagcagctactgtattttgggcttctcatttgatattggggaaacgaggagtagaggacgatggaaaatctgatctctctggttaacaagatacagagagcttgcacggctttaggagaccatggagactccagcgctttacctactctttgggattccttgcctgcgatcgccgtcgttggtggtcagagctcagggaagtcttcagtcctggagagcatcgtgggaaaggactttttaccccgtggatctggcattgttactcgaaggccccttgtcttacagttgcaaaagatcgatgatggaacccgggagtatgcagagtttcttcacctcccgaggaaaaagtttactgattttgctgctgtgaggaaggagattcaagatgagactgacagagagactggacgcagcaaggctatttctagtgttcccattcaccttagcatatactctcccaatgttgtcaacttgacactgatagatcttccagggcttacaaaagttgctgttgatggacaatctgatagtatagtgaaggacattgaaaacatggttcggtcctacattgaaaagcccaactgcatcattttggcaatctcacctgcaaaccaagatcttgctacctcagatgcaattaaaatttcccgtgaggttgatccatcgggggacagaacatttggtgtcttgacaaagattgatcttatggacaaggggacggatgcagtggaaattctggaagggagatcttttaaacttaaatatccgtgggttggtgtcgtcaaccgttcccaagcagatattaacaagaatgtcgacatgattgcggctcggaaaagagagagggagtacttttccaatactactgagtataggcaccttgctaataaaatgggttccgagcatttggcaaagatgctctccaagcatctagaacgtgtgatcaagtcgagaattcctggcattcagtcacttattaacaaaacagtattagagctggaaactgaactaagtcgccttggaaagcctattgcagctgatgcaggggggaagttgtactcaataatggagatatgtcggctttttgatcaaatattcaaagagcatcttgatggagtgcgtgctggtggtgaaaaagtgtacaacgtgtttgataaccagcttcctgcggctctgaagagactccaatttgacaagcagctagcgatggacaacatccggaagctggtcactgaggctgatggttaccagcctcacttgattgctcctgagcaaggttaccgtcgtctcattgagtcttctattgtctccatcagaggccctgctgaagcatctgttgacaccgttcatgctatcttaaaggatctggttcacaagtctgtgaatgaaactgtggaactaaaacaatacccagctctgagagtggaggtgacaaatgcggcgatagagtcgctggataaaatgcgggaaggaagtaagaaagcaacactgcagctggttgacatggagtgcagttacctcactgttgatttcttcaggaaacttccccaggatgttgagaagggtggtaaccccacacactccattttcgaccgctacaacgattcctatctcagacgaatcggatccaatgttttgtcttacgtgaacatggtctgtgctggcctgcggaattcaatccccaagtccatcgtatactgccaagtccgagaagcgaagcgcagtctcctcgaccatttctttgcggagctcggtaccatggatatgaagaggctctctcgtcgctattgaacgaagatccagcaatcatggagagacgcagtgccatctcaaagcggctagaattgtatcgagcagcccaatccgagatcgatgctgttgcttggtccaagtgataccggcatgtcatgtccactgttttgctcggttctggtcggtgtggctcagactcggagcagagatttagggtctgtaatttgtataagatgatcttcccgataccatgcagtatcgttttatataacatccacattgtttgtcctacctctatgttttttgtccatcacccgatatgttacgtatcgttttataacatccacattgtttgtcctgcctc

SEQ ID NO: 21349 - protein, 576 aa, Arabidopsis thaliana
  peptide (1)..(576): Ceres Seq. ID no. 13499582
  misc_feature (1)..(574): Homolog of NCBI NO: 37536976 NR Description: putative phragmoplastin [Oryza sativa (japonica
  misc_feature (1)..(152): Homolog of NCBI NO: 34911188 NR Description: putative dynamin-like protein
  misc_feature (134)..(574): Homolog of NCBI NO: 34911188 NR Description: putative dynamin-like protein
  misc_feature (1)..(574): Homolog of NCBI NO: 30695480 NR Description: dynamin-related protein [Arabidopsis thaliana]
  misc_feature (1)..(123): Homolog of NCBI NO: 11357274 NR Description: dynamin-like protein - Arabidopsis thaliana
  misc_feature (74)..(574): Homolog of NCBI NO: 11357274 NR Description: dynamin-like protein - Arabidopsis thaliana
  misc_feature (1)..(572): Homolog of NCBI NO: 5931765 NR Description: phragmoplastin [Nicotiana tabacum]
  misc_feature (1)..(573): Homolog of NCBI NO: 2129825 NR Description: phragmoplastin 12 - soybean
  misc_feature (1)..(573): Homolog of NCBI NO: 2129826 NR Description: phragmoplastin 5 - soybean
  misc_feature (1)..(529): Homolog of NCBI NO: 2267213 NR Description: dynamin-like GTP binding protein [Arabidopsis
MENLISLVNKIQRACTALGDHGDSSALPTLWDSLPAIAVVGGQSSGKSSVLESIVGKDFLPRGSGIVTRRPLVLQLQKIDDGTREYAEFLHLPRKKFTDFAAVRKEIQDETDRETGRSKAISSVPIHLSIYSPNVVNLTLIDLPGLTKVAVDGQSDSIVKDIENMVRSYIEKPNCIILAISPANQDLATSDAIKISREVDPSGDRTFGVLTKIDLMDKGTDAVEILEGRSFKLKYPWVGVVNRSQADINKNVDMIAARKREREYFSNTTEYRHLANKMGSEHLAKMLSKHLERVIKSRIPGIQSLINKTVLELETELSRLGKPIAADAGGKLYSIMEICRLFDQIFKEHLDGVRAGGEKVYNVFDNQLPAALKRLQFDKQLAMDNIRKLVTEADGYQPHLIAPEQGYRRLIESSIVSIRGPAEASVDTVHAILKDLVHKSVNETVELKQYPALRVEVTNAAIESLDKMREGSKKATLQLVDMECSYLTVDFFRKLPQDVEKGGNPTHSIFDRYNDSYLRRIGSNVLSYVNMVCAGLRNSIPKSIVYCQVREAKRSLLDHFFAELGTMDMKRLSRRY

SEQ ID NO: 21350 - protein, 412 aa, Arabidopsis thaliana
  peptide (1)..(412): Ceres Seq. ID no. 13499583
  misc_feature (1)..(326): Homolog of NCBI NO: 4758182 NR Description: dynamin 1; dynamin; dynamin1; Dynamin-1 [Homo
  misc_feature (1)..(326): Homolog of NCBI NO: 539581 NR Description: dynamin, internal form 2, short C-terminal form -
  misc_feature (1)..(410): Homolog of NCBI NO: 37536976 NR Description: putative phragmoplastin [Oryza sativa (japonica
  misc_feature (1)..(410): Homolog of NCBI NO: 34911188 NR Description: putative dynamin-like protein
  misc_feature (1)..(410): Homolog of NCBI NO: 30695480 NR Description: dynamin-related protein [Arabidopsis thaliana]
  misc_feature (1)..(410): Homolog of NCBI NO: 11357274 NR Description: dynamin-like protein - Arabidopsis thaliana
  misc_feature (1)..(408): Homolog of NCBI NO: 5931765 NR Description: phragmoplastin [Nicotiana tabacum]
  misc_feature (1)..(409): Homolog of NCBI NO: 2129825 NR Description: phragmoplastin 12 - soybean
  misc_feature (1)..(409): Homolog of NCBI NO: 2129826 NR Description: phragmoplastin 5 - soybean
  misc_feature (1)..(365): Homolog of NCBI NO: 2267213 NR Description: dynamin-like GTP binding protein [Arabidopsis
MVRSYIEKPNCIILAISPANQDLATSDAIKISREVDPSGDRTFGVLTKIDLMDKGTDAVEILEGRSFKLKYPWVGVVNRSQADINKNVDMIAARKREREYFSNTTEYRHLANKMGSEHLAKMLSKHLERVIKSRIPGIQSLINKTVLELETELSRLGKPIAADAGGKLYSIMEICRLFDQIFKEHLDGVRAGGEKVYNVFDNQLPAALKRLQFDKQLAMDNIRKLVTEADGYQPHLIAPEQGYRRLIESSIVSIRGPAEASVDTVHAILKDLVHKSVNETVELKQYPALRVEVTNAAIESLDKMREGSKKATLQLVDMECSYLTVDFFRKLPQDVEKGGNPTHSIFDRYNDSYLRRIGSNVLSYVNMVCAGLRNSIPKSIVYCQVREAKRSLLDHFFAELGTMDMKRLSRRY

SEQ ID NO: 21351 - protein, 361 aa, Arabidopsis thaliana
  peptide (1)..(361): Ceres Seq. ID no. 13499584
  misc_feature (1)..(359): Homolog of NCBI NO: 11357274 NR Description: dynamin-like protein - Arabidopsis thaliana
  misc_feature (1)..(357): Homolog of NCBI NO: 5931765 NR Description: phragmoplastin [Nicotiana tabacum]
  misc_feature (1)..(358): Homolog of NCBI NO: 2129825 NR Description: phragmoplastin 12 - soybean
  misc_feature (1)..(358): Homolog of NCBI NO: 2129826 NR Description: phragmoplastin 5 - soybean
  misc_feature (1)..(314): Homolog of NCBI NO: 2267213 NR Description: dynamin-like GTP binding protein [Arabidopsis
  misc_feature (1)..(275): Homolog of NCBI NO: 4758182 NR Description: dynamin 1; dynamin; dynamin1; Dynamin-1 [Homo
  misc_feature (1)..(275): Homolog of NCBI NO: 539581 NR Description: dynamin, internal form 2, short C-terminal form -
  misc_feature (1)..(359): Homolog of NCBI NO: 37536976 NR Description: putative phragmoplastin [Oryza sativa (japonica
  misc_feature (1)..(359): Homolog of NCBI NO: 34911188 NR Description: putative dynamin-like protein
  misc_feature (1)..(359): Homolog of NCBI NO: 30695480 NR Description: dynamin-related protein [Arabidopsis thaliana]
MDKGTDAVEILEGRSFKLKYPWVGVVNRSQADINKNVDMIAARKREREYFSNTTEYRHLANKMGSEHLAKMLSKHLERVIKSRIPGIQSLINKTVLELETELSRLGKPIAADAGGKLYSIMEICRLFDQIFKEHLDGVRAGGEKVYNVFDNQLPAALKRLQFDKQLAMDNIRKLVTEADGYQPHLIAPEQGYRRLIESSIVSIRGPAEASVDTVHAILKDLVHKSVNETVELKQYPALRVEVTNAAIESLDKMREGSKKATLQLVDMECSYLTVDFFRKLPQDVEKGGNPTHSIFDRYNDSYLRRIGSNVLSYVNMVCAGLRNSIPKSIVYCQVREAKRSLLDHFFAELGTMDMKRLSRRY

SEQ ID NO: 21352 - DNA, 646 bp, Arabidopsis thaliana
  misc_feature (1)..(646): Ceres Seq. ID no. 12601909
  misc_feature: MA Experiment ID: 108434 Result: Up-regulated in Transcription
  misc_feature: MA Experiment 108434 PARAMETER Experiment Name: At_Root_Tips_cDNA_P Parameter: Tissue Value: Root Tips
  misc_feature: MA Experiment ID: 20000286 Result: Up-regulated in Transcription
  misc_feature: MA Experiment 20000286 PARAMETER Experiment Name: At_Open_Flower_P Parameter: Age (day) Value: 21
  misc_feature: MA Experiment 20000286 PARAMETER Experiment Name: At_Open_Flower_P Parameter: Plant Line Value: WS
  misc_feature: MA Experiment 20000286 PARAMETER Experiment Name: At_Open_Flower_P Parameter: Tissue Value: Half Open vs. Whole Plant
  misc_feature: MA Experiment ID: 20000495 Result: Down-regulated in Transcription
  misc_feature: MA Experiment 20000495 PARAMETER Experiment Name: At_Guard_Cells_P Parameter: Harvest Date Value: 8/2/2002
  misc_feature: MA Experiment 20000495 PARAMETER Experiment Name: At_Guard_Cells_P Parameter: Organism Value: A. thaliana
  misc_feature: MA Experiment 20000495 PARAMETER Experiment Name: At_Guard_Cells_P Parameter: Tissue Value: Guard Cells vs. Leaves
  misc_feature: MA Experiment ID: 20001451 Result: Down-regulated in Transcription
  misc_feature: MA Experiment 20001451 PARAMETER Experiment Name: At_Far-red-induction_P Parameter: Age (day) Value: 7
  misc_feature: MA Experiment 20001451 PARAMETER Experiment Name: At_Far-red-induction_P Parameter: Light Value: Far-red vs. White
  misc_feature: MA Experiment 20001451 PARAMETER Experiment Name: At_Far-red-induction_P Parameter: Organism Value: A. thaliana
  misc_feature: MA Experiment 20001451 PARAMETER Experiment Name: At_Far-red-induction_P Parameter: Plant Line Value: Columbia
  misc_feature: MA Experiment 20001451 PARAMETER Experiment Name: At_Far-red-induction_P Parameter: Timepoint (hr) Value: 24
  misc_feature: MA Experiment 20001451 PARAMETER Experiment Name: At_Far-red-induction_P Parameter: Tissue Value: Whole Plant
tttgccagaaagaaactgaagaactcttgactgtctctctgcggcgaaaaagagagcgaagcttgaaatctccgattaagccatgaatgctcccgaacgatatgagcgattcgtcgtccctgaaggcaccaagaaggtttcttatgatagggatacgaagatcatcaatgctgcttccttcacggttgagagagaagaccatacgattggaaacattgtccgcatgcaacttcatcgcgacgagaatgtcttgtttgctggataccaacttcctcatcctcttaagtacaaaatcatagtgaggattcacacaacaagccagtcttccccaatgcaagcatacaaccaggccatcaatgacttggacaaggagctcgactacttgaagaaccagtttgaggcagaggtggccaagttttcgaatcagttttaaggaacttggagttctccatcagcacatcggggaaaacgttttacattgtcttttgctaagcaccaatcaagactaataatgagcttgggaaattttccctagttatgctttgtataaatcaaaaacaaatcggcctgtaacttcttttaactctatgtttcaacaccatttcaggatgctatgaagtaatgcttagattacctcttcttttta

SEQ ID NO: 21353 - protein, 116 aa, Arabidopsis thaliana
  peptide (1)..(116): Ceres Seq. ID no. 12601910
  misc_feature (1)..(105): Homolog of NCBI NO: 21704274 NR Description: DNA directed RNA polymerase II polypeptide
  misc_feature (1)..(105): Homolog of NCBI NO: 21704272 NR Description: DNA directed RNA polymerase II polypeptide
  misc_feature (1)..(105): Homolog of NCBI NO: 31239143 NR Description: ENSANGP00000016837 [Anopheles gambiae]
  misc_feature (1)..(106): Homolog of NCBI NO: 19921456 NR Description: CG6840-PA [Drosophila melanogaster]
  misc_feature (1)..(105): Homolog of NCBI NO: 11595485 NR Description: RPB11a protein [Homo sapiens]
  misc_feature (1)..(109): Homolog of NCBI NO: 6755362 NR Description: polymerase (RNA) II (DNA directed) polypeptide J
  misc_feature (1)..(109): Homolog of NCBI NO: 5453932 NR Description: DNA directed RNA polymerase II polypeptide J
  misc_feature (1)..(114): Homolog of NCBI NO: 28828983 NR Description: similar to DNA-directed RNA polymerase II 13.6K
  misc_feature (1)..(115): Homolog of NCBI NO: 34394446 NR Description: putative DNA-directed RNA polymerase II 13.6K
  misc_feature (1)..(116): Homolog of NCBI NO: 15231127 NR Description: DNA-directed RNA polymerase II 13.6K chain
  misc_feature (1)..(105): Homolog of NCBI NO: 21704274 NR Description: DNA directed RNA polymerase II polypeptide
  misc_feature (1)..(105): Homolog of NCBI NO: 21704272 NR Description: DNA directed RNA polymerase II polypeptide
  misc_feature (1)..(105): Homolog of NCBI NO: 31239143 NR Description: ENSANGP00000016837 [Anopheles gambiae]
  misc_feature (1)..(106): Homolog of NCBI NO: 19921456 NR Description: CG6840-PA [Drosophila melanogaster]
  misc_feature (1)..(105): Homolog of NCBI NO: 11595485 NR Description: RPB11a protein [Homo sapiens]
  misc_feature (1)..(109): Homolog of NCBI NO: 6755362 NR Description: polymerase (RNA) II (DNA directed) polypeptide J
  misc_feature (1)..(109): Homolog of NCBI NO: 5453932 NR Description: DNA directed RNA polymerase II polypeptide J
  misc_feature (1)..(114): Homolog of NCBI NO: 28828983 NR Description: similar to DNA-directed RNA polymerase II 13.6K
  misc_feature (1)..(115): Homolog of NCBI NO: 34394446 NR Description: putative DNA-directed RNA polymerase II 13.6K
  misc_feature (1)..(116): Homolog of NCBI NO: 15231127 NR Description: DNA-directed RNA polymerase II 13.6K chain
MNAPERYERFVVPEGTKKVSYDRDTKIINAASFTVEREDHTIGNIVRMQLHRDENVLFAGYQLPHPLKYKIIVRIHTTSQSSPMQAYNQAINDLDKELDYLKNQFEAEVAKFSNQF

SEQ ID NO: 21354 - protein, 70 aa, Arabidopsis thaliana
  peptide (1)..(70): Ceres Seq. ID no. 12601911
MLPNDMSDSSSLKAPRRFLMIGIRRSSMLLPSRLREKTIRLETLSACNFIATRMSCLLDTNFLILLSTKS

SEQ ID NO: 21355 - protein, 69 aa, Arabidopsis thaliana
  peptide (1)..(69): Ceres Seq. ID no. 12601912
  misc_feature (1)..(58): Homolog of NCBI NO: 21704274 NR Description: DNA directed RNA polymerase II polypeptide
  misc_feature (1)..(58): Homolog of NCBI NO: 21704272 NR Description: DNA directed RNA polymerase II polypeptide
  misc_feature (1)..(58): Homolog of NCBI NO: 31239143 NR Description: ENSANGP00000016837 [Anopheles gambiae]
  misc_feature (1)..(59): Homolog of NCBI NO: 19921456 NR Description: CG6840-PA [Drosophila melanogaster]
  misc_feature (1)..(58): Homolog of NCBI NO: 11595485 NR Description: RPB11a protein [Homo sapiens]
  misc_feature (1)..(62): Homolog of NCBI NO: 6755362 NR Description: polymerase (RNA) II (DNA directed) polypeptide J
  misc_feature (1)..(62): Homolog of NCBI NO: 5453932 NR Description: DNA directed RNA polymerase II polypeptide J
  misc_feature (1)..(67): Homolog of NCBI NO: 28828983 NR Description: similar to DNA-directed RNA polymerase II 13.6K
  misc_feature (1)..(68): Homolog of NCBI NO: 34394446 NR Description: putative DNA-directed RNA polymerase II 13.6K
  misc_feature (1)..(69): Homolog of NCBI NO: 15231127 NR Description: DNA-directed RNA polymerase II 13.6K chain
  misc_feature (1)..(58): Homolog of NCBI NO: 21704274 NR Description: DNA directed RNA polymerase II polypeptide
  misc_feature (1)..(58): Homolog of NCBI NO: 21704272 NR Description: DNA directed RNA polymerase II polypeptide
  misc_feature (1)..(58): Homolog of NCBI NO: 31239143 NR Description: ENSANGP00000016837 [Anopheles gambiae]
  misc_feature (1)..(59): Homolog of NCBI NO: 19921456 NR Description: CG6840-PA [Drosophila melanogaster]
  misc_feature (1)..(58): Homolog of NCBI NO: 11595485 NR Description: RPB11a protein [Homo sapiens]
  misc_feature (1)..(62): Homolog of NCBI NO: 6755362 NR Description: polymerase (RNA) II (DNA directed) polypeptide J
  misc_feature (1)..(62): Homolog of NCBI NO: 5453932 NR Description: DNA directed RNA polymerase II polypeptide J
  misc_feature (1)..(67): Homolog of NCBI NO: 28828983 NR Description: similar to DNA-directed RNA polymerase II 13.6K
  misc_feature (1)..(68): Homolog of NCBI NO: 34394446 NR Description: putative DNA-directed RNA polymerase II 13.6K
  misc_feature (1)..(69): Homolog of NCBI NO: 15231127 NR Description: DNA-directed RNA polymerase II 13.6K chain
MQLHRDENVLFAGYQLPHPLKYKIIVRIHTTSQSSPMQAYNQAINDLDKELDYLKNQFEAEVAKFSNQF

SEQ ID NO: 21356 - DNA, 1334 bp, Arabidopsis thaliana
  misc_feature (1)..(1334): Ceres Seq. ID no. 12385426
  misc_feature: MA Experiment ID: 20000794 Result: Down-regulated in Transcription
  misc_feature: MA Experiment 20000794 PARAMETER Experiment Name: At_Petals_P Parameter: Age (day) Value: 23-25 days
  misc_feature: MA Experiment 20000794 PARAMETER Experiment Name: At_Petals_P Parameter: Plant Line Value: WS
  misc_feature: MA Experiment 20000794 PARAMETER Experiment Name: At_Petals_P Parameter: Tissue Value: Petals vs. Whole plant
  misc_feature: MA Experiment ID: 20001248 Result: Up-regulated in Transcription
  misc_feature: MA Experiment 20001248 PARAMETER Experiment Name: At_Far-red-induction_P Parameter: Age (day) Value: 7
  misc_feature: MA Experiment 20001248 PARAMETER Experiment Name: At_Far-red-induction_P Parameter: Light Value: Far-red vs. White
  misc_feature: MA Experiment 20001248 PARAMETER Experiment Name: At_Far-red-induction_P Parameter: Organism Value: A. thaliana
  misc_feature: MA Experiment 20001248 PARAMETER Experiment Name: At_Far-red-induction_P Parameter: Plant Line Value: Columbia
  misc_feature: MA Experiment 20001248 PARAMETER Experiment Name: At_Far-red-induction_P Parameter: Timepoint (hr) Value: 4
  misc_feature: MA Experiment 20001248 PARAMETER Experiment Name: At_Far-red-induction_P Parameter: Tissue Value: Whole Plant
  misc_feature: MA Experiment ID: 20001557 Result: Up-regulated in Transcription
  misc_feature: MA Experiment 20001557 PARAMETER Experiment Name: At_Drought_Soil_Dry_P Parameter: Age (day) Value: 27
  misc_feature: MA Experiment 20001557 PARAMETER Experiment Name: At_Drought_Soil_Dry_P Parameter: Organism Value: A. thaliana
  misc_feature: MA Experiment 20001557 PARAMETER Experiment Name: At_Drought_Soil_Dry_P Parameter: Plant Line Value: WS
  misc_feature: MA Experiment 20001557 PARAMETER Experiment Name: At_Drought_Soil_Dry_P Parameter: Post Timepoint (hr) Value: 3
  misc_feature: MA Experiment 20001557 PARAMETER Experiment Name: At_Drought_Soil_Dry_P Parameter: Post-Treatment Value: Re-Water vs. No Drought
  misc_feature: MA Experiment 20001557 PARAMETER Experiment Name: At_Drought_Soil_Dry_P Parameter: Timepoint (day) Value: 13
  misc_feature: MA Experiment 20001557 PARAMETER Experiment Name: At_Drought_Soil_Dry_P Parameter: Treatment Value: Drought vs. No Drought
  misc_feature: MA Experiment ID: 20001757 Result: Up-regulated in Transcription
  misc_feature: MA Experiment 20001757 PARAMETER Experiment Name: At_50mM_NH4NO3_L-to-H_P Parameter: Timepoint (hr) Value: 6
  misc_feature: MA Experiment 20001757 PARAMETER Experiment Name: At_50mM_NH4NO3_L-to-H_P Parameter: Tissue Value: Leaf
  misc_feature: MA Experiment 20001757 PARAMETER Experiment Name: At_50mM_NH4NO3_L-to-H_P Parameter: Treatment Value: 50mM NH4NO3 vs 100mM Mannitol
aaggcgcttgaattttgcgttttcagaatcttggtttctagggtttcacttaccttccctccgcgcccttgagctctctacctgagcttctccgggattcctaaagctgaaattcaaacacctccattttcatcctcaagggagataaataaaactctattgagtagaaaatgagtgctgcagcacacaggactcctaaatcagggaggcaatctctgctatttcaagatttagcttctcctgtttcagcacgtagagggaaattctcgagtccgggacaggcagctgcggtatctgcactatggcgtgagaatttcggaggatctgatcttccaccacctccaatgtatactttggatgaccggtccgatttctctcctgagtctggtattgcagactactctgcgtctccagatgctaagtctgacagaagaacaccattccagagttctggaaagaatattgtaactcctggtaaaggaaagttggaagcaagcccttctttttctctactgaatgcacaacagagtcagcaagtttcagggagtccgagttggtggtcgcagtcaaaggcaggtagtagtaccgagcaggatgataaagggaagggatctcctgtagaaggggtggttcagccaggtgcattggtcactcttccgccgccaagagaagttgctaggccagaggttcagaggcagattatacctacaggaaaccttgatgaggaagagtgggtcactgtctatggattttctccaggtgatacaaatttagtactacgggagtttgaaaaatgtggtatggtcttgaaacatgttcctggtccaagaaatgccaactggatgcacatcctctaccagaaccggtctgatgcacataaggcgctgaacaaagcagggatgatgataaacggagttgtaatagtaggagtgaagccagtagacccaatacagaagcaagcgttaaacgagagactcaacaaccaaggattcatgcctttacctccaccatcatccactagaaacactgctcgacccctgtctcgtcctcagtacttgcaaaacggcagcgctttctctcctcaaccaagtggtggcgctatggcctctccgtcaaagtcaatggtctcaaagttctttgacttgatgttcggtgtttaaaagctacttcaatggcatttcccgaatgattcttctttacacatagtttgaagtttttgagagcagagtggctaagtaaatcttagagcgtggtcaaaattaaaaattgtaagaggtgtttcaaattgtcttttgtattgacgacggctaaaaatttggtataaatctgattat

SEQ ID NO: 21357 - protein, 329 aa, Arabidopsis thaliana
  peptide (1)..(329): Ceres Seq. ID no. 12385427
  misc_feature (180)..(268): Pfam Name: MPPN (rrm-like) domain Pfam Description: MPPN (rrm-like) domain
  misc_feature (88)..(328): Homolog of NCBI NO: 4584796 NR Description: mitotic phosphoprotein 44 [Xenopus laevis]
  misc_feature (88)..(328): Homolog of NCBI NO: 15987768 NR Description: mitotic phosphoprotein 44 [Xenopus laevis]
  misc_feature (30)..(322): Homolog of NCBI NO: 19223941 NR Description: mitotic phosphoprotein 44 [Mus musculus]
  misc_feature (30)..(328): Homolog of NCBI NO: 34856476 NR Description: similar to CG6540-PA [Rattus norvegicus]
  misc_feature (131)..(328): Homolog of NCBI NO: 18859897 NR Description: CG6540-PA [Drosophila melanogaster]
  misc_feature (124)..(326): Homolog of NCBI NO: 34903646 NR Description: B1015E06.6 [Oryza sativa (japonica
  misc_feature (1)..(328): Homolog of NCBI NO: 17979410 NR Description: unknown protein [Arabidopsis thaliana]
  misc_feature (1)..(329): Homolog of NCBI NO: 18401087 NR Description: expressed protein
MSAAAHRTPKSGRQSLLFQDLASPVSARRGKFSSPGQAAAVSALWRENFGGSDLPPPPMYTLDDRSDFSPESGIADYSASPDAKSDRRTPFQSSGKNIVTPGKGKLEASPSFSLLNAQQSQQVSGSPSWWSQSKAGSSTEQDDKGKGSPVEGVVQPGALVTLPPPREVARPEVQRQIIPTGNLDEEEWVTVYGFSPGDTNLVLREFEKCGMVLKHVPGPRNANWMHILYQNRSDAHKALNKAGMMINGVVIVGVKPVDPIQKQALNERLNNQGFMPLPPPSSTRNTARPLSRPQYLQNGSAFSPQPSGGAMASPSKSMVSKFFDLMFGV

SEQ ID NO: 21358 - protein, 271 aa, Arabidopsis thaliana
  peptide (1)..(271): Ceres Seq. ID no. 12385428
  misc_feature (122)..(210): Pfam Name: MPPN (rrm-like) domain Pfam Description: MPPN (rrm-like) domain
  misc_feature (30)..(270): Homolog of NCBI NO: 4584796 NR Description: mitotic phosphoprotein 44 [Xenopus laevis]
  misc_feature (30)..(270): Homolog of NCBI NO: 15987768 NR Description: mitotic phosphoprotein 44 [Xenopus laevis]
  misc_feature (1)..(264): Homolog of NCBI NO: 19223941 NR Description: mitotic phosphoprotein 44 [Mus musculus]
  misc_feature (1)..(270): Homolog of NCBI NO: 34856476 NR Description: similar to CG6540-PA [Rattus norvegicus]
  misc_feature (73)..(270): Homolog of NCBI NO: 18859897 NR Description: CG6540-PA [Drosophila melanogaster]
  misc_feature (66)..(268): Homolog of NCBI NO: 34903646 NR Description: B1015E06.6 [Oryza sativa (japonica
  misc_feature (1)..(270): Homolog of NCBI NO: 17979410 NR Description: unknown protein [Arabidopsis thaliana]
  misc_feature (1)..(271): Homolog of NCBI NO: 18401087 NR Description: expressed protein
MYTLDDRSDFSPESGIADYSASPDAKSDRRTPFQSSGKNIVTPGKGKLEASPSFSLLNAQQSQQVSGSPSWWSQSKAGSSTEQDDKGKGSPVEGVVQPGALVTLPPPREVARPEVQRQIIPTGNLDEEEWVTVYGFSPGDTNLVLREFEKCGMVLKHVPGPRNANWMHILYQNRSDAHKALNKAGMMINGVVIVGVKPVDPIQKQALNERLNNQGFMPLPPPSSTRNTARPLSRPQYLQNGSAFSPQPSGGAMASPSKSMVSKFFDLMFGV

SEQ ID NO: 21359 - DNA, 861 bp, Arabidopsis thaliana
  misc_feature (1)..(861): Ceres Seq. ID no. 12321270
  misc_feature: MA Experiment ID: 20000169 Result: Down-regulated in Transcription
  misc_feature: MA Experiment 20000169 PARAMETER Experiment Name: At_100uM_ABA_P Parameter: Age (day) Value: 14
  misc_feature: MA Experiment 20000169 PARAMETER Experiment Name: At_100uM_ABA_P Parameter: Organism Value: A. thaliana
  misc_feature: MA Experiment 20000169 PARAMETER Experiment Name: At_100uM_ABA_P Parameter: Plant Line Value: WS
  misc_feature: MA Experiment 20000169 PARAMETER Experiment Name: At_100uM_ABA_P Parameter: Timepoint (hr) Value: 6
  misc_feature: MA Experiment 20000169 PARAMETER Experiment Name: At_100uM_ABA_P Parameter: Tissue Value: Aerial
  misc_feature: MA Experiment 20000169 PARAMETER Experiment Name: At_100uM_ABA_P Parameter: Treatment Value: 100uM ABA vs. No Treatment
  misc_feature: MA Experiment ID: 20000171 Result: Down-regulated in Transcription
  misc_feature: MA Experiment 20000171 PARAMETER Experiment Name: At_42deg_Heat_P Parameter: Age (day) Value: 14
  misc_feature: MA Experiment 20000171 PARAMETER Experiment Name: At_42deg_Heat_P Parameter: Organism Value: A. thaliana
  misc_feature: MA Experiment 20000171 PARAMETER Experiment Name: At_42deg_Heat_P Parameter: Plant Line Value: WS
  misc_feature: MA Experiment 20000171 PARAMETER Experiment Name: At_42deg_Heat_P Parameter: Temperature (deg C) Value: 42 vs. 22
  misc_feature: MA Experiment 20000171 PARAMETER Experiment Name: At_42deg_Heat_P Parameter: Timepoint (hr) Value: 1
  misc_feature: MA Experiment 20000171 PARAMETER Experiment Name: At_42deg_Heat_P Parameter: Tissue Value: Aerial
  misc_feature: MA Experiment ID: 20000179 Result: Down-regulated in Transcription
  misc_feature: MA Experiment 20000179 PARAMETER Experiment Name: At_Germinating_Seeds_P Parameter: Age (hr) Value: 6 vs. 0
  misc_feature: MA Experiment 20000179 PARAMETER Experiment Name: At_Germinating_Seeds_P Parameter: Tissue Value: Germinating Seeds
  misc_feature: MA Experiment ID: 20000182 Result: Down-regulated in Transcription
  misc_feature: MA Experiment 20000182 PARAMETER Experiment Name: At_2mM_SA_P Parameter: Age (day) Value: 14
  misc_feature: MA Experiment 20000182 PARAMETER Experiment Name: At_2mM_SA_P Parameter: Organism Value: A. thaliana
  misc_feature: MA Experiment 20000182 PARAMETER Experiment Name: At_2mM_SA_P Parameter: Plant Line Value: WS
  misc_feature: MA Experiment 20000182 PARAMETER Experiment Name: At_2mM_SA_P Parameter: Timepoint (hr) Value: 6
  misc_feature: MA Experiment 20000182 PARAMETER Experiment Name: At_2mM_SA_P Parameter: Tissue Value: Aerial
  misc_feature: MA Experiment 20000182 PARAMETER Experiment Name: At_2mM_SA_P Parameter: Treatment Value: 2mM SA vs. No Treatment
  misc_feature: MA Experiment ID: 20000211 Result: Up-regulated in Transcription
  misc_feature: MA Experiment 20000211 PARAMETER Experiment Name: At_0.001percent_MeJA__P Parameter: Age (day) Value: 14
  misc_feature: MA Experiment 20000211 PARAMETER Experiment Name: At_0.001percent_MeJA__P Parameter: Organism Value: A. thaliana
  misc_feature: MA Experiment 20000211 PARAMETER Experiment Name: At_0.001percent_MeJA__P Parameter: Plant Line Value: WS
  misc_feature: MA Experiment 20000211 PARAMETER Experiment Name: At_0.001percent_MeJA__P Parameter: Timepoint (hr) Value: 1
  misc_feature: MA Experiment 20000211 PARAMETER Experiment Name: At_0.001percent_MeJA__P Parameter: Tissue Value: Aerial
  misc_feature: MA Experiment 20000211 PARAMETER Experiment Name: At_0.001percent_MeJA__P Parameter: Treatment Value: 0.001percent MeJA vs. No Treatment
  misc_feature: MA Experiment ID: 20000214 Result: Up-regulated in Transcription
  misc_feature: MA Experiment 20000214 PARAMETER Experiment Name: At_4deg_Cold_P Parameter: Timepoint (hr) Value: 6
  misc_feature: MA Experiment ID: 20000227 Result: Down-regulated in Transcription
  misc_feature: MA Experiment 20000227 PARAMETER Experiment Name: At_Root-Tips-vs-Tops_P Parameter: Tissue Value: Root Tips vs. Root Tops
  misc_feature: MA Experiment ID: 20000437 Result: Down-regulated in Transcription
  misc_feature: MA Experiment 20000437 PARAMETER Experiment Name: At_Drought_P Parameter: Age (day) Value: 8
  misc_feature: MA Experiment 20000437 PARAMETER Experiment Name: At_Drought_P Parameter: Organism Value: A. thaliana
  misc_feature: MA Experiment 20000437 PARAMETER Experiment Name: At_Drought_P Parameter: Plant Line Value: WS
  misc_feature: MA Experiment 20000437 PARAMETER Experiment Name: At_Drought_P Parameter: Timepoint (hr) Value: 24
  misc_feature: MA Experiment 20000437 PARAMETER Experiment Name: At_Drought_P Parameter: Tissue Value: Whole Plant
  misc_feature: MA Experiment 20000437 PARAMETER Experiment Name: At_Drought_P Parameter: Treatment Value: Drought vs. No Drought
  misc_feature: MA Experiment ID: 20001560 Result: Down-regulated in Transcription
  misc_feature: MA Experiment 20001560 PARAMETER Experiment Name: At_Drought_Soil_Dry_P Parameter: Age (day) Value: 28
  misc_feature: MA Experiment 20001560 PARAMETER Experiment Name: At_Drought_Soil_Dry_P Parameter: Organism Value: A. thaliana
  misc_feature: MA Experiment 20001560 PARAMETER Experiment Name: At_Drought_Soil_Dry_P Parameter: Plant Line Value: WS
  misc_feature: MA Experiment 20001560 PARAMETER Experiment Name: At_Drought_Soil_Dry_P Parameter: Post Timepoint (hr) Value: None
  misc_feature: MA Experiment 20001560 PARAMETER Experiment Name: At_Drought_Soil_Dry_P Parameter: Post-Treatment Value: None
  misc_feature: MA Experiment 20001560 PARAMETER Experiment Name: At_Drought_Soil_Dry_P Parameter: Timepoint (day) Value: 14
  misc_feature: MA Experiment 20001560 PARAMETER Experiment Name: At_Drought_Soil_Dry_P Parameter: Treatment Value: Drought vs. No Drought
  misc_feature: MA Experiment ID: 20001757 Result: Up-regulated in Transcription
  misc_feature: MA Experiment 20001757 PARAMETER Experiment Name: At_50mM_NH4NO3_L-to-H_P Parameter: Timepoint (hr) Value: 6
  misc_feature: MA Experiment 20001757 PARAMETER Experiment Name: At_50mM_NH4NO3_L-to-H_P Parameter: Tissue Value: Leaf
  misc_feature: MA Experiment 20001757 PARAMETER Experiment Name: At_50mM_NH4NO3_L-to-H_P Parameter: Treatment Value: 50mM NH4NO3 vs 100mM Mannitol
  misc_feature: MA Experiment ID: 20001904 Result: Down-regulated in Transcription
  misc_feature: MA Experiment 20001904 PARAMETER Experiment Name: At_Drought_Reproduction_P Parameter: Age (day) Value: 37
  misc_feature: MA Experiment 20001904 PARAMETER Experiment Name: At_Drought_Reproduction_P Parameter: Organism Value: A. thaliana
  misc_feature: MA Experiment 20001904 PARAMETER Experiment Name: At_Drought_Reproduction_P Parameter: Plant Line Value: WS
  misc_feature: MA Experiment 20001904 PARAMETER Experiment Name: At_Drought_Reproduction_P Parameter: Timepoint (day) Value: 7
  misc_feature: MA Experiment 20001904 PARAMETER Experiment Name: At_Drought_Reproduction_P Parameter: Tissue Value: Rosettes
  misc_feature: MA Experiment 20001904 PARAMETER Experiment Name: At_Drought_Reproduction_P Parameter: Treatment Value: Drought vs. No Drought
  misc_feature: MA Experiment ID: 20001905 Result: Down-regulated in Transcription
  misc_feature: MA Experiment 20001905 PARAMETER Experiment Name: At_Drought_Reproduction_P Parameter: Age (day) Value: 40
  misc_feature: MA Experiment 20001905 PARAMETER Experiment Name: At_Drought_Reproduction_P Parameter: Organism Value: A. thaliana
  misc_feature: MA Experiment 20001905 PARAMETER Experiment Name: At_Drought_Reproduction_P Parameter: Plant Line Value: WS
  misc_feature: MA Experiment 20001905 PARAMETER Experiment Name: At_Drought_Reproduction_P Parameter: Timepoint (day) Value: 10
  misc_feature: MA Experiment 20001905 PARAMETER Experiment Name: At_Drought_Reproduction_P Parameter: Tissue Value: Rosettes
  misc_feature: MA Experiment 20001905 PARAMETER Experiment Name: At_Drought_Reproduction_P Parameter: Treatment Value: Drought vs. No Drought
  misc_feature: MA Experiment ID: 20001906 Result: Down-regulated in Transcription
  misc_feature: MA Experiment 20001906 PARAMETER Experiment Name: At_Drought_Reproduction_P Parameter: Age (day) Value: 35
  misc_feature: MA Experiment 20001906 PARAMETER Experiment Name: At_Drought_Reproduction_P Parameter: Organism Value: A. thaliana
  misc_feature: MA Experiment 20001906 PARAMETER Experiment Name: At_Drought_Reproduction_P Parameter: Plant Line Value: WS
  misc_feature: MA Experiment 20001906 PARAMETER Experiment Name: At_Drought_Reproduction_P Parameter: Timepoint (day) Value: 5
  misc_feature: MA Experiment 20001906 PARAMETER Experiment Name: At_Drought_Reproduction_P Parameter: Tissue Value: Siliques
  misc_feature: MA Experiment 20001906 PARAMETER Experiment Name: At_Drought_Reproduction_P Parameter: Treatment Value: Drought vs. No Drought
  misc_feature: MA Experiment ID: 20001908 Result: Down-regulated in Transcription
  misc_feature: MA Experiment 20001908 PARAMETER Experiment Name: At_Drought_Reproduction_P Parameter: Age (day) Value: 40
  misc_feature: MA Experiment 20001908 PARAMETER Experiment Name: At_Drought_Reproduction_P Parameter: Organism Value: A. thaliana
  misc_feature: MA Experiment 20001908 PARAMETER Experiment Name: At_Drought_Reproduction_P Parameter: Plant Line Value: WS
  misc_feature: MA Experiment 20001908 PARAMETER Experiment Name: At_Drought_Reproduction_P Parameter: Timepoint (day) Value: 10
  misc_feature: MA Experiment 20001908 PARAMETER Experiment Name: At_Drought_Reproduction_P Parameter: Tissue Value: Siliques
  misc_feature: MA Experiment 20001908 PARAMETER Experiment Name: At_Drought_Reproduction_P Parameter: Treatment Value: Drought vs. No Drought
acacactcaaatatctctccaacactaaaataattgtaccgactctctctctctctctctccgtaacaaaaaaatcaccaatggcaaaacaatatctctttgtactcctctcaatctcctatctcttatcactggagctcacggcggccaccgcagcctcacagaccggagcttccaaaaaagccataaacttcatccaatcttcttgcaaaaccaccacataccctgccttatgtgtccactcactctccgtctacgcaaacgacatccaaacaagccctaaacgtttagctgagaccgctatagccgtgacactaagccgagcccaatccacgaagctcttcgtctcgcgtctaacacgtatgaagggtcttaagaagcgcgaggtcgaagccatcaaagattgcgtcgaggagatgaacgataccgttgaccgtttgaccaaatctgttcaagaactgaagttgtgtgggagtgccaaagatcaagaccagtttgcgtaccacatgagtaatgctcagacttggactagtgcggctttgactgacgagaacacttgctccgatgggttctcgggtcgggttatggatgggaggatcaagaactcggttcgggctagaatcatgaacgtgggacatgaaaccagcaacgctttgtccttgattaatgcctttgctaaaacttactaatttaaaactatattttgtcctgtaaaatatatatatagataaatgtaatgtcttgctaagagtttgatgtgatatatttttttcgattttggtagtttctttttgttttgtaacgtggtttataatagtataatgtgtattttgagctataaagttgtttttaagattggat

SEQ ID NO: 21360 - protein, 228 aa, Arabidopsis thaliana
  peptide (1)..(228): Ceres Seq. ID no. 12321271
  misc_feature (26)..(225): Homolog of NCBI NO: 21555297 NR Description: unknown [Arabidopsis thaliana]
  misc_feature (26)..(225): Homolog of NCBI NO: 15234547 NR Description: putative protein
  misc_feature (36)..(225): Homolog of NCBI NO: 112717 NR Description: 21 KD PROTEIN PRECURSOR (1.2 PROTEIN)
  misc_feature (27)..(228): Homolog of NCBI NO: 15234982 NR Description: putative protein
  misc_feature (57)..(225): Homolog of NCBI NO: 7488727 NR Description: 21K protein precursor - alfalfa
  misc_feature (27)..(225): Homolog of NCBI NO: 7406663 NR Description: putative ripening-related protein [Vitis vinifera]
  misc_feature (27)..(228): Homolog of NCBI NO: 15232790 NR Description: putative protein; protein id: At3g47380.1
  misc_feature (76)..(228): Homolog of NCBI NO: 11127599 NR Description: DC 1.2 homolog [Arabidopsis thaliana]
  misc_feature (27)..(228): Homolog of NCBI NO: 21618088 NR Description: ripening-related protein-like [Arabidopsis
  misc_feature (27)..(228): Homolog of NCBI NO: 15241799 NR Description: ripening-related protein - like
TLKYLSNTKIIVPTLSLSLSVTKKSPMAKQYLFVLLSISYLLSLELTAATAASQTGASKKAINFIQSSCKTTTYPALCVHSLSVYANDIQTSPKRLAETAIAVTLSRAQSTKLFVSRLTRMKGLKKREVEAIKDCVEEMNDTVDRLTKSVQELKLCGSAKDQDQFAYHMSNAQTWTSAALTDENTCSDGFSGRVMDGRIKNSVRARIMNVGHETSNALSLINAFAKTY

SEQ ID NO: 21361 - protein, 202 aa, Arabidopsis thaliana
  peptide (1)..(202): Ceres Seq. ID no. 12321272
  misc_feature (1)..(199): Homolog of NCBI NO: 21555297 NR Description: unknown [Arabidopsis thaliana]
  misc_feature (1)..(199): Homolog of NCBI NO: 15234547 NR Description: putative protein
  misc_feature (10)..(199): Homolog of NCBI NO: 112717 NR Description: 21 KD PROTEIN PRECURSOR (1.2 PROTEIN)
  misc_feature (1)..(202): Homolog of NCBI NO: 15234982 NR Description: putative protein
  misc_feature (31)..(199): Homolog of NCBI NO: 7488727 NR Description: 21K protein precursor - alfalfa
  misc_feature (1)..(199): Homolog of NCBI NO: 7406663 NR Description: putative ripening-related protein [Vitis vinifera]
  misc_feature (1)..(202): Homolog of NCBI NO: 15232790 NR Description: putative protein; protein id: At3g47380.1
  misc_feature (50)..(202): Homolog of NCBI NO: 11127599 NR Description: DC 1.2 homolog [Arabidopsis thaliana]
  misc_feature (1)..(202): Homolog of NCBI NO: 21618088 NR Description: ripening-related protein-like [Arabidopsis
  misc_feature (1)..(202): Homolog of NCBI NO: 15241799 NR Description: ripening-related protein - like
MAKQYLFVLLSISYLLSLELTAATAASQTGASKKAINFIQSSCKTTTYPALCVHSLSVYANDIQTSPKRLAETAIAVTLSRAQSTKLFVSRLTRMKGLKKREVEAIKDCVEEMNDTVDRLTKSVQELKLCGSAKDQDQFAYHMSNAQTWTSAALTDENTCSDGFSGRVMDGRIKNSVRARIMNVGHETSNALSLINAFAKTY

SEQ ID NO: 21362 - DNA, 1173 bp, Arabidopsis thaliana
  misc_feature (1)..(1173): Ceres Seq. ID no. 13486782
  misc_feature: MA Experiment ID: 108434 Result: Down-regulated in Transcription
  misc_feature: MA Experiment 108434 PARAMETER Experiment Name: At_Root_Tips_cDNA_P Parameter: Tissue Value: Root Tips
  misc_feature: MA Experiment ID: 108463 Result: Up-regulated in Transcription
  misc_feature: MA Experiment 108463 PARAMETER Experiment Name: At_Germinating_Seeds_cDNA_P Parameter: Age (day) Value: 3 vs. 0
  misc_feature: MA Experiment 108463 PARAMETER Experiment Name: At_Germinating_Seeds_cDNA_P Parameter: Tissue Value: Germinating Seeds
  misc_feature: MA Experiment ID: 108464 Result: Up-regulated in Transcription
  misc_feature: MA Experiment 108464 PARAMETER Experiment Name: At_Germinating_Seeds_cDNA_P Parameter: Age (day) Value: 4 vs. 0
  misc_feature: MA Experiment 108464 PARAMETER Experiment Name: At_Germinating_Seeds_cDNA_P Parameter: Tissue Value: Germinating Seeds
  misc_feature: MA Experiment ID: 108469 Result: Up-regulated in Transcription
  misc_feature: MA Experiment ID: 108501 Result: Down-regulated in Transcription
  misc_feature: MA Experiment 108501 PARAMETER Experiment Name: At_ap2_floral_buds_cDNA_P Parameter: Plant Line Value: ap2 (Ler.)
  misc_feature: MA Experiment 108501 PARAMETER Experiment Name: At_ap2_floral_buds_cDNA_P Parameter: Tissue Value: Closed Flower
  misc_feature: MA Experiment ID: 108573 Result: Down-regulated in Transcription
  misc_feature: MA Experiment 108573 PARAMETER Experiment Name: At_Drought_cDNA_P Parameter: Timepoint (hr) Value: 6
  misc_feature: MA Experiment 108573 PARAMETER Experiment Name: At_Drought_cDNA_P Parameter: Tissue Value: Aerial
  misc_feature: MA Experiment 108573 PARAMETER Experiment Name: At_Drought_cDNA_P Parameter: Treatment Value: Drought vs. No Drought
  misc_feature: MA Experiment ID: 108585 Result: Up-regulated in Transcription
  misc_feature: MA Experiment 108585 PARAMETER Experiment Name: At_5mM_NaNP_cDNA_P Parameter: Timepoint (hr) Value: 6
  misc_feature: MA Experiment 108585 PARAMETER Experiment Name: At_5mM_NaNP_cDNA_P Parameter: Tissue Value: Aerial
  misc_feature: MA Experiment 108585 PARAMETER Experiment Name: At_5mM_NaNP_cDNA_P Parameter: Treatment Value: null
  misc_feature: MA Experiment ID: 108595 Result: Down-regulated in Transcription
  misc_feature: MA Experiment 108595 PARAMETER Experiment Name: At_Ler-pi_Ovule_cDNA_P Parameter: Plant Line Value: null
  misc_feature: MA Experiment ID: 108668 Result: Up-regulated in Transcription
  misc_feature: MA Experiment 108668 PARAMETER Experiment Name: At_2mM_SA_cDNA_P Parameter: Plant Line Value: WS
  misc_feature: MA Experiment 108668 PARAMETER Experiment Name: At_2mM_SA_cDNA_P Parameter: Timepoint (hr) Value: 6
  misc_feature: MA Experiment 108668 PARAMETER Experiment Name: At_2mM_SA_cDNA_P Parameter: Treatment Value: 2mM SA vs. No Treatment
  misc_feature: MA Experiment ID: 20000090 Result: Up-regulated in Transcription
  misc_feature: MA Experiment ID: 20000182 Result: Up-regulated in Transcription
  misc_feature: MA Experiment 20000182 PARAMETER Experiment Name: At_2mM_SA_P Parameter: Age (day) Value: 14
  misc_feature: MA Experiment 20000182 PARAMETER Experiment Name: At_2mM_SA_P Parameter: Organism Value: A. thaliana
  misc_feature: MA Experiment 20000182 PARAMETER Experiment Name: At_2mM_SA_P Parameter: Plant Line Value: WS
  misc_feature: MA Experiment 20000182 PARAMETER Experiment Name: At_2mM_SA_P Parameter: Timepoint (hr) Value: 6
  misc_feature: MA Experiment 20000182 PARAMETER Experiment Name: At_2mM_SA_P Parameter: Tissue Value: Aerial
  misc_feature: MA Experiment 20000182 PARAMETER Experiment Name: At_2mM_SA_P Parameter: Treatment Value: 2mM SA vs. No Treatment
  misc_feature: MA Experiment ID: 20000234 Result: Down-regulated in Transcription
  misc_feature: MA Experiment 20000234 PARAMETER Experiment Name: At_Siliques_P Parameter: Age (day) Value: 21
  misc_feature: MA Experiment 20000234 PARAMETER Experiment Name: At_Siliques_P Parameter: Organism Value: A. thaliana
  misc_feature: MA Experiment 20000234 PARAMETER Experiment Name: At_Siliques_P Parameter: Plant Line Value: WS
  misc_feature: MA Experiment 20000234 PARAMETER Experiment Name: At_Siliques_P Parameter: Tissue Value: Less Than 5mm Siliques vs. Whole Plant
  misc_feature: MA Experiment ID: 20000235 Result: Down-regulated in Transcription
  misc_feature: MA Experiment 20000235 PARAMETER Experiment Name: At_Siliques_P Parameter: Age (day) Value: 21
  misc_feature: MA Experiment 20000235 PARAMETER Experiment Name: At_Siliques_P Parameter: Organism Value: A. thaliana
  misc_feature: MA Experiment 20000235 PARAMETER Experiment Name: At_Siliques_P Parameter: Plant Line Value: WS
  misc_feature: MA Experiment 20000235 PARAMETER Experiment Name: At_Siliques_P Parameter: Tissue Value: 5-10mm Siliques vs. Whole Plant
  misc_feature: MA Experiment ID: 20000286 Result: Down-regulated in Transcription
  misc_feature: MA Experiment 20000286 PARAMETER Experiment Name: At_Open_Flower_P Parameter: Age (day) Value: 21
  misc_feature: MA Experiment 20000286 PARAMETER Experiment Name: At_Open_Flower_P Parameter: Plant Line Value: WS
  misc_feature: MA Experiment 20000286 PARAMETER Experiment Name: At_Open_Flower_P Parameter: Tissue Value: Half Open vs. Whole Plant
  misc_feature: MA Experiment ID: 20000438 Result: Down-regulated in Transcription
  misc_feature: MA Experiment 20000438 PARAMETER Experiment Name: At_Shoots__P Parameter: Age (day) Value: 14
  misc_feature: MA Experiment 20000438 PARAMETER Experiment Name: At_Shoots__P Parameter: Tissue Value: Shoots vs. Whole Plant
gaactctagtgttaagatttagcagagagtatccgaatgggaaattgtctctcagcttcgacacttcccaccgaaccaaatgctcccaaatcagtggaggagggtgtgaaagtcttcacggtggcagatctgaagaaagcgactaatgatttcggaaaccagatggaactaggagagagcttaggatacatcaatcccaaaacgttatctccggccaagaaaggtgttggcatggccgtcgcggtcaagaaaatttacttagccaatgaacaagcttttcaagattggcttgttgacgtagagtttctacgacataactctcatccaagcttggtgaagctaattggctactgttatgatcgtgatatgttgtttattgtttctgaatactttccaaatggaagcttaggaagttacatcagtagagatagtcgtccaaagtcattgccgtgggagacacgacttaagatatccataggagcggctcagtgtcttgccttcttgcactctaggaagcaagccggtctataccgcagatatctcactgcttcgaaaatcctgctcgactcggacttcaacgcaagagtttcctattttggaaagccaaaagtttctctcgatgaattggtatacaccatcgggttttcaaatgtagcacctagatatcaatacccacctcccgaatacatactctcagggatgtcgaacatggcgggcgatgtgtatagctttggtgttatactacttaaaatgttaactggtttaggaaaagacctcacaatctcagcaaagcgagaaataaaaaataaaaagtacaacattgtggagatgatcgatccagatttgaagaatagctatccacttgaagcgggaagacttatgtgcgagcttattaaacaatgcctagaggtagacccgaagatgcgaccaaccatgcaagaagtgctagataatctgaatgctatagctcagatttgaggagaaactatataagggttactaatgctgaaaacattgtttcactataagacagttataacatagtcaatgtatgcatttgtatacaataactcgtatatgacgagaagtattaagaaacaagacctaattctccattcttatccaccactcaagaacagagctatatgctaatcaactttgaacctttacact

SEQ ID NO: 21363 - protein, 313 aa, Arabidopsis thaliana
  peptide (1)..(313): Ceres Seq. ID no. 13486783
  misc_feature (24)..(310): Homolog of NCBI NO: 30690422 NR Description: protein kinase family [Arabidopsis thaliana]
  misc_feature (24)..(310): Homolog of NCBI NO: 7434285 NR Description: probable serine/threonine-specific protein kinase
  misc_feature (6)..(310): Homolog of NCBI NO: 28804505 NR Description: serine/threonine protein kinase [Aster tripolium]
  misc_feature (8)..(310): Homolog of NCBI NO: 37534182 NR Description: putative serine /threonine kinase similar to NAK
  misc_feature (3)..(313): Homolog of NCBI NO: 15242204 NR Description: serine/threonine specific protein kinase -related
  misc_feature (7)..(313): Homolog of NCBI NO: 38345396 NR Description: OSJNBa0017B10.2 [Oryza sativa (japonica
  misc_feature (26)..(313): Homolog of NCBI NO: 30699159 NR Description: protein kinase, putative [Arabidopsis thaliana]
  misc_feature (14)..(313): Homolog of NCBI NO: 25287650 NR Description: hypothetical protein F15M4.14 [imported] -
  misc_feature (6)..(313): Homolog of NCBI NO: 15239047 NR Description: protein kinase family [Arabidopsis thaliana]
  misc_feature (1)..(313): Homolog of NCBI NO: 22327062 NR Description: protein kinase family [Arabidopsis thaliana]
MGNCLSASTLPTEPNAPKSVEEGVKVFTVADLKKATNDFGNQMELGESLGYINPKTLSPAKKGVGMAVAVKKIYLANEQAFQDWLVDVEFLRHNSHPSLVKLIGYCYDRDMLFIVSEYFPNGSLGSYISRDSRPKSLPWETRLKISIGAAQCLAFLHSRKQAGLYRRYLTASKILLDSDFNARVSYFGKPKVSLDELVYTIGFSNVAPRYQYPPPEYILSGMSNMAGDVYSFGVILLKMLTGLGKDLTISAKREIKNKKYNIVEMIDPDLKNSYPLEAGRLMCELIKQCLEVDPKMRPTMQEVLDNLNAIAQI

SEQ ID NO: 21364 - protein, 271 aa, Arabidopsis thaliana
  peptide (1)..(271): Ceres Seq. ID no. 13486784
  misc_feature (1)..(268): Homolog of NCBI NO: 25287611 NR Description: protein kinase-like protein [imported] -
  misc_feature (1)..(268): Homolog of NCBI NO: 7434285 NR Description: probable serine/threonine-specific protein kinase
  misc_feature (1)..(268): Homolog of NCBI NO: 28804505 NR Description: serine/threonine protein kinase [Aster tripolium]
  misc_feature (1)..(268): Homolog of NCBI NO: 37534182 NR Description: putative serine /threonine kinase similar to NAK
  misc_feature (1)..(271): Homolog of NCBI NO: 15242204 NR Description: serine/threonine specific protein kinase -related
  misc_feature (1)..(271): Homolog of NCBI NO: 38345396 NR Description: OSJNBa0017B10.2 [Oryza sativa (japonica
  misc_feature (1)..(271): Homolog of NCBI NO: 30699159 NR Description: protein kinase, putative [Arabidopsis thaliana]
  misc_feature (1)..(271): Homolog of NCBI NO: 25287650 NR Description: hypothetical protein F15M4.14 [imported] -
  misc_feature (1)..(271): Homolog of NCBI NO: 15239047 NR Description: protein kinase family [Arabidopsis thaliana]
  misc_feature (1)..(271): Homolog of NCBI NO: 22327062 NR Description: protein kinase family [Arabidopsis thaliana]
MELGESLGYINPKTLSPAKKGVGMAVAVKKIYLANEQAFQDWLVDVEFLRHNSHPSLVKLIGYCYDRDMLFIVSEYFPNGSLGSYISRDSRPKSLPWETRLKISIGAAQCLAFLHSRKQAGLYRRYLTASKILLDSDFNARVSYFGKPKVSLDELVYTIGFSNVAPRYQYPPPEYILSGMSNMAGDVYSFGVILLKMLTGLGKDLTISAKREIKNKKYNIVEMIDPDLKNSYPLEAGRLMCELIKQCLEVDPKMRPTMQEVLDNLNAIAQI

SEQ ID NO: 21365 - protein, 248 aa, Arabidopsis thaliana
  peptide (1)..(248): Ceres Seq. ID no. 13486785
  misc_feature (1)..(248): Homolog of NCBI NO: 22327062 NR Description: protein kinase family [Arabidopsis thaliana]
  misc_feature (1)..(245): Homolog of NCBI NO: 25287611 NR Description: protein kinase-like protein [imported] -
  misc_feature (1)..(245): Homolog of NCBI NO: 7434285 NR Description: probable serine/threonine-specific protein kinase
  misc_feature (1)..(245): Homolog of NCBI NO: 28804505 NR Description: serine/threonine protein kinase [Aster tripolium]
  misc_feature (1)..(245): Homolog of NCBI NO: 37534182 NR Description: putative serine /threonine kinase similar to NAK
  misc_feature (1)..(248): Homolog of NCBI NO: 15242204 NR Description: serine/threonine specific protein kinase -related
  misc_feature (1)..(248): Homolog of NCBI NO: 38345396 NR Description: OSJNBa0017B10.2 [Oryza sativa (japonica
  misc_feature (1)..(248): Homolog of NCBI NO: 30699159 NR Description: protein kinase, putative [Arabidopsis thaliana]
  misc_feature (1)..(248): Homolog of NCBI NO: 25287650 NR Description: hypothetical protein F15M4.14 [imported] -
  misc_feature (1)..(248): Homolog of NCBI NO: 15239047 NR Description: protein kinase family [Arabidopsis thaliana]
MAVAVKKIYLANEQAFQDWLVDVEFLRHNSHPSLVKLIGYCYDRDMLFIVSEYFPNGSLGSYISRDSRPKSLPWETRLKISIGAAQCLAFLHSRKQAGLYRRYLTASKILLDSDFNARVSYFGKPKVSLDELVYTIGFSNVAPRYQYPPPEYILSGMSNMAGDVYSFGVILLKMLTGLGKDLTISAKREIKNKKYNIVEMIDPDLKNSYPLEAGRLMCELIKQCLEVDPKMRPTMQEVLDNLNAIAQI

SEQ ID NO: 21366 - DNA, 947 bp, Arabidopsis thaliana
  misc_feature (1)..(947): Ceres Seq. ID no. 12322248
  misc_feature: MA Experiment ID: 108434 Result: Up-regulated in Transcription
  misc_feature: MA Experiment 108434 PARAMETER Experiment Name: At_Root_Tips_cDNA_P Parameter: Tissue Value: Root Tips
  misc_feature: MA Experiment ID: 108577 Result: Down-regulated in Transcription
  misc_feature: MA Experiment 108577 PARAMETER Experiment Name: At_42deg_Heat_cDNA_P Parameter: Temperature (deg C) Value: 42 vs. 22
  misc_feature: MA Experiment 108577 PARAMETER Experiment Name: At_42deg_Heat_cDNA_P Parameter: Timepoint (hr) Value: 6
  misc_feature: MA Experiment 108577 PARAMETER Experiment Name: At_42deg_Heat_cDNA_P Parameter: Tissue Value: Aerial
  misc_feature: MA Experiment ID: 108579 Result: Down-regulated in Transcription
  misc_feature: MA Experiment 108579 PARAMETER Experiment Name: At_4deg_Cold_cDNA_P Parameter: Temperature (deg C) Value: 4 vs. 22
  misc_feature: MA Experiment 108579 PARAMETER Experiment Name: At_4deg_Cold_cDNA_P Parameter: Timepoint (hr) Value: 6
  misc_feature: MA Experiment 108579 PARAMETER Experiment Name: At_4deg_Cold_cDNA_P Parameter: Tissue Value: Aerial
  misc_feature: MA Experiment ID: 20000224 Result: Up-regulated in Transcription
  misc_feature: MA Experiment ID: 20000438 Result: Down-regulated in Transcription
  misc_feature: MA Experiment 20000438 PARAMETER Experiment Name: At_Shoots__P Parameter: Age (day) Value: 14
  misc_feature: MA Experiment 20000438 PARAMETER Experiment Name: At_Shoots__P Parameter: Tissue Value: Shoots vs. Whole Plant
  misc_feature: MA Experiment ID: 20000794 Result: Up-regulated in Transcription
  misc_feature: MA Experiment 20000794 PARAMETER Experiment Name: At_Petals_P Parameter: Age (day) Value: 23-25 days
  misc_feature: MA Experiment 20000794 PARAMETER Experiment Name: At_Petals_P Parameter: Plant Line Value: WS
  misc_feature: MA Experiment 20000794 PARAMETER Experiment Name: At_Petals_P Parameter: Tissue Value: Petals vs. Whole plant
atcaatatcaaattgtcgaatttacacgaagaacaaaaataaggaatcgagagagagagagagagagataggcgcatatatgggaagaaaatgagagaaaaatggaaactttgaccgccattgaacactcacgagatctcttcttcttgtatttcttctctctcctctctgtctgatgcgtgttcttgattcatcggctcagatcagtcaccaaatagaataaatagcaaacaagatcctctgtggaatttgatacatagagaaactgtctagtgctgtggtgtcttttgagattttcttgtggttctgtggattgtttgttggttggttgcttcttggataaatggcagaagtccataatcaactagagatcaagtttcggttaaccgatggttcggatatcggtcctaaagcattccctgatgctacaactgtttcggctttgaaggaaactgttatttctgaatggccaagagagaaggagaatggaccgaaaacagtgaaagaggtgaagttgataagcgcagggaaggtattggagaacagcaagacggttaaagactaccgaagtcctgtctctaatctcgcaggcgctgtcaccacaatgcacgttatcatccaagctccggttacggaaaaagaaaagaagcctaaaggtgacccgaagatgaacaaatgcgtctgttcagtcatgtaagagagtagcaaaatctcaagagagactcatcagatttctggtccttaagtttggtctttcttgtggttagtatagattgtttactaatacagatacagaattaaagagtattgaaccatttttttttataataaaaaaatagtataaatcaaagctctactctagcttgttgcaagattgaaagagatcatcaataaaatcaaggtactggtgattcagttcctcttaatggagtctctgttttagctct

SEQ ID NO: 21367 - protein, 117 aa, Arabidopsis thaliana
  peptide (1)..(117): Ceres Seq. ID no. 12322249
  misc_feature (8)..(95): Pfam Name: Ubiquitin family Pfam Description: Ubiquitin family
  misc_feature (8)..(117): Homolog of NCBI NO: 15234839 NR Description: expressed protein
  misc_feature (2)..(117): Homolog of NCBI NO: 38347220 NR Description: OSJNBa0055C08.14 [Oryza sativa (japonica
  misc_feature (1)..(100): Homolog of NCBI NO: 25402954 NR Description: protein F2E2.12 [imported] - Arabidopsis thaliana
  misc_feature (4)..(117): Homolog of NCBI NO: 4097587 NR Description: NTGP5 [Nicotiana tabacum]
  misc_feature (8)..(117): Homolog of NCBI NO: 15218145 NR Description: expressed protein
  misc_feature (8)..(117): Homolog of NCBI NO: 21592966 NR Description: ubiquitin-fusion protein, putative [Arabidopsis
  misc_feature (1)..(117): Homolog of NCBI NO: 15219188 NR Description: expressed protein; protein id: At1g22050.1
  misc_feature (1)..(99): Homolog of NCBI NO: 11358132 NR Description: hypothetical protein T20K14_70 - Arabidopsis
  misc_feature (1)..(114): Homolog of NCBI NO: 18417680 NR Description: expressed protein
  misc_feature (1)..(117): Homolog of NCBI NO: 15232032 NR Description: expressed protein; protein id: At3g01050.1
MAEVHNQLEIKFRLTDGSDIGPKAFPDATTVSALKETVISEWPREKENGPKTVKEVKLISAGKVLENSKTVKDYRSPVSNLAGAVTTMHVIIQAPVTEKEKKPKGDPKMNKCVCSVM

SEQ ID NO: 21368 - DNA, 1766 bp, Arabidopsis thaliana
  misc_feature (1)..(1766): Ceres Seq. ID no. 12321273
  misc_feature: MA Experiment ID: 108463 Result: Up-regulated in Transcription
  misc_feature: MA Experiment 108463 PARAMETER Experiment Name: At_Germinating_Seeds_cDNA_P Parameter: Age (day) Value: 3 vs. 0
  misc_feature: MA Experiment 108463 PARAMETER Experiment Name: At_Germinating_Seeds_cDNA_P Parameter: Tissue Value: Germinating Seeds
  misc_feature: MA Experiment ID: 20000090 Result: Down-regulated in Transcription
  misc_feature: MA Experiment ID: 20000184 Result: Up-regulated in Transcription
  misc_feature: MA Experiment 20000184 PARAMETER Experiment Name: At_Shoots__P Parameter: Age (day) Value: 7
  misc_feature: MA Experiment 20000184 PARAMETER Experiment Name: At_Shoots__P Parameter: Tissue Value: Shoots vs. Whole Plant
  misc_feature: MA Experiment ID: 20000264 Result: Up-regulated in Transcription
  misc_feature: MA Experiment 20000264 PARAMETER Experiment Name: At_Open_Flower_P Parameter: Age (day) Value: 21
  misc_feature: MA Experiment 20000264 PARAMETER Experiment Name: At_Open_Flower_P Parameter: Plant Line Value: WS
  misc_feature: MA Experiment 20000264 PARAMETER Experiment Name: At_Open_Flower_P Parameter: Tissue Value: Open Flower vs. Whole Plant
  misc_feature: MA Experiment ID: 20000438 Result: Up-regulated in Transcription
  misc_feature: MA Experiment 20000438 PARAMETER Experiment Name: At_Shoots__P Parameter: Age (day) Value: 14
  misc_feature: MA Experiment 20000438 PARAMETER Experiment Name: At_Shoots__P Parameter: Tissue Value: Shoots vs. Whole Plant
  misc_feature: MA Experiment ID: 20000439 Result: Down-regulated in Transcription
  misc_feature: MA Experiment 20000439 PARAMETER Experiment Name: At_Roots__P Parameter: Age (day) Value: 14 vs. 21
  misc_feature: MA Experiment 20000439 PARAMETER Experiment Name: At_Roots__P Parameter: Organism Value: A. thaliana
  misc_feature: MA Experiment 20000439 PARAMETER Experiment Name: At_Roots__P Parameter: Tissue Value: Roots vs. Whole Plant
  misc_feature: MA Experiment ID: 20001248 Result: Down-regulated in Transcription
  misc_feature: MA Experiment 20001248 PARAMETER Experiment Name: At_Far-red-induction_P Parameter: Age (day) Value: 7
  misc_feature: MA Experiment 20001248 PARAMETER Experiment Name: At_Far-red-induction_P Parameter: Light Value: Far-red vs. White
  misc_feature: MA Experiment 20001248 PARAMETER Experiment Name: At_Far-red-induction_P Parameter: Organism Value: A. thaliana
  misc_feature: MA Experiment 20001248 PARAMETER Experiment Name: At_Far-red-induction_P Parameter: Plant Line Value: Columbia
  misc_feature: MA Experiment 20001248 PARAMETER Experiment Name: At_Far-red-induction_P Parameter: Timepoint (hr) Value: 4
  misc_feature: MA Experiment 20001248 PARAMETER Experiment Name: At_Far-red-induction_P Parameter: Tissue Value: Whole Plant
  misc_feature: MA Experiment ID: 20001451 Result: Down-regulated in Transcription
  misc_feature: MA Experiment 20001451 PARAMETER Experiment Name: At_Far-red-induction_P Parameter: Age (day) Value: 7
  misc_feature: MA Experiment 20001451 PARAMETER Experiment Name: At_Far-red-induction_P Parameter: Light Value: Far-red vs. White
  misc_feature: MA Experiment 20001451 PARAMETER Experiment Name: At_Far-red-induction_P Parameter: Organism Value: A. thaliana
  misc_feature: MA Experiment 20001451 PARAMETER Experiment Name: At_Far-red-induction_P Parameter: Plant Line Value: Columbia
  misc_feature: MA Experiment 20001451 PARAMETER Experiment Name: At_Far-red-induction_P Parameter: Timepoint (hr) Value: 24
  misc_feature: MA Experiment 20001451 PARAMETER Experiment Name: At_Far-red-induction_P Parameter: Tissue Value: Whole Plant
ctaacattggattcgagctctctagtgaagaatccgccatggctgttccatttctaagctcttctctacaactcacacccacttctccgattctcttcactaaagtaacaccaacaccaataatccacaaccacagatcaacatgcactatacccacaaagcctcgtctacgtctcctccgccgctccgccgtcgctggaaccgccgtatctgatcaaacagaaggaggtggagatgttcttttaaaccctgaagaagagaaacgtgttgaggtggcggattatgattggacagaggaatggtatccattgtacttaactaaaaacgtccctgaagatgcgcctcttggcctcaccgtctacgatcgtcaaattgttttgtataaagacggtgaaggaacacttcgttgttacgaagatcggtgtcctcatcggttggctaagttgtctgaaggacaattgattgatgggagattggaatgtttgtatcatggttggcaatttgaaggagagggcaaatgtgtcaagattcctcagcttcctgcaagtgctaagattccaaaggctgcttgtgtgaagacgtatgaggtgaaggattcacaaggagttgtgtgggtgtggatgtcaacaaagacacctccaaaccctgagaagcttccttggtttgagaatttcgctagacccggttttttcgacatttcgactactcatgagcttccttatgaccattccattcttttagagaatctgatggatcctgctcatgttcctatctctcatgatagaacggatttcactgctaaaagaaaagatgctcagcctttggttttcgaggtcacagagcgaagtaatcggggtttcgcagggacttggggccgagagagagaaggtgggaaagggagtaatttacttcggtttgatgctccttgtgttctgcagaacaatcgagagttcgaggggaaggatggagtgaagaactatttttcagggctgtttctttgtagacctacagggcaagggaagtctatgcttattgttaggtttggggtcacaaaaagatcgcctttggtttcggtgttacctcaatggttctggcatcagaatgcctgcaaggtttttgaacaagacatggggtttctatcgtctcaaaaacgaggttctgatgaaggagaaagtaccaactaaggacttgtatttgaatctaaagtcatcggacacatgggtcgctgaatagaaagtggatggacaaagttggtcatgggatgccttaccatttcgggcataggaccatatctctccccaaagtccctcctgtcgtggaacatgccccggcagggctcattgcagctctctctgcttcttaccctgcaaaaggcggaattgggactatgcatgctcccaatttggctaaccggtacttcagacatattattcattgtagaagctgcagcaatgtgatcaaatcttttgagctctggaaaaatatcctctctgccacggcagtggctttgacggctttggccattctggtggttagtagacagtggaaggctgtcctgttaggttcagcagcattgtgctcagccgcagcttatacctgcttaagagctataaatctaaacaccaataacttcattagaacacacagaagactatgaaaatgtatagtgtcatgtttcctcttcttccaacaatatgtatttcatgaaataaatttttgcttgtaaacgcaattatataattcagaaggttccaatgtttgccagc

SEQ ID NO: 21369 - protein, 393 aa, Arabidopsis thaliana
  peptide (1)..(393): Ceres Seq. ID no. 12321274
  misc_feature (99)..(201): Pfam Name: Rieske [2Fe-2S] domain Pfam Description: Rieske [2Fe-2S] domain
  misc_feature (96)..(384): Homolog of NCBI NO: 33865393 NR Description: cell death suppressor protein Lls1 homolog
  misc_feature (82)..(384): Homolog of NCBI NO: 1935914 NR Description: lethal leaf-spot 1 homolog [Arabidopsis thaliana]
  misc_feature (13)..(384): Homolog of NCBI NO: 37962886 NR Description: accelerated cell death 1 [Arabidopsis thaliana]
  misc_feature (13)..(384): Homolog of NCBI NO: 15230543 NR Description: lethal leaf-spot 1 homolog Lls1
  misc_feature (24)..(384): Homolog of NCBI NO: 15451611 NR Description: Putative cell death suppressor protein [Oryza
  misc_feature (13)..(393): Homolog of NCBI NO: 30088964 NR Description: lethal leaf spot 1-like protein [Vigna
  misc_feature (93)..(384): Homolog of NCBI NO: 17232499 NR Description: similar to cell death suppressor protein Lls1
  misc_feature (93)..(383): Homolog of NCBI NO: 23125858 NR Description: hypothetical protein [Nostoc punctiforme]
  misc_feature (13)..(382): Homolog of NCBI NO: 7488843 NR Description: Rieske [2Fe-2S] iron-sulfur protein tic55 -
  misc_feature (13)..(382): Homolog of NCBI NO: 15224625 NR Description: putative Rieske iron-sulfur protein
NIGFELSSEESAMAVPFLSSSLQLTPTSPILFTKVTPTPIIHNHRSTCTIPTKPRLRLLRRSAVAGTAVSDQTEGGGDVLLNPEEEKRVEVADYDWTEEWYPLYLTKNVPEDAPLGLTVYDRQIVLYKDGEGTLRCYEDRCPHRLAKLSEGQLIDGRLECLYHGWQFEGEGKCVKIPQLPASAKIPKAACVKTYEVKDSQGVVWVWMSTKTPPNPEKLPWFENFARPGFFDISTTHELPYDHSILLENLMDPAHVPISHDRTDFTAKRKDAQPLVFEVTERSNRGFAGTWGREREGGKGSNLLRFDAPCVLQNNREFEGKDGVKNYFSGLFLCRPTGQGKSMLIVRFGVTKRSPLVSVLPQWFWHQNACKVFEQDMGFLSSQKRGSDEGESTN

SEQ ID NO: 21370 - protein, 381 aa, Arabidopsis thaliana
  peptide (1)..(381): Ceres Seq. ID no. 12321275
  misc_feature (87)..(189): Pfam Name: Rieske [2Fe-2S] domain Pfam Description: Rieske [2Fe-2S] domain
  misc_feature (84)..(372): Homolog of NCBI NO: 33865393 NR Description: cell death suppressor protein Lls1 homolog
  misc_feature (70)..(372): Homolog of NCBI NO: 1935914 NR Description: lethal leaf-spot 1 homolog [Arabidopsis thaliana]
  misc_feature (1)..(372): Homolog of NCBI NO: 37962886 NR Description: accelerated cell death 1 [Arabidopsis thaliana]
  misc_feature (1)..(372): Homolog of NCBI NO: 15230543 NR Description: lethal leaf-spot 1 homolog Lls1
  misc_feature (12)..(372): Homolog of NCBI NO: 15451611 NR Description: Putative cell death suppressor protein [Oryza
  misc_feature (1)..(381): Homolog of NCBI NO: 30088964 NR Description: lethal leaf spot 1-like protein [Vigna
  misc_feature (81)..(372): Homolog of NCBI NO: 17232499 NR Description: similar to cell death suppressor protein Lls1
  misc_feature (81)..(371): Homolog of NCBI NO: 23125858 NR Description: hypothetical protein [Nostoc punctiforme]
  misc_feature (1)..(370): Homolog of NCBI NO: 7488843 NR Description: Rieske [2Fe-2S] iron-sulfur protein tic55 -
  misc_feature (1)..(370): Homolog of NCBI NO: 15224625 NR Description: putative Rieske iron-sulfur protein
MAVPFLSSSLQLTPTSPILFTKVTPTPIIHNHRSTCTIPTKPRLRLLRRSAVAGTAVSDQTEGGGDVLLNPEEEKRVEVADYDWTEEWYPLYLTKNVPEDAPLGLTVYDRQIVLYKDGEGTLRCYEDRCPHRLAKLSEGQLIDGRLECLYHGWQFEGEGKCVKIPQLPASAKIPKAACVKTYEVKDSQGVVWVWMSTKTPPNPEKLPWFENFARPGFFDISTTHELPYDHSILLENLMDPAHVPISHDRTDFTAKRKDAQPLVFEVTERSNRGFAGTWGREREGGKGSNLLRFDAPCVLQNNREFEGKDGVKNYFSGLFLCRPTGQGKSMLIVRFGVTKRSPLVSVLPQWFWHQNACKVFEQDMGFLSSQKRGSDEGESTN

SEQ ID NO: 21371 - DNA, 860 bp, Arabidopsis thaliana
  misc_feature (1)..(860): Ceres Seq. ID no. 12421947
  misc_feature: MA Experiment ID: 108433 Result: Down-regulated in Transcription
  misc_feature: MA Experiment 108433 PARAMETER Experiment Name: At_rhl_Mutant2_cDNA_P Parameter: Age (day) Value: 7
  misc_feature: MA Experiment 108433 PARAMETER Experiment Name: At_rhl_Mutant2_cDNA_P Parameter: Organism Value: A. thaliana
  misc_feature: MA Experiment 108433 PARAMETER Experiment Name: At_rhl_Mutant2_cDNA_P Parameter: Plant Line Value: rhl Mutant vs. wt landsburg
  misc_feature: MA Experiment 108433 PARAMETER Experiment Name: At_rhl_Mutant2_cDNA_P Parameter: Tissue Value: Roots
  misc_feature: MA Experiment ID: 108434 Result: Up-regulated in Transcription
  misc_feature: MA Experiment 108434 PARAMETER Experiment Name: At_Root_Tips_cDNA_P Parameter: Tissue Value: Root Tips
  misc_feature: MA Experiment ID: 108462 Result: Down-regulated in Transcription
  misc_feature: MA Experiment 108462 PARAMETER Experiment Name: At_Germinating_Seeds_cDNA_P Parameter: Age (day) Value: 2 vs. 0
  misc_feature: MA Experiment 108462 PARAMETER Experiment Name: At_Germinating_Seeds_cDNA_P Parameter: Tissue Value: Germinating Seeds
  misc_feature: MA Experiment ID: 108463 Result: Down-regulated in Transcription
  misc_feature: MA Experiment 108463 PARAMETER Experiment Name: At_Germinating_Seeds_cDNA_P Parameter: Age (day) Value: 3 vs. 0
  misc_feature: MA Experiment 108463 PARAMETER Experiment Name: At_Germinating_Seeds_cDNA_P Parameter: Tissue Value: Germinating Seeds
  misc_feature: MA Experiment ID: 108464 Result: Down-regulated in Transcription
  misc_feature: MA Experiment 108464 PARAMETER Experiment Name: At_Germinating_Seeds_cDNA_P Parameter: Age (day) Value: 4 vs. 0
  misc_feature: MA Experiment 108464 PARAMETER Experiment Name: At_Germinating_Seeds_cDNA_P Parameter: Tissue Value: Germinating Seeds
  misc_feature: MA Experiment ID: 108576 Result: Down-regulated in Transcription
  misc_feature: MA Experiment 108576 PARAMETER Experiment Name: At_42deg_Heat_cDNA_P Parameter: Temperature (deg C) Value: 42 vs. 22
  misc_feature: MA Experiment 108576 PARAMETER Experiment Name: At_42deg_Heat_cDNA_P Parameter: Timepoint (hr) Value: 1
  misc_feature: MA Experiment 108576 PARAMETER Experiment Name: At_42deg_Heat_cDNA_P Parameter: Tissue Value: Aerial
  misc_feature: MA Experiment ID: 20000111 Result: Up-regulated in Transcription
  misc_feature: MA Experiment 20000111 PARAMETER Experiment Name: At_42deg_Heat_cDNA_P Parameter: Temperature (deg C) Value: 42 vs. 22
  misc_feature: MA Experiment 20000111 PARAMETER Experiment Name: At_42deg_Heat_cDNA_P Parameter: Timepoint (hr) Value: 6
  misc_feature: MA Experiment 20000111 PARAMETER Experiment Name: At_42deg_Heat_cDNA_P Parameter: Tissue Value: Aerial
  misc_feature: MA Experiment ID: 20000173 Result: Up-regulated in Transcription
  misc_feature: MA Experiment 20000173 PARAMETER Experiment Name: At_42deg_Heat_P Parameter: Age (day) Value: 14
  misc_feature: MA Experiment 20000173 PARAMETER Experiment Name: At_42deg_Heat_P Parameter: Organism Value: A. thaliana
  misc_feature: MA Experiment 20000173 PARAMETER Experiment Name: At_42deg_Heat_P Parameter: Plant Line Value: WS
  misc_feature: MA Experiment 20000173 PARAMETER Experiment Name: At_42deg_Heat_P Parameter: Temperature (deg C) Value: 42 vs. 22
  misc_feature: MA Experiment 20000173 PARAMETER Experiment Name: At_42deg_Heat_P Parameter: Timepoint (hr) Value: 6
  misc_feature: MA Experiment 20000173 PARAMETER Experiment Name: At_42deg_Heat_P Parameter: Tissue Value: Aerial
  misc_feature: MA Experiment ID: 20000184 Result: Up-regulated in Transcription
  misc_feature: MA Experiment 20000184 PARAMETER Experiment Name: At_Shoots__P Parameter: Age (day) Value: 7
  misc_feature: MA Experiment 20000184 PARAMETER Experiment Name: At_Shoots__P Parameter: Tissue Value: Shoots vs. Whole Plant
  misc_feature: MA Experiment ID: 20000224 Result: Down-regulated in Transcription
  misc_feature: MA Experiment ID: 20000794 Result: Down-regulated in Transcription
  misc_feature: MA Experiment 20000794 PARAMETER Experiment Name: At_Petals_P Parameter: Age (day) Value: 23-25 days
  misc_feature: MA Experiment 20000794 PARAMETER Experiment Name: At_Petals_P Parameter: Plant Line Value: WS
  misc_feature: MA Experiment 20000794 PARAMETER Experiment Name: At_Petals_P Parameter: Tissue Value: Petals vs. Whole plant
  misc_feature: MA Experiment ID: 20001557 Result: Up-regulated in Transcription
  misc_feature: MA Experiment 20001557 PARAMETER Experiment Name: At_Drought_Soil_Dry_P Parameter: Age (day) Value: 27
  misc_feature: MA Experiment 20001557 PARAMETER Experiment Name: At_Drought_Soil_Dry_P Parameter: Organism Value: A. thaliana
  misc_feature: MA Experiment 20001557 PARAMETER Experiment Name: At_Drought_Soil_Dry_P Parameter: Plant Line Value: WS
  misc_feature: MA Experiment 20001557 PARAMETER Experiment Name: At_Drought_Soil_Dry_P Parameter: Post Timepoint (hr) Value: 3
  misc_feature: MA Experiment 20001557 PARAMETER Experiment Name: At_Drought_Soil_Dry_P Parameter: Post-Treatment Value: Re-Water vs. No Drought
  misc_feature: MA Experiment 20001557 PARAMETER Experiment Name: At_Drought_Soil_Dry_P Parameter: Timepoint (day) Value: 13
  misc_feature: MA Experiment 20001557 PARAMETER Experiment Name: At_Drought_Soil_Dry_P Parameter: Treatment Value: Drought vs. No Drought
  misc_feature: MA Experiment ID: 20001558 Result: Up-regulated in Transcription
  misc_feature: MA Experiment 20001558 PARAMETER Experiment Name: At_Drought_Soil_Dry_P Parameter: Age (day) Value: 27
  misc_feature: MA Experiment 20001558 PARAMETER Experiment Name: At_Drought_Soil_Dry_P Parameter: Organism Value: A. thaliana
  misc_feature: MA Experiment 20001558 PARAMETER Experiment Name: At_Drought_Soil_Dry_P Parameter: Plant Line Value: WS
  misc_feature: MA Experiment 20001558 PARAMETER Experiment Name: At_Drought_Soil_Dry_P Parameter: Post Timepoint (hr) Value: 6
  misc_feature: MA Experiment 20001558 PARAMETER Experiment Name: At_Drought_Soil_Dry_P Parameter: Post-Treatment Value: Re-Water vs. No Drought
  misc_feature: MA Experiment 20001558 PARAMETER Experiment Name: At_Drought_Soil_Dry_P Parameter: Timepoint (day) Value: 13
  misc_feature: MA Experiment 20001558 PARAMETER Experiment Name: At_Drought_Soil_Dry_P Parameter: Treatment Value: Drought vs. No Drought
  misc_feature: MA Experiment ID: 20001560 Result: Up-regulated in Transcription
  misc_feature: MA Experiment 20001560 PARAMETER Experiment Name: At_Drought_Soil_Dry_P Parameter: Age (day) Value: 28
  misc_feature: MA Experiment 20001560 PARAMETER Experiment Name: At_Drought_Soil_Dry_P Parameter: Organism Value: A. thaliana
  misc_feature: MA Experiment 20001560 PARAMETER Experiment Name: At_Drought_Soil_Dry_P Parameter: Plant Line Value: WS
  misc_feature: MA Experiment 20001560 PARAMETER Experiment Name: At_Drought_Soil_Dry_P Parameter: Post Timepoint (hr) Value: None
  misc_feature: MA Experiment 20001560 PARAMETER Experiment Name: At_Drought_Soil_Dry_P Parameter: Post-Treatment Value: None
  misc_feature: MA Experiment 20001560 PARAMETER Experiment Name: At_Drought_Soil_Dry_P Parameter: Timepoint (day) Value: 14
  misc_feature: MA Experiment 20001560 PARAMETER Experiment Name: At_Drought_Soil_Dry_P Parameter: Treatment Value: Drought vs. No Drought
  misc_feature: MA Experiment ID: 20001757 Result: Up-regulated in Transcription
  misc_feature: MA Experiment 20001757 PARAMETER Experiment Name: At_50mM_NH4NO3_L-to-H_P Parameter: Timepoint (hr) Value: 6
  misc_feature: MA Experiment 20001757 PARAMETER Experiment Name: At_50mM_NH4NO3_L-to-H_P Parameter: Tissue Value: Leaf
  misc_feature: MA Experiment 20001757 PARAMETER Experiment Name: At_50mM_NH4NO3_L-to-H_P Parameter: Treatment Value: 50mM NH4NO3 vs 100mM Mannitol
attcgcgcgacgcaaacgatcttcaggtgatcttctttctccaaatcctctctcataactctgatttcgtacttgtgtatttgagctcacgctctgtttctctcaccacagccatggccaccgccgcagatgttgacgctgagattcagcaggcgctcactaacgaagtcaagctcttcaaccgctggacctatgacgacgttacggtcacagacatcagtcttgttgactacattggagttcaggcagctaaacatgctacctttgttccccacaccgctggaagatactctgtgaagagattcaggaaggctcagtgccccattgttgagaggctcaccaactctctcatgatgcacgggaggaacaacggtaagaaattgatggctgtcaggatcgtcaagcacgccatggagattatccacctcttgtctgacttgaacccaattcaggtcatcattgacgccattgtcaacagtggtccacgtgaagatgctaccagaattggatctgctggtgttgttaggagacaagctgttgatatctctcctctaagacgtgttaaccaggctatcttcttgattaccactggtgctcgtgaagctgctttcagaaacatcaagactatagctgagtgccttgctgatgaattgatcaacgcagccaagggctcttccaacagctatgccatcaagaagaaggatgagattgaaagagttgccaaggctaatcgttaaggattttccttttgccctgtgcgttacaatctcgtatcaatgagtttaatgttttatcttcatttagattgaaatatgtatctcagatgtttgctcttttgttttatgaagtttatttcgtct

SEQ ID NO: 21372 - protein, 244 aa, Arabidopsis thaliana
  peptide (1)..(244): Ceres Seq. ID no. 12421948
  misc_feature (51)..(244): Homolog of NCBI NO: 3717978 NR Description: 5S ribosomal protein [Mus musculus]
  misc_feature (42)..(244): Homolog of NCBI NO: 15294021 NR Description: 40S ribosomal protein S5 [Ictalurus punctatus]
  misc_feature (36)..(244): Homolog of NCBI NO: 13904870 NR Description: ribosomal protein S5; 40S ribosomal protein S5
  misc_feature (51)..(244): Homolog of NCBI NO: 32400987 NR Description: 40S ribosome protein S5 [Griffithsia japonica]
  misc_feature (38)..(244): Homolog of NCBI NO: 40748265 NR Description: 40S ribosomal protein S5 [Capsicum annuum]
  misc_feature (46)..(244): Homolog of NCBI NO: 34893994 NR Description: putative 40S ribosomal protein S5
  misc_feature (55)..(244): Homolog of NCBI NO: 6831665 NR Description: 40S RIBOSOMAL PROTEIN S5
  misc_feature (38)..(244): Homolog of NCBI NO: 21617886 NR Description: 40S ribosomal protein S5 [Arabidopsis thaliana]
  misc_feature (38)..(244): Homolog of NCBI NO: 15228111 NR Description: 40S ribosomal protein S5
  misc_feature (38)..(244): Homolog of NCBI NO: 15229897 NR Description: 40S ribosomal protein S5, putative
SRDANDLQVIFFLQILSHNSDFVLVYLSSRSVSLTTAMATAADVDAEIQQALTNEVKLFNRWTYDDVTVTDISLVDYIGVQAAKHATFVPHTAGRYSVKRFRKAQCPIVERLTNSLMMHGRNNGKKLMAVRIVKHAMEIIHLLSDLNPIQVIIDAIVNSGPREDATRIGSAGVVRRQAVDISPLRRVNQAIFLITTGAREAAFRNIKTIAECLADELINAAKGSSNSYAIKKKDEIERVAKANR

SEQ ID NO: 21373 - protein, 207 aa, Arabidopsis thaliana [sequence omitted]

SEQ ID NO: 21374 - protein, 128 aa, Arabidopsis thaliana
  peptide (1)..(128): Ceres Seq. ID no. 12421950
  misc_feature (1)..(128): Homolog of NCBI NO: 3717978 NR Description: 5S ribosomal protein [Mus musculus]
  misc_feature (1)..(128): Homolog of NCBI NO: 15294021 NR Description: 40S ribosomal protein S5 [Ictalurus punctatus]
  misc_feature (1)..(128): Homolog of NCBI NO: 13904870 NR Description: ribosomal protein S5; 40S ribosomal protein S5
  misc_feature (1)..(128): Homolog of NCBI NO: 32400987 NR Description: 40S ribosome protein S5 [Griffithsia japonica]
  misc_feature (1)..(128): Homolog of NCBI NO: 40748265 NR Description: 40S ribosomal protein S5 [Capsicum annuum]
  misc_feature (1)..(128): Homolog of NCBI NO: 34893994 NR Description: putative 40S ribosomal protein S5
  misc_feature (1)..(128): Homolog of NCBI NO: 6831665 NR Description: 40S RIBOSOMAL PROTEIN S5
  misc_feature (1)..(128): Homolog of NCBI NO: 21617886 NR Description: 40S ribosomal protein S5 [Arabidopsis thaliana]
  misc_feature (1)..(128): Homolog of NCBI NO: 15228111 NR Description: 40S ribosomal protein S5
  misc_feature (1)..(128): Homolog of NCBI NO: 15229897 NR Description: 40S ribosomal protein S5, putative
MMHGRNNGKKLMAVRIVKHAMEIIHLLSDLNPIQVIIDAIVNSGPREDATRIGSAGVVRRQAVDISPLRRVNQAIFLITTGAREAAFRNIKTIAECLADELINAAKGSSNSYAIKKKDEIERVAKANR

SEQ ID NO: 21375 - DNA, 1556 bp, Arabidopsis thaliana
  misc_feature (1)..(1556): Ceres Seq. ID no. 12371385
  misc_feature: MA Experiment ID: 108488 Result: Down-regulated in Transcription
  misc_feature: MA Experiment ID: 108569 Result: Down-regulated in Transcription
  misc_feature: MA Experiment 108569 PARAMETER Experiment Name: At_0.001%_MeJA__cDNA_P Parameter: Timepoint (hr) Value: 6
  misc_feature: MA Experiment 108569 PARAMETER Experiment Name: At_0.001%_MeJA__cDNA_P Parameter: Tissue Value: Aerial
  misc_feature: MA Experiment 108569 PARAMETER Experiment Name: At_0.001%_MeJA__cDNA_P Parameter: Treatment Value: 0.001% MeJA vs. No Treatment
  misc_feature: MA Experiment ID: 20000087 Result: Up-regulated in Transcription
  misc_feature: MA Experiment 20000087 PARAMETER Experiment Name: At_100uM_ABA_Mutants_cDNA_P Parameter: Plant Line Value: WS
  misc_feature: MA Experiment 20000087 PARAMETER Experiment Name: At_100uM_ABA_Mutants_cDNA_P Parameter: Timepoint (hr) Value: 6
  misc_feature: MA Experiment 20000087 PARAMETER Experiment Name: At_100uM_ABA_Mutants_cDNA_P Parameter: Tissue Value: Aerial
  misc_feature: MA Experiment 20000087 PARAMETER Experiment Name: At_100uM_ABA_Mutants_cDNA_P Parameter: Treatment Value: 100uM ABA vs. No Treatment
  misc_feature: MA Experiment ID: 20000112 Result: Up-regulated in Transcription
  misc_feature: MA Experiment 20000112 PARAMETER Experiment Name: At_42deg_Heat_cDNA_P Parameter: Temperature (deg C) Value: 42 vs. 22
  misc_feature: MA Experiment 20000112 PARAMETER Experiment Name: At_42deg_Heat_cDNA_P Parameter: Timepoint (hr) Value: 2
  misc_feature: MA Experiment 20000112 PARAMETER Experiment Name: At_42deg_Heat_cDNA_P Parameter: Tissue Value: Aerial
  misc_feature: MA Experiment ID: 20000180 Result: Up-regulated in Transcription
  misc_feature: MA Experiment 20000180 PARAMETER Experiment Name: At_Germinating_Seeds_P Parameter: Age (hr) Value: 24 vs. 0
  misc_feature: MA Experiment 20000180 PARAMETER Experiment Name: At_Germinating_Seeds_P Parameter: Tissue Value: Germinating Seeds
  misc_feature: MA Experiment ID: 20000235 Result: Up-regulated in Transcription
  misc_feature: MA Experiment 20000235 PARAMETER Experiment Name: At_Siliques_P Parameter: Age (day) Value: 21
  misc_feature: MA Experiment 20000235 PARAMETER Experiment Name: At_Siliques_P Parameter: Organism Value: A. thaliana
  misc_feature: MA Experiment 20000235 PARAMETER Experiment Name: At_Siliques_P Parameter: Plant Line Value: WS
  misc_feature: MA Experiment 20000235 PARAMETER Experiment Name: At_Siliques_P Parameter: Tissue Value: 5-10mm Siliques vs. Whole Plant
  misc_feature: MA Experiment ID: 20000495 Result: Up-regulated in Transcription
  misc_feature: MA Experiment 20000495 PARAMETER Experiment Name: At_Guard_Cells_P Parameter: Harvest Date Value: 8/2/2002
  misc_feature: MA Experiment 20000495 PARAMETER Experiment Name: At_Guard_Cells_P Parameter: Organism Value: A. thaliana
  misc_feature: MA Experiment 20000495 PARAMETER Experiment Name: At_Guard_Cells_P Parameter: Tissue Value: Guard Cells vs. Leaves
  misc_feature: MA Experiment ID: 20001459 Result: Up-regulated in Transcription
  misc_feature: MA Experiment 20001459 PARAMETER Experiment Name: At_50mM_NH4NO3_L-to-H_P Parameter: Age (day) Value: Undefined
  misc_feature: MA Experiment 20001459 PARAMETER Experiment Name: At_50mM_NH4NO3_L-to-H_P Parameter: Organism Value: Undefined
  misc_feature: MA Experiment 20001459 PARAMETER Experiment Name: At_50mM_NH4NO3_L-to-H_P Parameter: Plant Line Value: Undefined
  misc_feature: MA Experiment 20001459 PARAMETER Experiment Name: At_50mM_NH4NO3_L-to-H_P Parameter: Timepoint (hr) Value: 4
  misc_feature: MA Experiment 20001459 PARAMETER Experiment Name: At_50mM_NH4NO3_L-to-H_P Parameter: Tissue Value: Siliques
  misc_feature: MA Experiment 20001459 PARAMETER Experiment Name: At_50mM_NH4NO3_L-to-H_P Parameter: Treatment Value: 50mM NH4NO3 vs. 100mM Manitol
  misc_feature: MA Experiment ID: 20001560 Result: Up-regulated in Transcription
  misc_feature: MA Experiment 20001560 PARAMETER Experiment Name: At_Drought_Soil_Dry_P Parameter: Age (day) Value: 28
  misc_feature: MA Experiment 20001560 PARAMETER Experiment Name: At_Drought_Soil_Dry_P Parameter: Organism Value: A. thaliana
  misc_feature: MA Experiment 20001560 PARAMETER Experiment Name: At_Drought_Soil_Dry_P Parameter: Plant Line Value: WS
  misc_feature: MA Experiment 20001560 PARAMETER Experiment Name: At_Drought_Soil_Dry_P Parameter: Post Timepoint (hr) Value: None
  misc_feature: MA Experiment 20001560 PARAMETER Experiment Name: At_Drought_Soil_Dry_P Parameter: Post-Treatment Value: None
  misc_feature: MA Experiment 20001560 PARAMETER Experiment Name: At_Drought_Soil_Dry_P Parameter: Timepoint (day) Value: 14
  misc_feature: MA Experiment 20001560 PARAMETER Experiment Name: At_Drought_Soil_Dry_P Parameter: Treatment Value: Drought vs. No Drought
  misc_feature: MA Experiment ID: 20001906 Result: Down-regulated in Transcription
  misc_feature: MA Experiment 20001906 PARAMETER Experiment Name: At_Drought_Reproduction_P Parameter: Age (day) Value: 35
  misc_feature: MA Experiment 20001906 PARAMETER Experiment Name: At_Drought_Reproduction_P Parameter: Organism Value: A. thaliana
  misc_feature: MA Experiment 20001906 PARAMETER Experiment Name: At_Drought_Reproduction_P Parameter: Plant Line Value: WS
  misc_feature: MA Experiment 20001906 PARAMETER Experiment Name: At_Drought_Reproduction_P Parameter: Timepoint (day) Value: 5
  misc_feature: MA Experiment 20001906 PARAMETER Experiment Name: At_Drought_Reproduction_P Parameter: Tissue Value: Siliques
  misc_feature: MA Experiment 20001906 PARAMETER Experiment Name: At_Drought_Reproduction_P Parameter: Treatment Value: Drought vs. No Drought
  misc_feature: MA Experiment ID: 20001908 Result: Down-regulated in Transcription
  misc_feature: MA Experiment 20001908 PARAMETER Experiment Name: At_Drought_Reproduction_P Parameter: Age (day) Value: 40
  misc_feature: MA Experiment 20001908 PARAMETER Experiment Name: At_Drought_Reproduction_P Parameter: Organism Value: A. thaliana
  misc_feature: MA Experiment 20001908 PARAMETER Experiment Name: At_Drought_Reproduction_P Parameter: Plant Line Value: WS
  misc_feature: MA Experiment 20001908 PARAMETER Experiment Name: At_Drought_Reproduction_P Parameter: Timepoint (day) Value: 10
  misc_feature: MA Experiment 20001908 PARAMETER Experiment Name: At_Drought_Reproduction_P Parameter: Tissue Value: Siliques
  misc_feature: MA Experiment 20001908 PARAMETER Experiment Name: At_Drought_Reproduction_P Parameter: Treatment Value: Drought vs. No Drought
  misc_feature: MA Experiment ID: 20001911 Result: Down-regulated in Transcription
  misc_feature: MA Experiment 20001911 PARAMETER Experiment Name: At_Drought_Reproduction_P Parameter: Age (day) Value: 40
  misc_feature: MA Experiment 20001911 PARAMETER Experiment Name: At_Drought_Reproduction_P Parameter: Organism Value: A. thaliana
  misc_feature: MA Experiment 20001911 PARAMETER Experiment Name: At_Drought_Reproduction_P Parameter: Plant Line Value: WS
  misc_feature: MA Experiment 20001911 PARAMETER Experiment Name: At_Drought_Reproduction_P Parameter: Timepoint (day) Value: 10
  misc_feature: MA Experiment 20001911 PARAMETER Experiment Name: At_Drought_Reproduction_P Parameter: Tissue Value: Flowers
  misc_feature: MA Experiment 20001911 PARAMETER Experiment Name: At_Drought_Reproduction_P Parameter: Treatment Value: Drought vs. No Drought
aaggtagctaattctcttctttgaatgtagattgaggaagagaaaatcaaaagctatctcttgttgttagagatgcggaatgtagagctcatcttcatccccacaccaaccgttggtcatcttgttccgtttcttgaatttgctaggcgtctcattgagcaagatgataggatccgtatcacaatcctcttgatgaaactacaaggtcagtctcatctagacacttatgttaaatcaattgcctcctctcaaccgtttgttagattcattgatgtccctgagttagaggagaaacctacacttggtagtacacaatctgtggaagcttatgtgtatgatgttattgagagaaatatccctcttgtgaggaatatagtcatggatattttaacttctcttgcattggatggagttaaggtcaagggattagttgttgactttttctgtctccctatgattgacgttgctaaagatataagtctccctttctatgtgttcttgactacaaattccgggttcttagctatgatgcagtatctagcagatcgacatagtagagatacatcggtttttgtaagaaactcggaagaaatgttgtcgatacctggatttgtaaaccctgtcccagccaatgttctgccgtcagctctgtttgttgaagatggttatgatgcttacgttaagctggccatattgtttacaaaggccaatggaatcctagtgaatagctcctttgatattgagccttactctgtgaatcattttcttcaagaacagaattatccttctgtttatgctgttggccccatatttgacttgaaagcccagcctcatccagagcaggacctaacccgtcgtgacgagttgatgaaatggcttgatgatcaacccgaggcatcggttgtattcctttgttttgggagtatggcaaggttaagaggttctctagtgaaggaaatagctcatggacttgagctatgtcaatatagattcctctggtcactccgtaaagaagaggtgacaaaggatgatttgccagaggggttccttgaccgtgtcgatggacgtggaatgatatgtggttggtctcctcaggtagaaatactggcccataaggcagtgggaggctttgtttctcactgtggatggaactcaatagtagagagtttgtggtttggcgtgccaattgtgacatggccaatgtatgcagagcaacaactcaatgcgtttctgatggtgaaggaactgaagctagctgtggagctgaagcttgattacagggtacatagtgatgagatagtaaacgcaaacgagatagagaccgctattcgttatgtaatggacacggataataatgttgtgaggaaacgagtgatggatatctcgcagatgatccagagagctacgaagaatggtggatcttcgtttgccgcaattgagaaattcatatatgacgtgataggaattaagccctagccttttcttgtccaataagctataaccttgttactttgtactaaaacttgtttttgaaagagctacgaatgaattttgct

SEQ ID NO: 21376 - protein, 467 aa, Arabidopsis thaliana
  peptide (1)..(467): Ceres Seq. ID no. 12371386
  misc_feature (4)..(466): Pfam Name: UDP-glucoronosyl and UDP-glucosyl transferase Pfam Description: UDP-glucoronosyl and UDP-glucosyl transferase
  misc_feature (1)..(459): Homolog of NCBI NO: 20146091 NR Description: glucosyltransferase NTGT3 [Nicotiana tabacum]
  misc_feature (21)..(462): Homolog of NCBI NO: 21954072 NR Description: putative UDP-glucose glucosyltransferase
  misc_feature (1)..(463): Homolog of NCBI NO: 15227616 NR Description: UDP-glycosyltransferase family; protein id:
  misc_feature (1)..(459): Homolog of NCBI NO: 15227613 NR Description: putative flavonol 3-O-glucosyltransferase
  misc_feature (1)..(462): Homolog of NCBI NO: 30680040 NR Description: glycosyltransferase family [Arabidopsis thaliana]
  misc_feature (1)..(464): Homolog of NCBI NO: 15222344 NR Description: UDP-glucose glucosyltransferase, putative
  misc_feature (5)..(464): Homolog of NCBI NO: 15222348 NR Description: UDP-glucose glucosyltransferase, putative
  misc_feature (1)..(466): Homolog of NCBI NO: 21555082 NR Description: putative flavonol 3-O-glucosyltransferase
  misc_feature (1)..(466): Homolog of NCBI NO: 15227606 NR Description: putative flavonol 3-O-glucosyltransferase
  misc_feature (1)..(467): Homolog of NCBI NO: 15227610 NR Description: putative flavonol 3-O-glucosyltransferase
MRNVELIFIPTPTVGHLVPFLEFARRLIEQDDRIRITILLMKLQGQSHLDTYVKSIASSQPFVRFIDVPELEEKPTLGSTQSVEAYVYDVIERNIPLVRNIVMDILTSLALDGVKVKGLVVDFFCLPMIDVAKDISLPFYVFLTTNSGFLAMMQYLADRHSRDTSVFVRNSEEMLSIPGFVNPVPANVLPSALFVEDGYDAYVKLAILFTKANGILVNSSFDIEPYSVNHFLQEQNYPSVYAVGPIFDLKAQPHPEQDLTRRDELMKWLDDQPEASVVFLCFGSMARLRGSLVKEIAHGLELCQYRFLWSLRKEEVTKDDLPEGFLDRVDGRGMICGWSPQVEILAHKAVGGFVSHCGWNSIVESLWFGVPIVTWPMYAEQQLNAFLMVKELKLAVELKLDYRVHSDEIVNANEIETAIRYVMDTDNNVVRKRVMDISQMIQRATKNGGSSFAAIEKFIYDVIGIKP

SEQ ID NO: 21377 - protein, 427 aa, Arabidopsis thaliana
  peptide (1)..(427): Ceres Seq. ID no. 12371387
  misc_feature (1)..(426): Pfam Name: UDP-glucoronosyl and UDP-glucosyl transferase Pfam Description: UDP-glucoronosyl and UDP-glucosyl transferase
  misc_feature (1)..(419): Homolog of NCBI NO: 20146091 NR Description: glucosyltransferase NTGT3 [Nicotiana tabacum]
  misc_feature (1)..(422): Homolog of NCBI NO: 21954072 NR Description: putative UDP-glucose glucosyltransferase
  misc_feature (1)..(423): Homolog of NCBI NO: 15227616 NR Description: UDP-glycosyltransferase family; protein id:
  misc_feature (1)..(419): Homolog of NCBI NO: 15227613 NR Description: putative flavonol 3-O-glucosyltransferase
  misc_feature (1)..(422): Homolog of NCBI NO: 30680040 NR Description: glycosyltransferase family [Arabidopsis thaliana]
  misc_feature (1)..(424): Homolog of NCBI NO: 15222344 NR Description: UDP-glucose glucosyltransferase, putative
  misc_feature (1)..(424): Homolog of NCBI NO: 15222348 NR Description: UDP-glucose glucosyltransferase, putative
  misc_feature (1)..(426): Homolog of NCBI NO: 21555082 NR Description: putative flavonol 3-O-glucosyltransferase
  misc_feature (1)..(426): Homolog of NCBI NO: 15227606 NR Description: putative flavonol 3-O-glucosyltransferase
  misc_feature (1)..(427): Homolog of NCBI NO: 15227610 NR Description: putative flavonol 3-O-glucosyltransferase
MKLQGQSHLDTYVKSIASSQPFVRFIDVPELEEKPTLGSTQSVEAYVYDVIERNIPLVRNIVMDILTSLALDGVKVKGLVVDFFCLPMIDVAKDISLPFYVFLTTNSGFLAMMQYLADRHSRDTSVFVRNSEEMLSIPGFVNPVPANVLPSALFVEDGYDAYVKLAILFTKANGILVNSSFDIEPYSVNHFLQEQNYPSVYAVGPIFDLKAQPHPEQDLTRRDELMKWLDDQPEASVVFLCFGSMARLRGSLVKEIAHGLELCQYRFLWSLRKEEVTKDDLPEGFLDRVDGRGMICGWSPQVEILAHKAVGGFVSHCGWNSIVESLWFGVPIVTWPMYAEQQLNAFLMVKELKLAVELKLDYRVHSDEIVNANEIETAIRYVMDTDNNVVRKRVMDISQMIQRATKNGGSSFAAIEKFIYDVIGIKP

SEQ ID NO: 21378 - protein, 365 aa, Arabidopsis thaliana
  peptide (1)..(365): Ceres Seq. ID no. 12371388
  misc_feature (1)..(364): Pfam Name: UDP-glucoronosyl and UDP-glucosyl transferase Pfam Description: UDP-glucoronosyl and UDP-glucosyl transferase
  misc_feature (1)..(357): Homolog of NCBI NO: 20146091 NR Description: glucosyltransferase NTGT3 [Nicotiana tabacum]
  misc_feature (1)..(360): Homolog of NCBI NO: 21954072 NR Description: putative UDP-glucose glucosyltransferase
  misc_feature (1)..(361): Homolog of NCBI NO: 15227616 NR Description: UDP-glycosyltransferase family; protein id:
  misc_feature (1)..(357): Homolog of NCBI NO: 15227613 NR Description: putative flavonol 3-O-glucosyltransferase
  misc_feature (1)..(360): Homolog of NCBI NO: 30680040 NR Description: glycosyltransferase family [Arabidopsis thaliana]
  misc_feature (1)..(362): Homolog of NCBI NO: 15222344 NR Description: UDP-glucose glucosyltransferase, putative
  misc_feature (1)..(362): Homolog of NCBI NO: 15222348 NR Description: UDP-glucose glucosyltransferase, putative
  misc_feature (1)..(364): Homolog of NCBI NO: 21555082 NR Description: putative flavonol 3-O-glucosyltransferase
  misc_feature (1)..(364): Homolog of NCBI NO: 15227606 NR Description: putative flavonol 3-O-glucosyltransferase
  misc_feature (1)..(365): Homolog of NCBI NO: 15227610 NR Description: putative flavonol 3-O-glucosyltransferase
MDILTSLALDGVKVKGLVVDFFCLPMIDVAKDISLPFYVFLTTNSGFLAMMQYLADRHSRDTSVFVRNSEEMLSIPGFVNPVPANVLPSALFVEDGYDAYVKLAILFTKANGILVNSSFDIEPYSVNHFLQEQNYPSVYAVGPIFDLKAQPHPEQDLTRRDELMKWLDDQPEASVVFLCFGSMARLRGSLVKEIAHGLELCQYRFLWSLRKEEVTKDDLPEGFLDRVDGRGMICGWSPQVEILAHKAVGGFVSHCGWNSIVESLWFGVPIVTWPMYAEQQLNAFLMVKELKLAVELKLDYRVHSDEIVNANEIETAIRYVMDTDNNVVRKRVMDISQMIQRATKNGGSSFAAIEKFIYDVIGIKP

SEQ ID NO: 21379 - DNA, 755 bp, Arabidopsis thaliana
  misc_feature (1)..(755): Ceres Seq. ID no. 12348712
  misc_feature: MA Experiment ID: 108434 Result: Up-regulated in Transcription
  misc_feature: MA Experiment 108434 PARAMETER Experiment Name: At_Root_Tips_cDNA_P Parameter: Tissue Value: Root Tips
  misc_feature: MA Experiment ID: 108461 Result: Up-regulated in Transcription
  misc_feature: MA Experiment 108461 PARAMETER Experiment Name: At_Germinating_Seeds_cDNA_P Parameter: Age (day) Value: 1 vs. 0
  misc_feature: MA Experiment 108461 PARAMETER Experiment Name: At_Germinating_Seeds_cDNA_P Parameter: Tissue Value: Germinating Seeds
  misc_feature: MA Experiment ID: 108462 Result: Up-regulated in Transcription
  misc_feature: MA Experiment 108462 PARAMETER Experiment Name: At_Germinating_Seeds_cDNA_P Parameter: Age (day) Value: 2 vs. 0
  misc_feature: MA Experiment 108462 PARAMETER Experiment Name: At_Germinating_Seeds_cDNA_P Parameter: Tissue Value: Germinating Seeds
  misc_feature: MA Experiment ID: 108573 Result: Down-regulated in Transcription
  misc_feature: MA Experiment 108573 PARAMETER Experiment Name: At_Drought_cDNA_P Parameter: Timepoint (hr) Value: 6
  misc_feature: MA Experiment 108573 PARAMETER Experiment Name: At_Drought_cDNA_P Parameter: Tissue Value: Aerial
  misc_feature: MA Experiment 108573 PARAMETER Experiment Name: At_Drought_cDNA_P Parameter: Treatment Value: Drought vs. No Drought
  misc_feature: MA Experiment ID: 108595 Result: Up-regulated in Transcription
  misc_feature: MA Experiment 108595 PARAMETER Experiment Name: At_Ler-pi_Ovule_cDNA_P Parameter: Plant Line Value: null
  misc_feature: MA Experiment ID: 20000112 Result: Up-regulated in Transcription
  misc_feature: MA Experiment 20000112 PARAMETER Experiment Name: At_42deg_Heat_cDNA_P Parameter: Temperature (deg C) Value: 42 vs. 22
  misc_feature: MA Experiment 20000112 PARAMETER Experiment Name: At_42deg_Heat_cDNA_P Parameter: Timepoint (hr) Value: 2
  misc_feature: MA Experiment 20000112 PARAMETER Experiment Name: At_42deg_Heat_cDNA_P Parameter: Tissue Value: Aerial
  misc_feature: MA Experiment ID: 20000144 Result: Up-regulated in Transcription
  misc_feature: MA Experiment 20000144 PARAMETER Experiment Name: At_42deg_Heat_cDNA_P Parameter: Temperature (deg C) Value: 42 vs. 22
  misc_feature: MA Experiment 20000144 PARAMETER Experiment Name: At_42deg_Heat_cDNA_P Parameter: Timepoint (hr) Value: 1
  misc_feature: MA Experiment 20000144 PARAMETER Experiment Name: At_42deg_Heat_cDNA_P Parameter: Tissue Value: Aerial
  misc_feature: MA Experiment ID: 20000180 Result: Up-regulated in Transcription
  misc_feature: MA Experiment 20000180 PARAMETER Experiment Name: At_Germinating_Seeds_P Parameter: Age (hr) Value: 24 vs. 0
  misc_feature: MA Experiment 20000180 PARAMETER Experiment Name: At_Germinating_Seeds_P Parameter: Tissue Value: Germinating Seeds
  misc_feature: MA Experiment ID: 20000437 Result: Down-regulated in Transcription
  misc_feature: MA Experiment 20000437 PARAMETER Experiment Name: At_Drought_P Parameter: Age (day) Value: 8
  misc_feature: MA Experiment 20000437 PARAMETER Experiment Name: At_Drought_P Parameter: Organism Value: A. thaliana
  misc_feature: MA Experiment 20000437 PARAMETER Experiment Name: At_Drought_P Parameter: Plant Line Value: WS
  misc_feature: MA Experiment 20000437 PARAMETER Experiment Name: At_Drought_P Parameter: Timepoint (hr) Value: 24
  misc_feature: MA Experiment 20000437 PARAMETER Experiment Name: At_Drought_P Parameter: Tissue Value: Whole Plant
  misc_feature: MA Experiment 20000437 PARAMETER Experiment Name: At_Drought_P Parameter: Treatment Value: Drought vs. No Drought
  misc_feature: MA Experiment ID: 20000794 Result: Down-regulated in Transcription
  misc_feature: MA Experiment 20000794 PARAMETER Experiment Name: At_Petals_P Parameter: Age (day) Value: 23-25 days
  misc_feature: MA Experiment 20000794 PARAMETER Experiment Name: At_Petals_P Parameter: Plant Line Value: WS
  misc_feature: MA Experiment 20000794 PARAMETER Experiment Name: At_Petals_P Parameter: Tissue Value: Petals vs. Whole plant
  misc_feature: MA Experiment ID: 20001558 Result: Up-regulated in Transcription
  misc_feature: MA Experiment 20001558 PARAMETER Experiment Name: At_Drought_Soil_Dry_P Parameter: Age (day) Value: 27
  misc_feature: MA Experiment 20001558 PARAMETER Experiment Name: At_Drought_Soil_Dry_P Parameter: Organism Value: A. thaliana
  misc_feature: MA Experiment 20001558 PARAMETER Experiment Name: At_Drought_Soil_Dry_P Parameter: Plant Line Value: WS
  misc_feature: MA Experiment 20001558 PARAMETER Experiment Name: At_Drought_Soil_Dry_P Parameter: Post Timepoint (hr) Value: 6
  misc_feature: MA Experiment 20001558 PARAMETER Experiment Name: At_Drought_Soil_Dry_P Parameter: Post-Treatment Value: Re-Water vs. No Drought
  misc_feature: MA Experiment 20001558 PARAMETER Experiment Name: At_Drought_Soil_Dry_P Parameter: Timepoint (day) Value: 13
  misc_feature: MA Experiment 20001558 PARAMETER Experiment Name: At_Drought_Soil_Dry_P Parameter: Treatment Value: Drought vs. No Drought
  misc_feature: MA Experiment ID: 20001560 Result: Up-regulated in Transcription
  misc_feature: MA Experiment 20001560 PARAMETER Experiment Name: At_Drought_Soil_Dry_P Parameter: Age (day) Value: 28
  misc_feature: MA Experiment 20001560 PARAMETER Experiment Name: At_Drought_Soil_Dry_P Parameter: Organism Value: A. thaliana
  misc_feature: MA Experiment 20001560 PARAMETER Experiment Name: At_Drought_Soil_Dry_P Parameter: Plant Line Value: WS
  misc_feature: MA Experiment 20001560 PARAMETER Experiment Name: At_Drought_Soil_Dry_P Parameter: Post Timepoint (hr) Value: None
  misc_feature: MA Experiment 20001560 PARAMETER Experiment Name: At_Drought_Soil_Dry_P Parameter: Post-Treatment Value: None
  misc_feature: MA Experiment 20001560 PARAMETER Experiment Name: At_Drought_Soil_Dry_P Parameter: Timepoint (day) Value: 14
  misc_feature: MA Experiment 20001560 PARAMETER Experiment Name: At_Drought_Soil_Dry_P Parameter: Treatment Value: Drought vs. No Drought
  misc_feature: MA Experiment ID: 20001911 Result: Down-regulated in Transcription
  misc_feature: MA Experiment 20001911 PARAMETER Experiment Name: At_Drought_Reproduction_P Parameter: Age (day) Value: 40
  misc_feature: MA Experiment 20001911 PARAMETER Experiment Name: At_Drought_Reproduction_P Parameter: Organism Value: A. thaliana
  misc_feature: MA Experiment 20001911 PARAMETER Experiment Name: At_Drought_Reproduction_P Parameter: Plant Line Value: WS
  misc_feature: MA Experiment 20001911 PARAMETER Experiment Name: At_Drought_Reproduction_P Parameter: Timepoint (day) Value: 10
  misc_feature: MA Experiment 20001911 PARAMETER Experiment Name: At_Drought_Reproduction_P Parameter: Tissue Value: Flowers
  misc_feature: MA Experiment 20001911 PARAMETER Experiment Name: At_Drought_Reproduction_P Parameter: Treatment Value: Drought vs. No Drought
agaactcagatttgaagcaaaacatcaatcggagaaggaaggaagaaagaaaagatgggagctttagggaagctaatcgacgtagctctcttcgtatactttgtttcaatggcgataattgcgccgctcatcgacgggcaaacctcacttccttcaggaatatatccagcgtttctcaccgatctgaaaagcaagtacattgccgattttggagattacttgctcatggagaagccgcatttcctagttggactcgtttggcatgagcttctgttcttatggccgctctccattgctaacgtctacgccattcttgccggaaagtcgtggtttggtaccacctgcttgttgtatggagcttccctcgtcacttccatggctgcaatcctaggagatatgataggttcagggaaggcatctgatcgattgctaatgatgtatgtgcctttcatgggttttgggattctggctgttcttcgtggcttagtttatcgatccaccaaaaacactggatcttctggcaagagatccactatcatgcccagaagaaagctggcctgagattcaaaaaaaaaaaaagcagttgatttttctctctggaagacttactcatcctttttctgtatatgcctagaaagaggtgtttatttttccttgtgaaaactttattgctttctgatttatgtggaattcttgtttgttgactcagcaacaatgaaatgtttacttggttgatataaaattcattcttgact

SEQ ID NO: 21380 - protein, 168 aa, Arabidopsis thaliana
  peptide (1)..(168): Ceres Seq. ID no. 12348713
  misc_feature (1)..(112): Homolog of NCBI NO: 19526880 NR Description: RIKEN cDNA 1810014L12 [Mus musculus]
  misc_feature (1)..(153): Homolog of NCBI NO: 28411943 NR Description: OSJNBa0027N13.35 [Oryza sativa (japonica
  misc_feature (1)..(155): Homolog of NCBI NO: 28411944 NR Description: OSJNBa0027N13.37 [Oryza sativa (japonica
  misc_feature (1)..(168): Homolog of NCBI NO: 15220447 NR Description: hypothetical protein; protein id: At1g05220.1
  misc_feature (1)..(168): Homolog of NCBI NO: 18402955 NR Description: expressed protein
  misc_feature (1)..(168): Homolog of NCBI NO: 18390494 NR Description: expressed protein
MGALGKLIDVALFVYFVSMAIIAPLIDGQTSLPSGIYPAFLTDLKSKYIADFGDYLLMEKPHFLVGLVWHELLFLWPLSIANVYAILAGKSWFGTTCLLYGASLVTSMAAILGDMIGSGKASDRLLMMYVPFMGFGILAVLRGLVYRSTKNTGSSGKRSTIMPRRKLA

SEQ ID NO: 21381 - protein, 150 aa, Arabidopsis thaliana
  peptide (1)..(150): Ceres Seq. ID no. 12348714
  misc_feature (1)..(94): Homolog of NCBI NO: 19526880 NR Description: RIKEN cDNA 1810014L12 [Mus musculus]
  misc_feature (1)..(135): Homolog of NCBI NO: 28411943 NR Description: OSJNBa0027N13.35 [Oryza sativa (japonica
  misc_feature (1)..(137): Homolog of NCBI NO: 28411944 NR Description: OSJNBa0027N13.37 [Oryza sativa (japonica
  misc_feature (1)..(150): Homolog of NCBI NO: 15220447 NR Description: hypothetical protein; protein id: At1g05220.1
  misc_feature (1)..(150): Homolog of NCBI NO: 18402955 NR Description: expressed protein
  misc_feature (1)..(150): Homolog of NCBI NO: 18390494 NR Description: expressed protein
MAIIAPLIDGQTSLPSGIYPAFLTDLKSKYIADFGDYLLMEKPHFLVGLVWHELLFLWPLSIANVYAILAGKSWFGTTCLLYGASLVTSMAAILGDMIGSGKASDRLLMMYVPFMGFGILAVLRGLVYRSTKNTGSSGKRSTIMPRRKLA

SEQ ID NO: 21382 - protein, 111 aa, Arabidopsis thaliana
  peptide (1)..(111): Ceres Seq. ID no. 12348715
  misc_feature (1)..(55): Homolog of NCBI NO: 19526880 NR Description: RIKEN cDNA 1810014L12 [Mus musculus]
  misc_feature (1)..(96): Homolog of NCBI NO: 28411943 NR Description: OSJNBa0027N13.35 [Oryza sativa (japonica
  misc_feature (1)..(98): Homolog of NCBI NO: 28411944 NR Description: OSJNBa0027N13.37 [Oryza sativa (japonica
  misc_feature (1)..(111): Homolog of NCBI NO: 15220447 NR Description: hypothetical protein; protein id: At1g05220.1
  misc_feature (1)..(111): Homolog of NCBI NO: 18402955 NR Description: expressed protein
  misc_feature (1)..(111): Homolog of NCBI NO: 18390494 NR Description: expressed protein
MEKPHFLVGLVWHELLFLWPLSIANVYAILAGKSWFGTTCLLYGASLVTSMAAILGDMIGSGKASDRLLMMYVPFMGFGILAVLRGLVYRSTKNTGSSGKRSTIMPRRKLA

SEQ ID NO: 21383 - DNA, 910 bp, Arabidopsis thaliana
  misc_feature (1)..(910): Ceres Seq. ID no. 12393253
  misc_feature: MA Experiment ID: 20000166 Result: Up-regulated in Transcription
  misc_feature: MA Experiment 20000166 PARAMETER Experiment Name: At_100uM_ABA_P Parameter: Age (day) Value: 14
  misc_feature: MA Experiment 20000166 PARAMETER Experiment Name: At_100uM_ABA_P Parameter: Organism Value: A. thaliana
  misc_feature: MA Experiment 20000166 PARAMETER Experiment Name: At_100uM_ABA_P Parameter: Plant Line Value: WS
  misc_feature: MA Experiment 20000166 PARAMETER Experiment Name: At_100uM_ABA_P Parameter: Timepoint (hr) Value: 1
  misc_feature: MA Experiment 20000166 PARAMETER Experiment Name: At_100uM_ABA_P Parameter: Tissue Value: Aerial
  misc_feature: MA Experiment 20000166 PARAMETER Experiment Name: At_100uM_ABA_P Parameter: Treatment Value: 100uM ABA vs. No Treatment
  misc_feature: MA Experiment ID: 20000453 Result: Up-regulated in Transcription
  misc_feature: MA Experiment 20000453 PARAMETER Experiment Name: At_100uM_ABA_P Parameter: Age (day) Value: 15
  misc_feature: MA Experiment 20000453 PARAMETER Experiment Name: At_100uM_ABA_P Parameter: Organism Value: A. thaliana
  misc_feature: MA Experiment 20000453 PARAMETER Experiment Name: At_100uM_ABA_P Parameter: Plant Line Value: WS
  misc_feature: MA Experiment 20000453 PARAMETER Experiment Name: At_100uM_ABA_P Parameter: Timepoint (hr) Value: 24
  misc_feature: MA Experiment 20000453 PARAMETER Experiment Name: At_100uM_ABA_P Parameter: Tissue Value: Aerial
  misc_feature: MA Experiment 20000453 PARAMETER Experiment Name: At_100uM_ABA_P Parameter: Treatment Value: 100uM ABA vs. No Treatment
  misc_feature: MA Experiment ID: 20001755 Result: Up-regulated in Transcription
  misc_feature: MA Experiment 20001755 PARAMETER Experiment Name: At_50mM_NH4NO3_L-to-H_P Parameter: Timepoint (hr) Value: 2
  misc_feature: MA Experiment 20001755 PARAMETER Experiment Name: At_50mM_NH4NO3_L-to-H_P Parameter: Tissue Value: Leaf
  misc_feature: MA Experiment 20001755 PARAMETER Experiment Name: At_50mM_NH4NO3_L-to-H_P Parameter: Treatment Value: 50mM NH4NO3 vs 100mM Mannitol
  misc_feature: MA Experiment ID: 20001773 Result: Down-regulated in Transcription
  misc_feature: MA Experiment 20001773 PARAMETER Experiment Name: At_Far-red-enriched-adult_P Parameter: Age (day) Value: 30
  misc_feature: MA Experiment 20001773 PARAMETER Experiment Name: At_Far-red-enriched-adult_P Parameter: Light Value: Far-red enriched vs. White
  misc_feature: MA Experiment 20001773 PARAMETER Experiment Name: At_Far-red-enriched-adult_P Parameter: Organism Value: A. thaliana
  misc_feature: MA Experiment 20001773 PARAMETER Experiment Name: At_Far-red-enriched-adult_P Parameter: Plant Line Value: Columbia
  misc_feature: MA Experiment 20001773 PARAMETER Experiment Name: At_Far-red-enriched-adult_P Parameter: Timepoint (hr) Value: 48
  misc_feature: MA Experiment 20001773 PARAMETER Experiment Name: At_Far-red-enriched-adult_P Parameter: Tissue Value: Aerial
aatataggtagctacaactaattagagtgtttcttgttgttaaaaatatcgtacaaaaatggccgatgaggtcacaatcgggtttcgcttctatcccacggaagaagaactggtttcgttctacctacgaaaccagctcgaaggaaggagtgatgactcaatgcatcgtgtcattcccgtacttgacgtctttgaggtcgagcctagtcatcttccaaatgttgctggagtgagatgtcgaggagacgctgagcaatggttcttcttcgtgccacgacaagaacgcgaagcaagaggaggcagaccgagtagaactactggttcaggatactggaaagcaactggatcacctggtccagtcttttccaaagacaacaaaatgattggagcaaagaaaactatggttttctacactggaaaagcacccacaggaagaaaaactaaatggaaaatgaatgagtaccacgccgttgacgaaacagtcaacgcttccacaatccctaagctgagacgtgagttcagtttatgtcgagtctacataacaacaggaagctccagagcttttgatagacgtcctgagggagttttgcagacagagagaatgctaacaagtgatgttgcagtagctgagacatcgttccgtgtggaaagctcactggaaacttcgatttcaggaggagaacatattgatgtctctatgaacacagagtttgttgatggactatcagaaccgatgtgggactgggaacagctgacttggccttgaagctatatagattttataatcaagcaaatttaaacttgtttcaattgcttattgttagtttgaattttatgacccgaaagattctttttctttctttaccttgtaacgtgagaatttgagaaataataaatgacctagacagtg

SEQ ID NO: 21384 - protein, 235 aa, Arabidopsis thaliana
  peptide (1)..(235): Ceres Seq. ID no. 12393254
  misc_feature (5)..(138): Pfam Name: No apical meristem (NAM) protein Pfam Description: No apical meristem (NAM) protein
  misc_feature (3)..(217): Homolog of NCBI NO: 6910587 NR Description: CDS [Arabidopsis thaliana]
  misc_feature (3)..(135): Homolog of NCBI NO: 25410986 NR Description: NAM (no apical meristem)-like protein
  misc_feature (1)..(227): Homolog of NCBI NO: 22326685 NR Description: Expressed protein
  misc_feature (3)..(164): Homolog of NCBI NO: 30678002 NR Description: No apical meristem (NAM) protein family
  misc_feature (3)..(164): Homolog of NCBI NO: 30678000 NR Description: No apical meristem (NAM) protein family
  misc_feature (1)..(203): Homolog of NCBI NO: 25411775 NR Description: NAM (no apical meristem)-like protein
  misc_feature (8)..(232): Homolog of NCBI NO: 34908524 NR Description: putative NAC-domain protein
  misc_feature (4)..(234): Homolog of NCBI NO: 25457840 NR Description: NAC-domain protein [imported] - common tobacco
  misc_feature (1)..(234): Homolog of NCBI NO: 15229943 NR Description: NAC domain -like protein; protein id: At3g44350.1
  misc_feature (1)..(235): Homolog of NCBI NO: 15242228 NR Description: NAC-domain protein-like
MADEVTIGFRFYPTEEELVSFYLRNQLEGRSDDSMHRVIPVLDVFEVEPSHLPNVAGVRCRGDAEQWFFFVPRQEREARGGRPSRTTGSGYWKATGSPGPVFSKDNKMIGAKKTMVFYTGKAPTGRKTKWKMNEYHAVDETVNASTIPKLRREFSLCRVYITTGSSRAFDRRPEGVLQTERMLTSDVAVAETSFRVESSLETSISGGEHIDVSMNTEFVDGLSEPMWDWEQLTWP

SEQ ID NO: 21385 - protein, 201 aa, Arabidopsis thaliana
  peptide (1)..(201): Ceres Seq. ID no. 12393255
  misc_feature (1)..(104): Pfam Name: No apical meristem (NAM) protein Pfam Description: No apical meristem (NAM) protein
  misc_feature (1)..(183): Homolog of NCBI NO: 6910587 NR Description: CDS [Arabidopsis thaliana]
  misc_feature (1)..(101): Homolog of NCBI NO: 25410986 NR Description: NAM (no apical meristem)-like protein
  misc_feature (1)..(193): Homolog of NCBI NO: 22326685 NR Description: Expressed protein
  misc_feature (1)..(130): Homolog of NCBI NO: 30678002 NR Description: No apical meristem (NAM) protein family
  misc_feature (1)..(130): Homolog of NCBI NO: 30678000 NR Description: No apical meristem (NAM) protein family
  misc_feature (1)..(169): Homolog of NCBI NO: 25411775 NR Description: NAM (no apical meristem)-like protein
  misc_feature (1)..(198): Homolog of NCBI NO: 34908524 NR Description: putative NAC-domain protein
  misc_feature (1)..(200): Homolog of NCBI NO: 25457840 NR Description: NAC-domain protein [imported] - common tobacco
  misc_feature (1)..(200): Homolog of NCBI NO: 15229943 NR Description: NAC domain -like protein; protein id: At3g44350.1
  misc_feature (1)..(201): Homolog of NCBI NO: 15242228 NR Description: NAC-domain protein-like
MHRVIPVLDVFEVEPSHLPNVAGVRCRGDAEQWFFFVPRQEREARGGRPSRTTGSGYWKATGSPGPVFSKDNKMIGAKKTMVFYTGKAPTGRKTKWKMNEYHAVDETVNASTIPKLRREFSLCRVYITTGSSRAFDRRPEGVLQTERMLTSDVAVAETSFRVESSLETSISGGEHIDVSMNTEFVDGLSEPMWDWEQLTWP

SEQ ID NO: 21386 - protein, 128 aa, Arabidopsis thaliana
  peptide (1)..(128): Ceres Seq. ID no. 12393256
  misc_feature (1)..(110): Homolog of NCBI NO: 6910587 NR Description: CDS [Arabidopsis thaliana]
  misc_feature (1)..(28): Homolog of NCBI NO: 25410986 NR Description: NAM (no apical meristem)-like protein
  misc_feature (1)..(120): Homolog of NCBI NO: 22326685 NR Description: Expressed protein
  misc_feature (1)..(57): Homolog of NCBI NO: 30678002 NR Description: No apical meristem (NAM) protein family
  misc_feature (1)..(57): Homolog of NCBI NO: 30678000 NR Description: No apical meristem (NAM) protein family
  misc_feature (1)..(96): Homolog of NCBI NO: 25411775 NR Description: NAM (no apical meristem)-like protein
  misc_feature (1)..(125): Homolog of NCBI NO: 34908524 NR Description: putative NAC-domain protein
  misc_feature (1)..(127): Homolog of NCBI NO: 25457840 NR Description: NAC-domain protein [imported] - common tobacco
  misc_feature (1)..(127): Homolog of NCBI NO: 15229943 NR Description: NAC domain -like protein; protein id: At3g44350.1
  misc_feature (1)..(128): Homolog of NCBI NO: 15242228 NR Description: NAC-domain protein-like
MIGAKKTMVFYTGKAPTGRKTKWKMNEYHAVDETVNASTIPKLRREFSLCRVYITTGSSRAFDRRPEGVLQTERMLTSDVAVAETSFRVESSLETSISGGEHIDVSMNTEFVDGLSEPMWDWEQLTWP

SEQ ID NO: 21387 - DNA, 737 bp, Arabidopsis thaliana
  misc_feature (1)..(737): Ceres Seq. ID no. 12370084
  misc_feature: MA Experiment ID: 20000224 Result: Down-regulated in Transcription
attttgctctcaaatcgcgactcctctctgggctctctccttctgtatctctctaaggggaacaacgaaatcatcaccttctcttttatcgtcaccggcgatcattcaagactcgatctccggtaatcagaacattttcattcgccgacatggcgatgaccatcgaagtacttgctggacttgctttcatgttttcatctagtatcctcctacagatcctggcatgcgcgatatatggtaactggtggccaatgctatcagcactcatgtatgtagtggtgcctatgccttgtatgttctttggaggaggctcaacccaattccttattagtcgggacggtggagggtggatagacgcagcgaagttcttgaccggagcatcgaccgtgggaagccttgctatcccaatcatcttaaggcacgcacagatgatcgagacaggtgcaatgctcatagagttcacatcattcttcatattcatttgcactgtcatgtgttttcaccgggctagtctcgatgatgactggtaacgtagatgttgctgctcgtgaattactaattggattcgtatgagaaagagagtgtgaagaaaagatgaggttactatgagtggttaagaaagttgtgttcttctccctctttttgtaaagctttgtatcactcaatgtttgtaaaaagttttattcatcactgtgaatcttttcctgaaactaagtgccaaaatattttgtttcgcc

SEQ ID NO: 21388 - protein, 126 aa, Arabidopsis thaliana
  peptide (1)..(126): Ceres Seq. ID no. 12370085
  misc_feature (8)..(115): Homolog of NCBI NO: 18398420 NR Description: Expressed protein
  misc_feature (8)..(115): Homolog of NCBI NO: 21554354 NR Description: unknown [Arabidopsis thaliana]
  misc_feature (46)..(126): Homolog of NCBI NO: 34905898 NR Description: P0458E05.25 [Oryza sativa (japonica
  misc_feature (14)..(126): Homolog of NCBI NO: 18399269 NR Description: expressed protein
  misc_feature (1)..(126): Homolog of NCBI NO: 12322900 NR Description: unknown protein; 72859-71336 [Arabidopsis
  misc_feature (1)..(126): Homolog of NCBI NO: 16648828 NR Description: AT3g11530/F24K9_21 [Arabidopsis thaliana]
  misc_feature (5)..(115): Homolog of NCBI NO: 21431944 NR Description: Hypothetical protein C30B5.2 in chromosome II
  misc_feature (5)..(125): Homolog of NCBI NO: 32564911 NR Description: vacuolar protein sorting 55 family member,
  misc_feature (5)..(117): Homolog of NCBI NO: 38103616 NR Description: hypothetical protein MG04054.4 [Magnaporthe
  misc_feature (8)..(115): Homolog of NCBI NO: 25518386 NR Description: hypothetical protein F5D14.18 - Arabidopsis
MAMTIEVLAGLAFMFSSSILLQILACAIYGNWWPMLSALMYVVVPMPCMFFGGGSTQFLISRDGGGWIDAAKFLTGASTVGSLAIPIILRHAQMIETGAMLIEFTSFFIFICTVMCFHRASLDDDW

SEQ ID NO: 21389 - protein, 124 aa, Arabidopsis thaliana
  peptide (1)..(124): Ceres Seq. ID no. 12370086
  misc_feature (3)..(113): Homolog of NCBI NO: 21431944 NR Description: Hypothetical protein C30B5.2 in chromosome II
  misc_feature (3)..(123): Homolog of NCBI NO: 32564911 NR Description: vacuolar protein sorting 55 family member,
  misc_feature (3)..(115): Homolog of NCBI NO: 38103616 NR Description: hypothetical protein MG04054.4 [Magnaporthe
  misc_feature (6)..(113): Homolog of NCBI NO: 25518386 NR Description: hypothetical protein F5D14.18 - Arabidopsis
  misc_feature (6)..(113): Homolog of NCBI NO: 18398420 NR Description: Expressed protein
  misc_feature (6)..(113): Homolog of NCBI NO: 21554354 NR Description: unknown [Arabidopsis thaliana]
  misc_feature (44)..(124): Homolog of NCBI NO: 34905898 NR Description: P0458E05.25 [Oryza sativa (japonica
  misc_feature (12)..(124): Homolog of NCBI NO: 18399269 NR Description: expressed protein
  misc_feature (1)..(124): Homolog of NCBI NO: 12322900 NR Description: unknown protein; 72859-71336 [Arabidopsis
  misc_feature (1)..(124): Homolog of NCBI NO: 16648828 NR Description: AT3g11530/F24K9_21 [Arabidopsis thaliana]
MTIEVLAGLAFMFSSSILLQILACAIYGNWWPMLSALMYVVVPMPCMFFGGGSTQFLISRDGGGWIDAAKFLTGASTVGSLAIPIILRHAQMIETGAMLIEFTSFFIFICTVMCFHRASLDDDW

SEQ ID NO: 21390 - protein, 113 aa, Arabidopsis thaliana
  peptide (1)..(113): Ceres Seq. ID no. 12370087
  misc_feature (1)..(102): Homolog of NCBI NO: 21431944 NR Description: Hypothetical protein C30B5.2 in chromosome II
  misc_feature (1)..(112): Homolog of NCBI NO: 32564911 NR Description: vacuolar protein sorting 55 family member,
  misc_feature (1)..(104): Homolog of NCBI NO: 38103616 NR Description: hypothetical protein MG04054.4 [Magnaporthe
  misc_feature (1)..(102): Homolog of NCBI NO: 25518386 NR Description: hypothetical protein F5D14.18 - Arabidopsis
  misc_feature (1)..(102): Homolog of NCBI NO: 18398420 NR Description: Expressed protein
  misc_feature (1)..(102): Homolog of NCBI NO: 21554354 NR Description: unknown [Arabidopsis thaliana]
  misc_feature (33)..(113): Homolog of NCBI NO: 34905898 NR Description: P0458E05.25 [Oryza sativa (japonica
  misc_feature (1)..(113): Homolog of NCBI NO: 18399269 NR Description: expressed protein
  misc_feature (1)..(113): Homolog of NCBI NO: 12322900 NR Description: unknown protein; 72859-71336 [Arabidopsis
  misc_feature (1)..(113): Homolog of NCBI NO: 16648828 NR Description: AT3g11530/F24K9_21 [Arabidopsis thaliana]
MFSSSILLQILACAIYGNWWPMLSALMYVVVPMPCMFFGGGSTQFLISRDGGGWIDAAKFLTGASTVGSLAIPIILRHAQMIETGAMLIEFTSFFIFICTVMCFHRASLDDDW

SEQ ID NO: 21391 - protein, 87 aa, Arabidopsis thaliana
  peptide (1)..(87): Ceres Seq. ID no. 12370088
  misc_feature (1)..(76): Homolog of NCBI NO: 21431944 NR Description: Hypothetical protein C30B5.2 in chromosome II
  misc_feature (1)..(86): Homolog of NCBI NO: 32564911 NR Description: vacuolar protein sorting 55 family member,
  misc_feature (1)..(78): Homolog of NCBI NO: 38103616 NR Description: hypothetical protein MG04054.4 [Magnaporthe
  misc_feature (1)..(76): Homolog of NCBI NO: 25518386 NR Description: hypothetical protein F5D14.18 - Arabidopsis
  misc_feature (1)..(76): Homolog of NCBI NO: 18398420 NR Description: Expressed protein
  misc_feature (1)..(76): Homolog of NCBI NO: 21554354 NR Description: unknown [Arabidopsis thaliana]
  misc_feature (7)..(87): Homolog of NCBI NO: 34905898 NR Description: P0458E05.25 [Oryza sativa (japonica
  misc_feature (1)..(87): Homolog of NCBI NO: 18399269 NR Description: expressed protein
  misc_feature (1)..(87): Homolog of NCBI NO: 12322900 NR Description: unknown protein; 72859-71336 [Arabidopsis
  misc_feature (1)..(87): Homolog of NCBI NO: 16648828 NR Description: AT3g11530/F24K9_21 [Arabidopsis thaliana]
MYVVVPMPCMFFGGGSTQFLISRDGGGWIDAAKFLTGASTVGSLAIPIILRHAQMIETGAMLIEFTSFFIFICTVMCFHRASLDDDW

SEQ ID NO: 21392 - DNA, 784 bp, Arabidopsis thaliana
  misc_feature (1)..(784): Ceres Seq. ID no. 12738720
  misc_feature: MA Experiment ID: 108434 Result: Up-regulated in Transcription
  misc_feature: MA Experiment 108434 PARAMETER Experiment Name: At_Root_Tips_cDNA_P Parameter: Tissue Value: Root Tips
  misc_feature: MA Experiment ID: 108462 Result: Down-regulated in Transcription
  misc_feature: MA Experiment 108462 PARAMETER Experiment Name: At_Germinating_Seeds_cDNA_P Parameter: Age (day) Value: 2 vs. 0
  misc_feature: MA Experiment 108462 PARAMETER Experiment Name: At_Germinating_Seeds_cDNA_P Parameter: Tissue Value: Germinating Seeds
  misc_feature: MA Experiment ID: 108463 Result: Down-regulated in Transcription
  misc_feature: MA Experiment 108463 PARAMETER Experiment Name: At_Germinating_Seeds_cDNA_P Parameter: Age (day) Value: 3 vs. 0
  misc_feature: MA Experiment 108463 PARAMETER Experiment Name: At_Germinating_Seeds_cDNA_P Parameter: Tissue Value: Germinating Seeds
  misc_feature: MA Experiment ID: 108464 Result: Down-regulated in Transcription
  misc_feature: MA Experiment 108464 PARAMETER Experiment Name: At_Germinating_Seeds_cDNA_P Parameter: Age (day) Value: 4 vs. 0
  misc_feature: MA Experiment 108464 PARAMETER Experiment Name: At_Germinating_Seeds_cDNA_P Parameter: Tissue Value: Germinating Seeds
  misc_feature: MA Experiment ID: 108573 Result: Down-regulated in Transcription
  misc_feature: MA Experiment 108573 PARAMETER Experiment Name: At_Drought_cDNA_P Parameter: Timepoint (hr) Value: 6
  misc_feature: MA Experiment 108573 PARAMETER Experiment Name: At_Drought_cDNA_P Parameter: Tissue Value: Aerial
  misc_feature: MA Experiment 108573 PARAMETER Experiment Name: At_Drought_cDNA_P Parameter: Treatment Value: Drought vs. No Drought
  misc_feature: MA Experiment ID: 108585 Result: Down-regulated in Transcription
  misc_feature: MA Experiment 108585 PARAMETER Experiment Name: At_5mM_NaNP_cDNA_P Parameter: Timepoint (hr) Value: 6
  misc_feature: MA Experiment 108585 PARAMETER Experiment Name: At_5mM_NaNP_cDNA_P Parameter: Tissue Value: Aerial
  misc_feature: MA Experiment 108585 PARAMETER Experiment Name: At_5mM_NaNP_cDNA_P Parameter: Treatment Value: null
  misc_feature: MA Experiment ID: 108595 Result: Down-regulated in Transcription
  misc_feature: MA Experiment 108595 PARAMETER Experiment Name: At_Ler-pi_Ovule_cDNA_P Parameter: Plant Line Value: null
  misc_feature: MA Experiment ID: 108668 Result: Down-regulated in Transcription
  misc_feature: MA Experiment 108668 PARAMETER Experiment Name: At_2mM_SA_cDNA_P Parameter: Plant Line Value: WS
  misc_feature: MA Experiment 108668 PARAMETER Experiment Name: At_2mM_SA_cDNA_P Parameter: Timepoint (hr) Value: 6
  misc_feature: MA Experiment 108668 PARAMETER Experiment Name: At_2mM_SA_cDNA_P Parameter: Treatment Value: 2mM SA vs. No Treatment
  misc_feature: MA Experiment ID: 20000089 Result: Up-regulated in Transcription
  misc_feature: MA Experiment ID: 20000182 Result: Down-regulated in Transcription
  misc_feature: MA Experiment 20000182 PARAMETER Experiment Name: At_2mM_SA_P Parameter: Age (day) Value: 14
  misc_feature: MA Experiment 20000182 PARAMETER Experiment Name: At_2mM_SA_P Parameter: Organism Value: A. thaliana
  misc_feature: MA Experiment 20000182 PARAMETER Experiment Name: At_2mM_SA_P Parameter: Plant Line Value: WS
  misc_feature: MA Experiment 20000182 PARAMETER Experiment Name: At_2mM_SA_P Parameter: Timepoint (hr) Value: 6
  misc_feature: MA Experiment 20000182 PARAMETER Experiment Name: At_2mM_SA_P Parameter: Tissue Value: Aerial
  misc_feature: MA Experiment 20000182 PARAMETER Experiment Name: At_2mM_SA_P Parameter: Treatment Value: 2mM SA vs. No Treatment
  misc_feature: MA Experiment ID: 20000185 Result: Down-regulated in Transcription
  misc_feature: MA Experiment 20000185 PARAMETER Experiment Name: At_Roots__P Parameter: Age (day) Value: 7 vs. 21
  misc_feature: MA Experiment 20000185 PARAMETER Experiment Name: At_Roots__P Parameter: Organism Value: A. thaliana
  misc_feature: MA Experiment 20000185 PARAMETER Experiment Name: At_Roots__P Parameter: Tissue Value: Roots vs. Whole Plant
  misc_feature: MA Experiment ID: 20000224 Result: Up-regulated in Transcription
  misc_feature: MA Experiment ID: 20000436 Result: Down-regulated in Transcription
  misc_feature: MA Experiment 20000436 PARAMETER Experiment Name: At_Drought_P Parameter: Age (day) Value: 7
  misc_feature: MA Experiment 20000436 PARAMETER Experiment Name: At_Drought_P Parameter: Organism Value: A. thaliana
  misc_feature: MA Experiment 20000436 PARAMETER Experiment Name: At_Drought_P Parameter: Plant Line Value: WS
  misc_feature: MA Experiment 20000436 PARAMETER Experiment Name: At_Drought_P Parameter: Timepoint (hr) Value: 12
  misc_feature: MA Experiment 20000436 PARAMETER Experiment Name: At_Drought_P Parameter: Tissue Value: Whole Plant
  misc_feature: MA Experiment 20000436 PARAMETER Experiment Name: At_Drought_P Parameter: Treatment Value: Drought vs. No Drought
  misc_feature: MA Experiment ID: 20000437 Result: Down-regulated in Transcription
  misc_feature: MA Experiment 20000437 PARAMETER Experiment Name: At_Drought_P Parameter: Age (day) Value: 8
  misc_feature: MA Experiment 20000437 PARAMETER Experiment Name: At_Drought_P Parameter: Organism Value: A. thaliana
  misc_feature: MA Experiment 20000437 PARAMETER Experiment Name: At_Drought_P Parameter: Plant Line Value: WS
  misc_feature: MA Experiment 20000437 PARAMETER Experiment Name: At_Drought_P Parameter: Timepoint (hr) Value: 24
  misc_feature: MA Experiment 20000437 PARAMETER Experiment Name: At_Drought_P Parameter: Tissue Value: Whole Plant
  misc_feature: MA Experiment 20000437 PARAMETER Experiment Name: At_Drought_P Parameter: Treatment Value: Drought vs. No Drought
  misc_feature: MA Experiment ID: 20000439 Result: Down-regulated in Transcription
  misc_feature: MA Experiment 20000439 PARAMETER Experiment Name: At_Roots__P Parameter: Age (day) Value: 14 vs. 21
  misc_feature: MA Experiment 20000439 PARAMETER Experiment Name: At_Roots__P Parameter: Organism Value: A. thaliana
  misc_feature: MA Experiment 20000439 PARAMETER Experiment Name: At_Roots__P Parameter: Tissue Value: Roots vs. Whole Plant
  misc_feature: MA Experiment ID: 20000527 Result: Up-regulated in Transcription
  misc_feature: MA Experiment 20000527 PARAMETER Experiment Name: At_10percent_PEG_P Parameter: Age (day) Value: 20
  misc_feature: MA Experiment 20000527 PARAMETER Experiment Name: At_10percent_PEG_P Parameter: Organism Value: A. thaliana
  misc_feature: MA Experiment 20000527 PARAMETER Experiment Name: At_10percent_PEG_P Parameter: Plant Line Value: WS
  misc_feature: MA Experiment 20000527 PARAMETER Experiment Name: At_10percent_PEG_P Parameter: Timepoint (day) Value: 20
  misc_feature: MA Experiment 20000527 PARAMETER Experiment Name: At_10percent_PEG_P Parameter: Tissue Value: Whole Plant
  misc_feature: MA Experiment 20000527 PARAMETER Experiment Name: At_10percent_PEG_P Parameter: Treatment Value: 10percent PEG vs. No Treatment
  misc_feature: MA Experiment ID: 20001247 Result: Down-regulated in Transcription
  misc_feature: MA Experiment 20001247 PARAMETER Experiment Name: At_Far-red-induction_P Parameter: Age (day) Value: 7
  misc_feature: MA Experiment 20001247 PARAMETER Experiment Name: At_Far-red-induction_P Parameter: Light Value: Far-red vs. White
  misc_feature: MA Experiment 20001247 PARAMETER Experiment Name: At_Far-red-induction_P Parameter: Organism Value: A. thaliana
  misc_feature: MA Experiment 20001247 PARAMETER Experiment Name: At_Far-red-induction_P Parameter: Plant Line Value: Columbia
  misc_feature: MA Experiment 20001247 PARAMETER Experiment Name: At_Far-red-induction_P Parameter: Timepoint (hr) Value: 1
  misc_feature: MA Experiment 20001247 PARAMETER Experiment Name: At_Far-red-induction_P Parameter: Tissue Value: Whole Plant
  misc_feature: MA Experiment ID: 20001458 Result: Up-regulated in Transcription
  misc_feature: MA Experiment 20001458 PARAMETER Experiment Name: At_50mM_NH4NO3_L-to-H_P Parameter: Age (day) Value: Undefined
  misc_feature: MA Experiment 20001458 PARAMETER Experiment Name: At_50mM_NH4NO3_L-to-H_P Parameter: Organism Value: Undefined
  misc_feature: MA Experiment 20001458 PARAMETER Experiment Name: At_50mM_NH4NO3_L-to-H_P Parameter: Plant Line Value: Undefined
  misc_feature: MA Experiment 20001458 PARAMETER Experiment Name: At_50mM_NH4NO3_L-to-H_P Parameter: Timepoint (hr) Value: 2
  misc_feature: MA Experiment 20001458 PARAMETER Experiment Name: At_50mM_NH4NO3_L-to-H_P Parameter: Tissue Value: Siliques
  misc_feature: MA Experiment 20001458 PARAMETER Experiment Name: At_50mM_NH4NO3_L-to-H_P Parameter: Treatment Value: 50mM NH4NO3 vs. 100mM Manitol
  misc_feature: MA Experiment ID: 20001556 Result: Up-regulated in Transcription
  misc_feature: MA Experiment 20001556 PARAMETER Experiment Name: At_Drought_Soil_Dry_P Parameter: Age (day) Value: 26
  misc_feature: MA Experiment 20001556 PARAMETER Experiment Name: At_Drought_Soil_Dry_P Parameter: Organism Value: A. thaliana
  misc_feature: MA Experiment 20001556 PARAMETER Experiment Name: At_Drought_Soil_Dry_P Parameter: Plant Line Value: WS
  misc_feature: MA Experiment 20001556 PARAMETER Experiment Name: At_Drought_Soil_Dry_P Parameter: Post Timepoint (hr) Value: None
  misc_feature: MA Experiment 20001556 PARAMETER Experiment Name: At_Drought_Soil_Dry_P Parameter: Post-Treatment Value: None
  misc_feature: MA Experiment 20001556 PARAMETER Experiment Name: At_Drought_Soil_Dry_P Parameter: Timepoint (day) Value: 12
  misc_feature: MA Experiment 20001556 PARAMETER Experiment Name: At_Drought_Soil_Dry_P Parameter: Treatment Value: Drought vs. No Drought
  misc_feature: MA Experiment ID: 20001558 Result: Up-regulated in Transcription
  misc_feature: MA Experiment 20001558 PARAMETER Experiment Name: At_Drought_Soil_Dry_P Parameter: Age (day) Value: 27
  misc_feature: MA Experiment 20001558 PARAMETER Experiment Name: At_Drought_Soil_Dry_P Parameter: Organism Value: A. thaliana
  misc_feature: MA Experiment 20001558 PARAMETER Experiment Name: At_Drought_Soil_Dry_P Parameter: Plant Line Value: WS
  misc_feature: MA Experiment 20001558 PARAMETER Experiment Name: At_Drought_Soil_Dry_P Parameter: Post Timepoint (hr) Value: 6
  misc_feature: MA Experiment 20001558 PARAMETER Experiment Name: At_Drought_Soil_Dry_P Parameter: Post-Treatment Value: Re-Water vs. No Drought
  misc_feature: MA Experiment 20001558 PARAMETER Experiment Name: At_Drought_Soil_Dry_P Parameter: Timepoint (day) Value: 13
  misc_feature: MA Experiment 20001558 PARAMETER Experiment Name: At_Drought_Soil_Dry_P Parameter: Treatment Value: Drought vs. No Drought
  misc_feature: MA Experiment ID: 20001560 Result: Up-regulated in Transcription
  misc_feature: MA Experiment 20001560 PARAMETER Experiment Name: At_Drought_Soil_Dry_P Parameter: Age (day) Value: 28
  misc_feature: MA Experiment 20001560 PARAMETER Experiment Name: At_Drought_Soil_Dry_P Parameter: Organism Value: A. thaliana
  misc_feature: MA Experiment 20001560 PARAMETER Experiment Name: At_Drought_Soil_Dry_P Parameter: Plant Line Value: WS
  misc_feature: MA Experiment 20001560 PARAMETER Experiment Name: At_Drought_Soil_Dry_P Parameter: Post Timepoint (hr) Value: None
  misc_feature: MA Experiment 20001560 PARAMETER Experiment Name: At_Drought_Soil_Dry_P Parameter: Post-Treatment Value: None
  misc_feature: MA Experiment 20001560 PARAMETER Experiment Name: At_Drought_Soil_Dry_P Parameter: Timepoint (day) Value: 14
  misc_feature: MA Experiment 20001560 PARAMETER Experiment Name: At_Drought_Soil_Dry_P Parameter: Treatment Value: Drought vs. No Drought
  misc_feature: MA Experiment ID: 20001757 Result: Up-regulated in Transcription
  misc_feature: MA Experiment 20001757 PARAMETER Experiment Name: At_50mM_NH4NO3_L-to-H_P Parameter: Timepoint (hr) Value: 6
  misc_feature: MA Experiment 20001757 PARAMETER Experiment Name: At_50mM_NH4NO3_L-to-H_P Parameter: Tissue Value: Leaf
  misc_feature: MA Experiment 20001757 PARAMETER Experiment Name: At_50mM_NH4NO3_L-to-H_P Parameter: Treatment Value: 50mM NH4NO3 vs 100mM Mannitol
caaagaacgcatatatgtttcagcaattcgacaatacagcaaatacaaagatccactttgaaactacaggaccagaaatctgggaagatacaatgggtaatgtcgatatattcgttgccggaataggaactggtggtactgtaactggtactggaggtttcttgaaaatgatgaacaaggatattaaggtagttggcgttgaaccatcagaaagaagtgtgatttctggagacaaccctggttacttaccgggaatcttggatgttaaattacttgatgaagtgtttaaggttagcaacggggaagcgattgagatggcgaggagactagctttagaggaaggattgctggttgggatttcatctggagctgctgcagtagcagcagtcagcttggctaaaagagcagagaatgccggtaaactaatcacggttctgtttccaagccatggcgagcggtatatcacaacggctctgtttagttccatcaacagagaagtccaagagatgagatattagtagcagccattagaaaagcccccaaagtttggtccttttggagagtgtaaacaacaaatctctttgcaatacagaaaagagaggtttcagaagactgtgaggttagagctcacacgagaactgaaagataaacatgtctcgagcccaaccagttttattcaaagatttgtgaatgtatagaagatcatagaccttgttgcattattcttcttcttctcactcatatgtcagggaagtatgctgaacaaataaaagtttgatcatcc

SEQ ID NO: 21393 - protein, 171 aa, Arabidopsis thaliana
  peptide (1)..(171): Ceres Seq. ID no. 12738721
  misc_feature (1)..(149): Pfam Name: Pyridoxal-phosphate dependent enzyme Pfam Description: Pyridoxal-phosphate dependent enzyme
  misc_feature (2)..(170): Homolog of NCBI NO: 30695056 NR Description: cysteine synthase, mitochondrial (O-acetylserine
  misc_feature (2)..(170): Homolog of NCBI NO: 25291707 NR Description: cysteine synthase (EC 4.2.99.8) precursor,
  misc_feature (2)..(170): Homolog of NCBI NO: 22331875 NR Description: cysteine synthase
  misc_feature (2)..(170): Homolog of NCBI NO: 12643295 NR Description: CYSTEINE SYNTHASE, MITOCHONDRIAL PRECURSOR SULFHYDRYLASE) (O-ACETYLSERINE (THIOL)-LYASE) (CSASE C) (CS-C)
  misc_feature (2)..(169): Homolog of NCBI NO: 11131901 NR Description: Cysteine synthase (O-acetylserine sulfhydrylase)
  misc_feature (2)..(170): Homolog of NCBI NO: 12081919 NR Description: plastidic cysteine synthase 1 [Solanum tuberosum]
  misc_feature (2)..(170): Homolog of NCBI NO: 11131628 NR Description: Cysteine synthase, chloroplast precursor sulfhydrylase) (O-acetylserine (Thiol)-lyase) (CSase B) (CS-B)
  misc_feature (2)..(170): Homolog of NCBI NO: 399333 NR Description: Cysteine synthase, chloroplast precursor sulfhydrylase) (O-acetylserine (Thiol)-lyase) (CSase B) (CS-B)
  misc_feature (2)..(170): Homolog of NCBI NO: 12081921 NR Description: plastidic cysteine synthase 2 [Solanum tuberosum]
  misc_feature (1)..(171): Homolog of NCBI NO: 15228596 NR Description: O-acetylserine (thiol) lyase
KNAYMFQQFDNTANTKIHFETTGPEIWEDTMGNVDIFVAGIGTGGTVTGTGGFLKMMNKDIKVVGVEPSERSVISGDNPGYLPGILDVKLLDEVFKVSNGEAIEMARRLALEEGLLVGISSGAAAVAAVSLAKRAENAGKLITVLFPSHGERYITTALFSSINREVQEMRY

SEQ ID NO: 21394 - protein, 167 aa, Arabidopsis thaliana
  peptide (1)..(167): Ceres Seq. ID no. 12738722
  misc_feature (1)..(145): Pfam Name: Pyridoxal-phosphate dependent enzyme Pfam Description: Pyridoxal-phosphate dependent enzyme
  misc_feature (1)..(166): Homolog of NCBI NO: 25291707 NR Description: cysteine synthase (EC 4.2.99.8) precursor,
  misc_feature (1)..(166): Homolog of NCBI NO: 30695056 NR Description: cysteine synthase, mitochondrial (O-acetylserine
  misc_feature (1)..(166): Homolog of NCBI NO: 22331875 NR Description: cysteine synthase
  misc_feature (1)..(166): Homolog of NCBI NO: 12643295 NR Description: CYSTEINE SYNTHASE, MITOCHONDRIAL PRECURSOR SULFHYDRYLASE) (O-ACETYLSERINE (THIOL)-LYASE) (CSASE C) (CS-C)
  misc_feature (1)..(165): Homolog of NCBI NO: 11131901 NR Description: Cysteine synthase (O-acetylserine sulfhydrylase)
  misc_feature (1)..(166): Homolog of NCBI NO: 12081919 NR Description: plastidic cysteine synthase 1 [Solanum tuberosum]
  misc_feature (1)..(166): Homolog of NCBI NO: 11131628 NR Description: Cysteine synthase, chloroplast precursor sulfhydrylase) (O-acetylserine (Thiol)-lyase) (CSase B) (CS-B)
  misc_feature (1)..(166): Homolog of NCBI NO: 399333 NR Description: Cysteine synthase, chloroplast precursor sulfhydrylase) (O-acetylserine (Thiol)-lyase) (CSase B) (CS-B)
  misc_feature (1)..(166): Homolog of NCBI NO: 12081921 NR Description: plastidic cysteine synthase 2 [Solanum tuberosum]
  misc_feature (1)..(167): Homolog of NCBI NO: 15228596 NR Description: O-acetylserine (thiol) lyase
MFQQFDNTANTKIHFETTGPEIWEDTMGNVDIFVAGIGTGGTVTGTGGFLKMMNKDIKVVGVEPSERSVISGDNPGYLPGILDVKLLDEVFKVSNGEAIEMARRLALEEGLLVGISSGAAAVAAVSLAKRAENAGKLITVLFPSHGERYITTALFSSINREVQEMRY

SEQ ID NO: 21395 - protein, 141 aa, Arabidopsis thaliana
  peptide (1)..(141): Ceres Seq. ID no. 12738723
  misc_feature (1)..(119): Pfam Name: Pyridoxal-phosphate dependent enzyme Pfam Description: Pyridoxal-phosphate dependent enzyme
  misc_feature (1)..(140): Homolog of NCBI NO: 22331875 NR Description: cysteine synthase
  misc_feature (1)..(140): Homolog of NCBI NO: 30695056 NR Description: cysteine synthase, mitochondrial (O-acetylserine
  misc_feature (1)..(140): Homolog of NCBI NO: 25291707 NR Description: cysteine synthase (EC 4.2.99.8) precursor,
  misc_feature (1)..(140): Homolog of NCBI NO: 12643295 NR Description: CYSTEINE SYNTHASE, MITOCHONDRIAL PRECURSOR SULFHYDRYLASE) (O-ACETYLSERINE (THIOL)-LYASE) (CSASE C) (CS-C)
  misc_feature (1)..(139): Homolog of NCBI NO: 11131901 NR Description: Cysteine synthase (O-acetylserine sulfhydrylase)
  misc_feature (1)..(140): Homolog of NCBI NO: 12081919 NR Description: plastidic cysteine synthase 1 [Solanum tuberosum]
  misc_feature (1)..(140): Homolog of NCBI NO: 11131628 NR Description: Cysteine synthase, chloroplast precursor sulfhydrylase) (O-acetylserine (Thiol)-lyase) (CSase B) (CS-B)
  misc_feature (1)..(140): Homolog of NCBI NO: 399333 NR Description: Cysteine synthase, chloroplast precursor sulfhydrylase) (O-acetylserine (Thiol)-lyase) (CSase B) (CS-B)
  misc_feature (1)..(140): Homolog of NCBI NO: 12081921 NR Description: plastidic cysteine synthase 2 [Solanum tuberosum]
  misc_feature (1)..(141): Homolog of NCBI NO: 15228596 NR Description: O-acetylserine (thiol) lyase
MGNVDIFVAGIGTGGTVTGTGGFLKMMNKDIKVVGVEPSERSVISGDNPGYLPGILDVKLLDEVFKVSNGEAIEMARRLALEEGLLVGISSGAAAVAAVSLAKRAENAGKLITVLFPSHGERYITTALFSSINREVQEMRY

SEQ ID NO: 21396 - DNA, 1239 bp, Arabidopsis thaliana
  misc_feature (1)..(1239): Ceres Seq. ID no. 12333892
  misc_feature: MA Experiment ID: 108462 Result: Up-regulated in Transcription
  misc_feature: MA Experiment 108462 PARAMETER Experiment Name: At_Germinating_Seeds_cDNA_P Parameter: Age (day) Value: 2 vs. 0
  misc_feature: MA Experiment 108462 PARAMETER Experiment Name: At_Germinating_Seeds_cDNA_P Parameter: Tissue Value: Germinating Seeds
  misc_feature: MA Experiment ID: 108463 Result: Up-regulated in Transcription
  misc_feature: MA Experiment 108463 PARAMETER Experiment Name: At_Germinating_Seeds_cDNA_P Parameter: Age (day) Value: 3 vs. 0
  misc_feature: MA Experiment 108463 PARAMETER Experiment Name: At_Germinating_Seeds_cDNA_P Parameter: Tissue Value: Germinating Seeds
  misc_feature: MA Experiment ID: 108464 Result: Up-regulated in Transcription
  misc_feature: MA Experiment 108464 PARAMETER Experiment Name: At_Germinating_Seeds_cDNA_P Parameter: Age (day) Value: 4 vs. 0
  misc_feature: MA Experiment 108464 PARAMETER Experiment Name: At_Germinating_Seeds_cDNA_P Parameter: Tissue Value: Germinating Seeds
  misc_feature: MA Experiment ID: 108573 Result: Up-regulated in Transcription
  misc_feature: MA Experiment 108573 PARAMETER Experiment Name: At_Drought_cDNA_P Parameter: Timepoint (hr) Value: 6
  misc_feature: MA Experiment 108573 PARAMETER Experiment Name: At_Drought_cDNA_P Parameter: Tissue Value: Aerial
  misc_feature: MA Experiment 108573 PARAMETER Experiment Name: At_Drought_cDNA_P Parameter: Treatment Value: Drought vs. No Drought
  misc_feature: MA Experiment ID: 108577 Result: Down-regulated in Transcription
  misc_feature: MA Experiment 108577 PARAMETER Experiment Name: At_42deg_Heat_cDNA_P Parameter: Temperature (deg C) Value: 42 vs. 22
  misc_feature: MA Experiment 108577 PARAMETER Experiment Name: At_42deg_Heat_cDNA_P Parameter: Timepoint (hr) Value: 6
  misc_feature: MA Experiment 108577 PARAMETER Experiment Name: At_42deg_Heat_cDNA_P Parameter: Tissue Value: Aerial
  misc_feature: MA Experiment ID: 108605 Result: Up-regulated in Transcription
  misc_feature: MA Experiment 108605 PARAMETER Experiment Name: At_100uM_ABA_cDNA_P Parameter: Timepoint (hr) Value: 6
  misc_feature: MA Experiment 108605 PARAMETER Experiment Name: At_100uM_ABA_cDNA_P Parameter: Tissue Value: Aerial
  misc_feature: MA Experiment 108605 PARAMETER Experiment Name: At_100uM_ABA_cDNA_P Parameter: Treatment Value: 100uM ABA vs. No Treatment
  misc_feature: MA Experiment ID: 108607 Result: Up-regulated in Transcription
  misc_feature: MA Experiment 108607 PARAMETER Experiment Name: At_100uM_ABA_cDNA_P Parameter: Timepoint (hr) Value: 4
  misc_feature: MA Experiment 108607 PARAMETER Experiment Name: At_100uM_ABA_cDNA_P Parameter: Tissue Value: Aerial
  misc_feature: MA Experiment 108607 PARAMETER Experiment Name: At_100uM_ABA_cDNA_P Parameter: Treatment Value: 100uM ABA vs. No Treatment
  misc_feature: MA Experiment ID: 108609 Result: Up-regulated in Transcription
  misc_feature: MA Experiment 108609 PARAMETER Experiment Name: At_100uM_ABA_cDNA_P Parameter: Timepoint (hr) Value: 24
  misc_feature: MA Experiment 108609 PARAMETER Experiment Name: At_100uM_ABA_cDNA_P Parameter: Tissue Value: Aerial
  misc_feature: MA Experiment 108609 PARAMETER Experiment Name: At_100uM_ABA_cDNA_P Parameter: Treatment Value: 100uM ABA vs. No Treatment
  misc_feature: MA Experiment ID: 20000069 Result: Up-regulated in Transcription
  misc_feature: MA Experiment 20000069 PARAMETER Experiment Name: At_100uM_ABA_Mutants_cDNA_P Parameter: Plant Line Value: CS23
  misc_feature: MA Experiment 20000069 PARAMETER Experiment Name: At_100uM_ABA_Mutants_cDNA_P Parameter: Timepoint (hr) Value: 6
  misc_feature: MA Experiment 20000069 PARAMETER Experiment Name: At_100uM_ABA_Mutants_cDNA_P Parameter: Tissue Value: Aerial
  misc_feature: MA Experiment 20000069 PARAMETER Experiment Name: At_100uM_ABA_Mutants_cDNA_P Parameter: Treatment Value: 100uM ABA vs. No Treatment
  misc_feature: MA Experiment ID: 20000070 Result: Up-regulated in Transcription
  misc_feature: MA Experiment 20000070 PARAMETER Experiment Name: At_100uM_ABA_Mutants_cDNA_P Parameter: Plant Line Value: CS24
  misc_feature: MA Experiment 20000070 PARAMETER Experiment Name: At_100uM_ABA_Mutants_cDNA_P Parameter: Timepoint (hr) Value: 6
  misc_feature: MA Experiment 20000070 PARAMETER Experiment Name: At_100uM_ABA_Mutants_cDNA_P Parameter: Tissue Value: Aerial
  misc_feature: MA Experiment 20000070 PARAMETER Experiment Name: At_100uM_ABA_Mutants_cDNA_P Parameter: Treatment Value: 100uM ABA vs. No Treatment
  misc_feature: MA Experiment ID: 20000071 Result: Up-regulated in Transcription
  misc_feature: MA Experiment 20000071 PARAMETER Experiment Name: At_100uM_ABA_Mutants_cDNA_P Parameter: Plant Line Value: CS8104
  misc_feature: MA Experiment 20000071 PARAMETER Experiment Name: At_100uM_ABA_Mutants_cDNA_P Parameter: Timepoint (hr) Value: 6
  misc_feature: MA Experiment 20000071 PARAMETER Experiment Name: At_100uM_ABA_Mutants_cDNA_P Parameter: Tissue Value: Aerial
  misc_feature: MA Experiment 20000071 PARAMETER Experiment Name: At_100uM_ABA_Mutants_cDNA_P Parameter: Treatment Value: 100uM ABA vs. No Treatment
  misc_feature: MA Experiment ID: 20000086 Result: Up-regulated in Transcription
  misc_feature: MA Experiment 20000086 PARAMETER Experiment Name: At_100uM_ABA_Mutants_cDNA_P Parameter: Plant Line Value: CS22
  misc_feature: MA Experiment 20000086 PARAMETER Experiment Name: At_100uM_ABA_Mutants_cDNA_P Parameter: Timepoint (hr) Value: 6
  misc_feature: MA Experiment 20000086 PARAMETER Experiment Name: At_100uM_ABA_Mutants_cDNA_P Parameter: Tissue Value: Aerial
  misc_feature: MA Experiment 20000086 PARAMETER Experiment Name: At_100uM_ABA_Mutants_cDNA_P Parameter: Treatment Value: 100uM ABA vs. No Treatment
  misc_feature: MA Experiment ID: 20000087 Result: Up-regulated in Transcription
  misc_feature: MA Experiment 20000087 PARAMETER Experiment Name: At_100uM_ABA_Mutants_cDNA_P Parameter: Plant Line Value: WS
  misc_feature: MA Experiment 20000087 PARAMETER Experiment Name: At_100uM_ABA_Mutants_cDNA_P Parameter: Timepoint (hr) Value: 6
  misc_feature: MA Experiment 20000087 PARAMETER Experiment Name: At_100uM_ABA_Mutants_cDNA_P Parameter: Tissue Value: Aerial
  misc_feature: MA Experiment 20000087 PARAMETER Experiment Name: At_100uM_ABA_Mutants_cDNA_P Parameter: Treatment Value: 100uM ABA vs. No Treatment
  misc_feature: MA Experiment ID: 20000088 Result: Up-regulated in Transcription
  misc_feature: MA Experiment 20000088 PARAMETER Experiment Name: At_100uM_ABA_Mutants_cDNA_P Parameter: Plant Line Value: Landsberg
  misc_feature: MA Experiment 20000088 PARAMETER Experiment Name: At_100uM_ABA_Mutants_cDNA_P Parameter: Timepoint (hr) Value: 6
  misc_feature: MA Experiment 20000088 PARAMETER Experiment Name: At_100uM_ABA_Mutants_cDNA_P Parameter: Tissue Value: Aerial
  misc_feature: MA Experiment 20000088 PARAMETER Experiment Name: At_100uM_ABA_Mutants_cDNA_P Parameter: Treatment Value: 100uM ABA vs. No Treatment
  misc_feature: MA Experiment ID: 20000117 Result: Up-regulated in Transcription
  misc_feature: MA Experiment 20000117 PARAMETER Experiment Name: At_100uM_ABA_Mutants_cDNA_P Parameter: Plant Line Value: Columbia
  misc_feature: MA Experiment 20000117 PARAMETER Experiment Name: At_100uM_ABA_Mutants_cDNA_P Parameter: Timepoint (hr) Value: 6
  misc_feature: MA Experiment 20000117 PARAMETER Experiment Name: At_100uM_ABA_Mutants_cDNA_P Parameter: Tissue Value: Aerial
  misc_feature: MA Experiment 20000117 PARAMETER Experiment Name: At_100uM_ABA_Mutants_cDNA_P Parameter: Treatment Value: 100uM ABA vs. No Treatment
  misc_feature: MA Experiment ID: 20000184 Result: Down-regulated in Transcription
  misc_feature: MA Experiment 20000184 PARAMETER Experiment Name: At_Shoots__P Parameter: Age (day) Value: 7
  misc_feature: MA Experiment 20000184 PARAMETER Experiment Name: At_Shoots__P Parameter: Tissue Value: Shoots vs. Whole Plant
  misc_feature: MA Experiment ID: 20000438 Result: Down-regulated in Transcription
  misc_feature: MA Experiment 20000438 PARAMETER Experiment Name: At_Shoots__P Parameter: Age (day) Value: 14
  misc_feature: MA Experiment 20000438 PARAMETER Experiment Name: At_Shoots__P Parameter: Tissue Value: Shoots vs. Whole Plant
  misc_feature: MA Experiment ID: 20000453 Result: Up-regulated in Transcription
  misc_feature: MA Experiment 20000453 PARAMETER Experiment Name: At_100uM_ABA_P Parameter: Age (day) Value: 15
  misc_feature: MA Experiment 20000453 PARAMETER Experiment Name: At_100uM_ABA_P Parameter: Organism Value: A. thaliana
  misc_feature: MA Experiment 20000453 PARAMETER Experiment Name: At_100uM_ABA_P Parameter: Plant Line Value: WS
  misc_feature: MA Experiment 20000453 PARAMETER Experiment Name: At_100uM_ABA_P Parameter: Timepoint (hr) Value: 24
  misc_feature: MA Experiment 20000453 PARAMETER Experiment Name: At_100uM_ABA_P Parameter: Tissue Value: Aerial
  misc_feature: MA Experiment 20000453 PARAMETER Experiment Name: At_100uM_ABA_P Parameter: Treatment Value: 100uM ABA vs. No Treatment
  misc_feature: MA Experiment ID: 20001247 Result: Up-regulated in Transcription
  misc_feature: MA Experiment 20001247 PARAMETER Experiment Name: At_Far-red-induction_P Parameter: Age (day) Value: 7
  misc_feature: MA Experiment 20001247 PARAMETER Experiment Name: At_Far-red-induction_P Parameter: Light Value: Far-red vs. White
  misc_feature: MA Experiment 20001247 PARAMETER Experiment Name: At_Far-red-induction_P Parameter: Organism Value: A. thaliana
  misc_feature: MA Experiment 20001247 PARAMETER Experiment Name: At_Far-red-induction_P Parameter: Plant Line Value: Columbia
  misc_feature: MA Experiment 20001247 PARAMETER Experiment Name: At_Far-red-induction_P Parameter: Timepoint (hr) Value: 1
  misc_feature: MA Experiment 20001247 PARAMETER Experiment Name: At_Far-red-induction_P Parameter: Tissue Value: Whole Plant
  misc_feature: MA Experiment ID: 20001248 Result: Up-regulated in Transcription
  misc_feature: MA Experiment 20001248 PARAMETER Experiment Name: At_Far-red-induction_P Parameter: Age (day) Value: 7
  misc_feature: MA Experiment 20001248 PARAMETER Experiment Name: At_Far-red-induction_P Parameter: Light Value: Far-red vs. White
  misc_feature: MA Experiment 20001248 PARAMETER Experiment Name: At_Far-red-induction_P Parameter: Organism Value: A. thaliana
  misc_feature: MA Experiment 20001248 PARAMETER Experiment Name: At_Far-red-induction_P Parameter: Plant Line Value: Columbia
  misc_feature: MA Experiment 20001248 PARAMETER Experiment Name: At_Far-red-induction_P Parameter: Timepoint (hr) Value: 4
  misc_feature: MA Experiment 20001248 PARAMETER Experiment Name: At_Far-red-induction_P Parameter: Tissue Value: Whole Plant
  misc_feature: MA Experiment ID: 20001450 Result: Up-regulated in Transcription
  misc_feature: MA Experiment 20001450 PARAMETER Experiment Name: At_Far-red-induction_P Parameter: Age (day) Value: 7
  misc_feature: MA Experiment 20001450 PARAMETER Experiment Name: At_Far-red-induction_P Parameter: Light Value: Far-red vs. White
  misc_feature: MA Experiment 20001450 PARAMETER Experiment Name: At_Far-red-induction_P Parameter: Organism Value: A. thaliana
  misc_feature: MA Experiment 20001450 PARAMETER Experiment Name: At_Far-red-induction_P Parameter: Plant Line Value: Columbia
  misc_feature: MA Experiment 20001450 PARAMETER Experiment Name: At_Far-red-induction_P Parameter: Timepoint (hr) Value: 8
  misc_feature: MA Experiment 20001450 PARAMETER Experiment Name: At_Far-red-induction_P Parameter: Tissue Value: Whole Plant
acatttttccctctcttctctctctttcgctctttcttcttccccgcagttcccggagacgacgccggaggaaaatcgtacggaaactttgcttcgacttcacgtggccgctccacgaagcgcctttgggtttcgtcttccccgtttctctttctctctcttcttttgcctttgttaccacgaatagaacgagaggagagagataggaggagagttttgggatattggtggagagcgattatcgggagagccagagaaaaaaataagcagcttcttcctccctcatcgttgggaccgtgacttttgttttcttcagctttaagcaaacaaaaaaaaaagatgaccggcgttggcgagaatcagcttatctccattcaacctgatgaactcaaatttctctttgaacttgagaagcaaagctactgtgatcttaaagttgccaataaaacagagaactatgttgctttcaaggtgaaaacaacatctccaaagaagtattttgtaagacctaacactggtgtcattcagccatgggactcttgcatcattagagttactctacaagcgcaacgagagtatcctccagatatgcagtgcaaagacaaatttctcctgcaaagtaccattgtacctccacacactgatgtggatgaacttcctcaagacactttcaccaaggacagtggaaagacattaacagaatgtaagctcaaagtctcttatattaccccgtctacaacccaaagatcctctgaatccggagcaacaaatggtgatggacaaagctcggaaaccatctctactatacagcggctgaaggaagagcgagatgcagccgttaagcaaacacaacagctgcaacatgaattggaaacggtaaggaggcggagaaaccagaggaacagcggaaatgggctatccttgaagttggcagctatggttggactcatcggactcatcatcggtttcatcctaaaacttaccttagcttctcccacataacaactcttgagcttcaacacatcgcctatcatctcaatatatgtaacagccgaatcaaaacagattcacatattttcgggtattttaaatcttctaaatttgggttatttatatccctctctttctttctcctaatgttccacacgtttcttccatcaaattttcttctttttttcagttataaattatgtacatttttgacccaagagaccctttcatcattggttttacttgtcc

SEQ ID NO: 21397 - protein, 220 aa, Arabidopsis thaliana
  peptide (1)..(220): Ceres Seq. ID no. 12333893
  misc_feature (149)..(215): Homolog of NCBI NO: 11288305 NR Description: hypothetical protein T4C21.10 - Arabidopsis
  misc_feature (1)..(143): Homolog of NCBI NO: 11288305 NR Description: hypothetical protein T4C21.10 - Arabidopsis
  misc_feature (149)..(215): Homolog of NCBI NO: 21554053 NR Description: putative VAMP-associated protein [Arabidopsis
  misc_feature (4)..(143): Homolog of NCBI NO: 21554053 NR Description: putative VAMP-associated protein [Arabidopsis
  misc_feature (149)..(215): Homolog of NCBI NO: 18411661 NR Description: putative protein
  misc_feature (1)..(143): Homolog of NCBI NO: 18411661 NR Description: putative protein
  misc_feature (8)..(219): Homolog of NCBI NO: 37536644 NR Description: putative membrane protein
  misc_feature (5)..(219): Homolog of NCBI NO: 14140121 NR Description: putative vesicle-associated membrane protein
  misc_feature (54)..(220): Homolog of NCBI NO: 28207603 NR Description: putative VAMP-associated protein [Brassica rapa
  misc_feature (1)..(220): Homolog of NCBI NO: 15238034 NR Description: VAMP (vesicle-associated membrane
MTGVGENQLISIQPDELKFLFELEKQSYCDLKVANKTENYVAFKVKTTSPKKYFVRPNTGVIQPWDSCIIRVTLQAQREYPPDMQCKDKFLLQSTIVPPHTDVDELPQDTFTKDSGKTLTECKLKVSYITPSTTQRSSESGATNGDGQSSETISTIQRLKEERDAAVKQTQQLQHELETVRRRRNQRNSGNGLSLKLAAMVGLIGLIIGFILKLTLASPT

SEQ ID NO: 21398 - protein, 137 aa, Arabidopsis thaliana
  peptide (1)..(137): Ceres Seq. ID no. 12333894
  misc_feature (1)..(136): Homolog of NCBI NO: 37536644 NR Description: putative membrane protein
  misc_feature (1)..(136): Homolog of NCBI NO: 14140121 NR Description: putative vesicle-associated membrane protein
  misc_feature (1)..(137): Homolog of NCBI NO: 28207603 NR Description: putative VAMP-associated protein [Brassica rapa
  misc_feature (1)..(137): Homolog of NCBI NO: 15238034 NR Description: VAMP (vesicle-associated membrane
  misc_feature (66)..(132): Homolog of NCBI NO: 11288305 NR Description: hypothetical protein T4C21.10 - Arabidopsis
  misc_feature (1)..(60): Homolog of NCBI NO: 11288305 NR Description: hypothetical protein T4C21.10 - Arabidopsis
  misc_feature (66)..(132): Homolog of NCBI NO: 21554053 NR Description: putative VAMP-associated protein [Arabidopsis
  misc_feature (1)..(60): Homolog of NCBI NO: 21554053 NR Description: putative VAMP-associated protein [Arabidopsis
  misc_feature (66)..(132): Homolog of NCBI NO: 18411661 NR Description: putative protein
  misc_feature (1)..(60): Homolog of NCBI NO: 18411661 NR Description: putative protein
MQCKDKFLLQSTIVPPHTDVDELPQDTFTKDSGKTLTECKLKVSYITPSTTQRSSESGATNGDGQSSETISTIQRLKEERDAAVKQTQQLQHELETVRRRRNQRNSGNGLSLKLAAMVGLIGLIIGFILKLTLASPT

SEQ ID NO: 21399 - DNA, 465 bp, Arabidopsis thaliana
  misc_feature (1)..(465): Ceres Seq. ID no. 12421653
  misc_feature: MA Experiment ID: 108434 Result: Down-regulated in Transcription
  misc_feature: MA Experiment 108434 PARAMETER Experiment Name: At_Root_Tips_cDNA_P Parameter: Tissue Value: Root Tips
  misc_feature: MA Experiment ID: 108435 Result: Down-regulated in Transcription
  misc_feature: MA Experiment 108435 PARAMETER Experiment Name: At_stm_Mutants_cDNA_P Parameter: Plant Line Value: wt Landsburg vs stm
  misc_feature: MA Experiment 108435 PARAMETER Experiment Name: At_stm_Mutants_cDNA_P Parameter: Tissue Value: Shoot Apical Meristem Region
  misc_feature: MA Experiment ID: 108461 Result: Up-regulated in Transcription
  misc_feature: MA Experiment 108461 PARAMETER Experiment Name: At_Germinating_Seeds_cDNA_P Parameter: Age (day) Value: 1 vs. 0
  misc_feature: MA Experiment 108461 PARAMETER Experiment Name: At_Germinating_Seeds_cDNA_P Parameter: Tissue Value: Germinating Seeds
  misc_feature: MA Experiment ID: 108462 Result: Up-regulated in Transcription
  misc_feature: MA Experiment 108462 PARAMETER Experiment Name: At_Germinating_Seeds_cDNA_P Parameter: Age (day) Value: 2 vs. 0
  misc_feature: MA Experiment 108462 PARAMETER Experiment Name: At_Germinating_Seeds_cDNA_P Parameter: Tissue Value: Germinating Seeds
  misc_feature: MA Experiment ID: 108464 Result: Up-regulated in Transcription
  misc_feature: MA Experiment 108464 PARAMETER Experiment Name: At_Germinating_Seeds_cDNA_P Parameter: Age (day) Value: 4 vs. 0
  misc_feature: MA Experiment 108464 PARAMETER Experiment Name: At_Germinating_Seeds_cDNA_P Parameter: Tissue Value: Germinating Seeds
  misc_feature: MA Experiment ID: 108488 Result: Up-regulated in Transcription
  misc_feature: MA Experiment ID: 108489 Result: Down-regulated in Transcription
  misc_feature: MA Experiment ID: 108595 Result: Down-regulated in Transcription
  misc_feature: MA Experiment 108595 PARAMETER Experiment Name: At_Ler-pi_Ovule_cDNA_P Parameter: Plant Line Value: null
  misc_feature: MA Experiment ID: 20000180 Result: Up-regulated in Transcription
  misc_feature: MA Experiment 20000180 PARAMETER Experiment Name: At_Germinating_Seeds_P Parameter: Age (hr) Value: 24 vs. 0
  misc_feature: MA Experiment 20000180 PARAMETER Experiment Name: At_Germinating_Seeds_P Parameter: Tissue Value: Germinating Seeds
  misc_feature: MA Experiment ID: 20000185 Result: Down-regulated in Transcription
  misc_feature: MA Experiment 20000185 PARAMETER Experiment Name: At_Roots__P Parameter: Age (day) Value: 7 vs. 21
  misc_feature: MA Experiment 20000185 PARAMETER Experiment Name: At_Roots__P Parameter: Organism Value: A. thaliana
  misc_feature: MA Experiment 20000185 PARAMETER Experiment Name: At_Roots__P Parameter: Tissue Value: Roots vs. Whole Plant
  misc_feature: MA Experiment ID: 20000439 Result: Down-regulated in Transcription
  misc_feature: MA Experiment 20000439 PARAMETER Experiment Name: At_Roots__P Parameter: Age (day) Value: 14 vs. 21
  misc_feature: MA Experiment 20000439 PARAMETER Experiment Name: At_Roots__P Parameter: Organism Value: A. thaliana
  misc_feature: MA Experiment 20000439 PARAMETER Experiment Name: At_Roots__P Parameter: Tissue Value: Roots vs. Whole Plant
gagatcgagagaagaatagtttgatcatcttgtgagaaaaataatggctgcttcagtgatgctatcttcggtgacattgaaaccagctggtttcacggtggagaagacggcgtcgacgcttccggcagaaagggcaagggatacggtgtttacaagtacgtcgacaagtatggagctaacgtcgatggatacagtcctatttacaacgagaacgagtggtcagcgagtggtgacgtgtacaagggaggagtcaccggattggcaatttgggcggtaactctcgccggaattcttgccggaggtgctcttcttgtgtacaacacaagtgctttggctcagtaaatcttaaagttgttagcgcatgtgtaatcatgtttctataaatgtttctgtgttgttctctttctctctaatgttgtaaaactcagacatactttgaatttataagacttctagtgtttgtac

SEQ ID NO: 21400 - protein, 77 aa, Arabidopsis thaliana
  peptide (1)..(77): Ceres Seq. ID no. 12421654
  misc_feature (1)..(23): Homolog of NCBI NO: 8698891 NR Description: polypeptide precursor of photosystem II [Pyrus
MAASVMLSSVTLKPAGFTVEKTASTLPAERARDTVFTSTSTSMELTSMDTVLFTTRTSGQRVVTCTREESPDWQFGR

SEQ ID NO: 21401 - protein, 72 aa, Arabidopsis thaliana
  peptide (1)..(72): Ceres Seq. ID no. 12421655
  misc_feature (1)..(18): Homolog of NCBI NO: 8698891 NR Description: polypeptide precursor of photosystem II [Pyrus
MLSSVTLKPAGFTVEKTASTLPAERARDTVFTSTSTSMELTSMDTVLFTTRTSGQRVVTCTREESPDWQFGR

SEQ ID NO: 21402 - DNA, 1116 bp, Arabidopsis thaliana
  misc_feature (1)..(1116): Ceres Seq. ID no. 12322174
  misc_feature: MA Experiment ID: 108462 Result: Down-regulated in Transcription
  misc_feature: MA Experiment 108462 PARAMETER Experiment Name: At_Germinating_Seeds_cDNA_P Parameter: Age (day) Value: 2 vs. 0
  misc_feature: MA Experiment 108462 PARAMETER Experiment Name: At_Germinating_Seeds_cDNA_P Parameter: Tissue Value: Germinating Seeds
  misc_feature: MA Experiment ID: 108463 Result: Down-regulated in Transcription
  misc_feature: MA Experiment 108463 PARAMETER Experiment Name: At_Germinating_Seeds_cDNA_P Parameter: Age (day) Value: 3 vs. 0
  misc_feature: MA Experiment 108463 PARAMETER Experiment Name: At_Germinating_Seeds_cDNA_P Parameter: Tissue Value: Germinating Seeds
  misc_feature: MA Experiment ID: 108464 Result: Down-regulated in Transcription
  misc_feature: MA Experiment 108464 PARAMETER Experiment Name: At_Germinating_Seeds_cDNA_P Parameter: Age (day) Value: 4 vs. 0
  misc_feature: MA Experiment 108464 PARAMETER Experiment Name: At_Germinating_Seeds_cDNA_P Parameter: Tissue Value: Germinating Seeds
  misc_feature: MA Experiment ID: 108573 Result: Up-regulated in Transcription
  misc_feature: MA Experiment 108573 PARAMETER Experiment Name: At_Drought_cDNA_P Parameter: Timepoint (hr) Value: 6
  misc_feature: MA Experiment 108573 PARAMETER Experiment Name: At_Drought_cDNA_P Parameter: Tissue Value: Aerial
  misc_feature: MA Experiment 108573 PARAMETER Experiment Name: At_Drought_cDNA_P Parameter: Treatment Value: Drought vs. No Drought
  misc_feature: MA Experiment ID: 108594 Result: Up-regulated in Transcription
  misc_feature: MA Experiment 108594 PARAMETER Experiment Name: At_Ler-rhl_Root_cDNA_P Parameter: Plant Line Value: null
  misc_feature: MA Experiment ID: 108595 Result: Down-regulated in Transcription
  misc_feature: MA Experiment 108595 PARAMETER Experiment Name: At_Ler-pi_Ovule_cDNA_P Parameter: Plant Line Value: null
  misc_feature: MA Experiment ID: 20000185 Result: Down-regulated in Transcription
  misc_feature: MA Experiment 20000185 PARAMETER Experiment Name: At_Roots__P Parameter: Age (day) Value: 7 vs. 21
  misc_feature: MA Experiment 20000185 PARAMETER Experiment Name: At_Roots__P Parameter: Organism Value: A. thaliana
  misc_feature: MA Experiment 20000185 PARAMETER Experiment Name: At_Roots__P Parameter: Tissue Value: Roots vs. Whole Plant
  misc_feature: MA Experiment ID: 20000439 Result: Down-regulated in Transcription
  misc_feature: MA Experiment 20000439 PARAMETER Experiment Name: At_Roots__P Parameter: Age (day) Value: 14 vs. 21
  misc_feature: MA Experiment 20000439 PARAMETER Experiment Name: At_Roots__P Parameter: Organism Value: A. thaliana
  misc_feature: MA Experiment 20000439 PARAMETER Experiment Name: At_Roots__P Parameter: Tissue Value: Roots vs. Whole Plant
  misc_feature: MA Experiment ID: 20001757 Result: Up-regulated in Transcription
  misc_feature: MA Experiment 20001757 PARAMETER Experiment Name: At_50mM_NH4NO3_L-to-H_P Parameter: Timepoint (hr) Value: 6
  misc_feature: MA Experiment 20001757 PARAMETER Experiment Name: At_50mM_NH4NO3_L-to-H_P Parameter: Tissue Value: Leaf
  misc_feature: MA Experiment 20001757 PARAMETER Experiment Name: At_50mM_NH4NO3_L-to-H_P Parameter: Treatment Value: 50mM NH4NO3 vs 100mM Mannitol
attgaaaggcgtttcaaagtcaccatgttttacgacgcgtgtctctttttcagccggttttcttctcgctggttacatcagagcttcggagatattatataactcaacgacgtagctgttgcattttttgtttttgcaatgatcttcatcttcatgaccggataaactcttagagaaagattcaaagtgattatctttgtggatccctccattgctatgtggaatttagcttcaaaatcgatcagagaaggttttatatcgaagggagaagaagctgctacaaaaccaagaagagctactttagatagatcaggagatggaagaaagacaacaaaggaagaaaaattggagtgtcccatttgctgggaatcattcaacgttgttgagaatgtaccttatgtcttatggtgtggtcatacaatctgcaagtactgtctcttagggcttcaacgtgccattgtcatcaaatcctctgctttaccattccagcttcccttcttcgttgcttgcccttggtgcaatattctctctttaaggctggtttgcaatggaaccatcagatttccttccaagaacttttaccttctgtggatggtagaaagcatgaatggctccagatcggaggcacccagcgacaacaaaagggttgcttcagggcagagagacttgagaaataggtgtgatggaatgagtaataccgccttgggtgatgaagggttgctggacaatcgcagctggtggaatggtgtgaccagaggattcttcagaactgggaggctccatgactcggtacgtaagtcaatggctcttgttgctcatttgttggctaagtttcctctggtagtcatattcctgttgatggctttatatgcaatccctgtgagtgctgcagttctcggggtttatttctttgttacgtttgctttggctgtcccgtcgtttctcgtcctttattttgccttcccgagcttaaactggctgatcagagagattgcaacctgactcattgtactgtttctttcttcctgtatgtttcctgacttgtaagaaacacgagatagagccaacgttgtttacactcaatatagacaagaagaagagaagatctttatttcc

SEQ ID NO: 21403 - protein, 261 aa, Arabidopsis thaliana
  peptide (1)..(261): Ceres Seq. ID no. 12322175
  misc_feature (1)..(261): Homolog of NCBI NO: 18409246 NR Description: expressed protein
  misc_feature (1)..(261): Homolog of NCBI NO: 21594048 NR Description: unknown [Arabidopsis thaliana]
  misc_feature (1)..(261): Homolog of NCBI NO: 11994767 NR Description: RING zinc finger protein-like [Arabidopsis
  misc_feature (1)..(261): Homolog of NCBI NO: 15228658 NR Description: unknown protein; protein id: At3g29270.1
  misc_feature (1)..(261): Homolog of NCBI NO: 15221223 NR Description: putative RING zinc finger protein
  misc_feature (1)..(261): Homolog of NCBI NO: 21592563 NR Description: putative RING zinc finger protein [Arabidopsis
MWNLASKSIREGFISKGEEAATKPRRATLDRSGDGRKTTKEEKLECPICWESFNVVENVPYVLWCGHTICKYCLLGLQRAIVIKSSALPFQLPFFVACPWCNILSLRLVCNGTIRFPSKNFYLLWMVESMNGSRSEAPSDNKRVASGQRDLRNRCDGMSNTALGDEGLLDNRSWWNGVTRGFFRTGRLHDSVRKSMALVAHLLAKFPLVVIFLLMALYAIPVSAAVLGVYFFVTFALAVPSFLVLYFAFPSLNWLIREIAT

SEQ ID NO: 21404 - protein, 136 aa, Arabidopsis thaliana
  peptide (1)..(136): Ceres Seq. ID no. 12322176
  misc_feature (1)..(136): Homolog of NCBI NO: 18409246 NR Description: expressed protein
  misc_feature (1)..(136): Homolog of NCBI NO: 21594048 NR Description: unknown [Arabidopsis thaliana]
  misc_feature (1)..(136): Homolog of NCBI NO: 11994767 NR Description: RING zinc finger protein-like [Arabidopsis
  misc_feature (1)..(136): Homolog of NCBI NO: 15228658 NR Description: unknown protein; protein id: At3g29270.1
  misc_feature (1)..(136): Homolog of NCBI NO: 15221223 NR Description: putative RING zinc finger protein
  misc_feature (1)..(136): Homolog of NCBI NO: 21592563 NR Description: putative RING zinc finger protein [Arabidopsis
MVESMNGSRSEAPSDNKRVASGQRDLRNRCDGMSNTALGDEGLLDNRSWWNGVTRGFFRTGRLHDSVRKSMALVAHLLAKFPLVVIFLLMALYAIPVSAAVLGVYFFVTFALAVPSFLVLYFAFPSLNWLIREIAT

SEQ ID NO: 21405 - protein, 132 aa, Arabidopsis thaliana
  peptide (1)..(132): Ceres Seq. ID no. 12322177
  misc_feature (1)..(132): Homolog of NCBI NO: 18409246 NR Description: expressed protein
  misc_feature (1)..(132): Homolog of NCBI NO: 21594048 NR Description: unknown [Arabidopsis thaliana]
  misc_feature (1)..(132): Homolog of NCBI NO: 11994767 NR Description: RING zinc finger protein-like [Arabidopsis
  misc_feature (1)..(132): Homolog of NCBI NO: 15228658 NR Description: unknown protein; protein id: At3g29270.1
  misc_feature (1)..(132): Homolog of NCBI NO: 15221223 NR Description: putative RING zinc finger protein
  misc_feature (1)..(132): Homolog of NCBI NO: 21592563 NR Description: putative RING zinc finger protein [Arabidopsis
MNGSRSEAPSDNKRVASGQRDLRNRCDGMSNTALGDEGLLDNRSWWNGVTRGFFRTGRLHDSVRKSMALVAHLLAKFPLVVIFLLMALYAIPVSAAVLGVYFFVTFALAVPSFLVLYFAFPSLNWLIREIAT

SEQ ID NO: 21406 - DNA, 1222 bp, Arabidopsis thaliana
  misc_feature (1)..(1222): Ceres Seq. ID no. 12327400
  misc_feature: MA Experiment ID: 108434 Result: Up-regulated in Transcription
  misc_feature: MA Experiment 108434 PARAMETER Experiment Name: At_Root_Tips_cDNA_P Parameter: Tissue Value: Root Tips
  misc_feature: MA Experiment ID: 108435 Result: Down-regulated in Transcription
  misc_feature: MA Experiment 108435 PARAMETER Experiment Name: At_stm_Mutants_cDNA_P Parameter: Plant Line Value: wt Landsburg vs stm
  misc_feature: MA Experiment 108435 PARAMETER Experiment Name: At_stm_Mutants_cDNA_P Parameter: Tissue Value: Shoot Apical Meristem Region
  misc_feature: MA Experiment ID: 108579 Result: Down-regulated in Transcription
  misc_feature: MA Experiment 108579 PARAMETER Experiment Name: At_4deg_Cold_cDNA_P Parameter: Temperature (deg C) Value: 4 vs. 22
  misc_feature: MA Experiment 108579 PARAMETER Experiment Name: At_4deg_Cold_cDNA_P Parameter: Timepoint (hr) Value: 6
  misc_feature: MA Experiment 108579 PARAMETER Experiment Name: At_4deg_Cold_cDNA_P Parameter: Tissue Value: Aerial
  misc_feature: MA Experiment ID: 108585 Result: Down-regulated in Transcription
  misc_feature: MA Experiment 108585 PARAMETER Experiment Name: At_5mM_NaNP_cDNA_P Parameter: Timepoint (hr) Value: 6
  misc_feature: MA Experiment 108585 PARAMETER Experiment Name: At_5mM_NaNP_cDNA_P Parameter: Tissue Value: Aerial
  misc_feature: MA Experiment 108585 PARAMETER Experiment Name: At_5mM_NaNP_cDNA_P Parameter: Treatment Value: null
  misc_feature: MA Experiment ID: 108595 Result: Down-regulated in Transcription
  misc_feature: MA Experiment 108595 PARAMETER Experiment Name: At_Ler-pi_Ovule_cDNA_P Parameter: Plant Line Value: null
  misc_feature: MA Experiment ID: 20000071 Result: Up-regulated in Transcription
  misc_feature: MA Experiment 20000071 PARAMETER Experiment Name: At_100uM_ABA_Mutants_cDNA_P Parameter: Plant Line Value: CS8104
  misc_feature: MA Experiment 20000071 PARAMETER Experiment Name: At_100uM_ABA_Mutants_cDNA_P Parameter: Timepoint (hr) Value: 6
  misc_feature: MA Experiment 20000071 PARAMETER Experiment Name: At_100uM_ABA_Mutants_cDNA_P Parameter: Tissue Value: Aerial
  misc_feature: MA Experiment 20000071 PARAMETER Experiment Name: At_100uM_ABA_Mutants_cDNA_P Parameter: Treatment Value: 100uM ABA vs. No Treatment
  misc_feature: MA Experiment ID: 20000072 Result: Up-regulated in Transcription
  misc_feature: MA Experiment 20000072 PARAMETER Experiment Name: At_100uM_ABA_Mutants_cDNA_P Parameter: Plant Line Value: CS8105
  misc_feature: MA Experiment 20000072 PARAMETER Experiment Name: At_100uM_ABA_Mutants_cDNA_P Parameter: Timepoint (hr) Value: 6
  misc_feature: MA Experiment 20000072 PARAMETER Experiment Name: At_100uM_ABA_Mutants_cDNA_P Parameter: Tissue Value: Aerial
  misc_feature: MA Experiment 20000072 PARAMETER Experiment Name: At_100uM_ABA_Mutants_cDNA_P Parameter: Treatment Value: 100uM ABA vs. No Treatment
  misc_feature: MA Experiment ID: 20000185 Result: Down-regulated in Transcription
  misc_feature: MA Experiment 20000185 PARAMETER Experiment Name: At_Roots__P Parameter: Age (day) Value: 7 vs. 21
  misc_feature: MA Experiment 20000185 PARAMETER Experiment Name: At_Roots__P Parameter: Organism Value: A. thaliana
  misc_feature: MA Experiment 20000185 PARAMETER Experiment Name: At_Roots__P Parameter: Tissue Value: Roots vs. Whole Plant
  misc_feature: MA Experiment ID: 20000439 Result: Down-regulated in Transcription
  misc_feature: MA Experiment 20000439 PARAMETER Experiment Name: At_Roots__P Parameter: Age (day) Value: 14 vs. 21
  misc_feature: MA Experiment 20000439 PARAMETER Experiment Name: At_Roots__P Parameter: Organism Value: A. thaliana
  misc_feature: MA Experiment 20000439 PARAMETER Experiment Name: At_Roots__P Parameter: Tissue Value: Roots vs. Whole Plant
aatttaggcttgttgagccaccgtgtgggcaaaaatatccaaaaacacaacacaagtgttgtcttctcgcgtctctcatcaacgagaaccagtttttttgttgatcctatcaacaatgacgaaaatagagcttcgagctttggggaacacagggcttaaggttagcgccgttggttttggtgcctctccgctcggaagtgtcttcggtccagtcgccgaagatgatgccgtcgccaccgtgcgcgaggctttccgtctcggtatcaacttcttcgacacctccccgtattatggaggaacactgtctgagaaaatgcttggtaagggactaaaggctttgcaagtccctagaagtgactacattgtggctactaagtgtggtagatataaagaaggttttgatttcagtgctgagagagtaagaaagagtattgacgagagcttggagaggcttcagcttgattatgttgacatacttcattgccatgacattgagttcgggtctcttgatcagattgtgagtgaaacaattcctgctcttcagaaactgaaacaagaggggaagacccggttcattggtatcactggtcttccgttagatattttcacttatgttcttgatcgagtgcctccagggactgtcgatgtgatattgtcatactgtcattacggcgttaatgattcgacgttgctggatttactaccttacttgaagagcaaaggtgtgggtgtgataagtgcttctccattagcaatgggcctccttacagaacaaggtcctcctgaatggcaccctgcttcccctgagctcaagtctgcaagcaaagccgcagttgctcactgcaaatcaaagggcaagaagatcacaaagttagctctgcaatacagtttagcaaacaaggagatttcgtcggtgttggttgggatgagctctgtctcacaggtagaagaaaatgttgcagcagttacagagcttgaaagtctggggatggatcaagaaactctgtctgaggttgaagctattctcgagcctgtaaagaatctgacatggccaagtggaatccatcagaactaaaagaagctctttgtgtttctggtaaactcttgtcttgcttcttgtaatgcttatgcattcgttgttgtgtcattgtgttaataagagtgtaagtttggttggtatgattaataaagtttcttagatatcaaaatcagtcggaacacc

SEQ ID NO: 21407 - protein, 319 aa, Arabidopsis thaliana
  peptide (1)..(319): Ceres Seq. ID no. 12327401
  misc_feature (1)..(319): Homolog of NCBI NO: 17553316 NR Description: Aldo keto reductase family [Caenorhabditis
  misc_feature (3)..(314): Homolog of NCBI NO: 24646159 NR Description: CG3397-PA [Drosophila melanogaster]
  misc_feature (1)..(319): Homolog of NCBI NO: 39594041 NR Description: Hypothetical protein CBG16615 [Caenorhabditis
  misc_feature (3)..(312): Homolog of NCBI NO: 31201147 NR Description: ENSANGP00000008370 [Anopheles gambiae]
  misc_feature (3)..(312): Homolog of NCBI NO: 24646155 NR Description: CG18547-PA [Drosophila melanogaster]
  misc_feature (1)..(319): Homolog of NCBI NO: 32470782 NR Description: putative oxidoreductase-possibly Aldo/keto
  misc_feature (4)..(312): Homolog of NCBI NO: 29349022 NR Description: putative oxidoreductase [Bacteroides
  misc_feature (1)..(319): Homolog of NCBI NO: 30267886 NR Description: L-galactose dehydrogenase [Malus x domestica]
  misc_feature (1)..(318): Homolog of NCBI NO: 27728731 NR Description: galactose dehydrogenase [Actinidia deliciosa]
  misc_feature (1)..(319): Homolog of NCBI NO: 15235040 NR Description: putative protein
MTKIELRALGNTGLKVSAVGFGASPLGSVFGPVAEDDAVATVREAFRLGINFFDTSPYYGGTLSEKMLGKGLKALQVPRSDYIVATKCGRYKEGFDFSAERVRKSIDESLERLQLDYVDILHCHDIEFGSLDQIVSETIPALQKLKQEGKTRFIGITGLPLDIFTYVLDRVPPGTVDVILSYCHYGVNDSTLLDLLPYLKSKGVGVISASPLAMGLLTEQGPPEWHPASPELKSASKAAVAHCKSKGKKITKLALQYSLANKEISSVLVGMSSVSQVEENVAAVTELESLGMDQETLSEVEAILEPVKNLTWPSGIHQN

SEQ ID NO: 21408 - protein, 253 aa, Arabidopsis thaliana
  peptide (1)..(253): Ceres Seq. ID no. 12327402
  misc_feature (1)..(253): Homolog of NCBI NO: 17553316 NR Description: Aldo keto reductase family [Caenorhabditis
  misc_feature (1)..(248): Homolog of NCBI NO: 24646159 NR Description: CG3397-PA [Drosophila melanogaster]
  misc_feature (1)..(253): Homolog of NCBI NO: 39594041 NR Description: Hypothetical protein CBG16615 [Caenorhabditis
  misc_feature (1)..(246): Homolog of NCBI NO: 31201147 NR Description: ENSANGP00000008370 [Anopheles gambiae]
  misc_feature (1)..(246): Homolog of NCBI NO: 24646155 NR Description: CG18547-PA [Drosophila melanogaster]
  misc_feature (1)..(253): Homolog of NCBI NO: 32470782 NR Description: putative oxidoreductase-possibly Aldo/keto
  misc_feature (1)..(246): Homolog of NCBI NO: 29349022 NR Description: putative oxidoreductase [Bacteroides
  misc_feature (1)..(253): Homolog of NCBI NO: 30267886 NR Description: L-galactose dehydrogenase [Malus x domestica]
  misc_feature (1)..(252): Homolog of NCBI NO: 27728731 NR Description: galactose dehydrogenase [Actinidia deliciosa]
  misc_feature (1)..(253): Homolog of NCBI NO: 15235040 NR Description: putative protein
MLGKGLKALQVPRSDYIVATKCGRYKEGFDFSAERVRKSIDESLERLQLDYVDILHCHDIEFGSLDQIVSETIPALQKLKQEGKTRFIGITGLPLDIFTYVLDRVPPGTVDVILSYCHYGVNDSTLLDLLPYLKSKGVGVISASPLAMGLLTEQGPPEWHPASPELKSASKAAVAHCKSKGKKITKLALQYSLANKEISSVLVGMSSVSQVEENVAAVTELESLGMDQETLSEVEAILEPVKNLTWPSGIHQN

SEQ ID NO: 21409 - DNA, 1264 bp, Arabidopsis thaliana
  misc_feature (1)..(1264): Ceres Seq. ID no. 12422384
  misc_feature: MA Experiment ID: 108434 Result: Down-regulated in Transcription
  misc_feature: MA Experiment 108434 PARAMETER Experiment Name: At_Root_Tips_cDNA_P Parameter: Tissue Value: Root Tips
  misc_feature: MA Experiment ID: 108462 Result: Up-regulated in Transcription
  misc_feature: MA Experiment 108462 PARAMETER Experiment Name: At_Germinating_Seeds_cDNA_P Parameter: Age (day) Value: 2 vs. 0
  misc_feature: MA Experiment 108462 PARAMETER Experiment Name: At_Germinating_Seeds_cDNA_P Parameter: Tissue Value: Germinating Seeds
  misc_feature: MA Experiment ID: 108463 Result: Up-regulated in Transcription
  misc_feature: MA Experiment 108463 PARAMETER Experiment Name: At_Germinating_Seeds_cDNA_P Parameter: Age (day) Value: 3 vs. 0
  misc_feature: MA Experiment 108463 PARAMETER Experiment Name: At_Germinating_Seeds_cDNA_P Parameter: Tissue Value: Germinating Seeds
  misc_feature: MA Experiment ID: 108464 Result: Up-regulated in Transcription
  misc_feature: MA Experiment 108464 PARAMETER Experiment Name: At_Germinating_Seeds_cDNA_P Parameter: Age (day) Value: 4 vs. 0
  misc_feature: MA Experiment 108464 PARAMETER Experiment Name: At_Germinating_Seeds_cDNA_P Parameter: Tissue Value: Germinating Seeds
  misc_feature: MA Experiment ID: 108469 Result: Up-regulated in Transcription
  misc_feature: MA Experiment ID: 108489 Result: Up-regulated in Transcription
  misc_feature: MA Experiment ID: 108501 Result: Down-regulated in Transcription
  misc_feature: MA Experiment 108501 PARAMETER Experiment Name: At_ap2_floral_buds_cDNA_P Parameter: Plant Line Value: ap2 (Ler.)
  misc_feature: MA Experiment 108501 PARAMETER Experiment Name: At_ap2_floral_buds_cDNA_P Parameter: Tissue Value: Closed Flower
  misc_feature: MA Experiment ID: 108561 Result: Up-regulated in Transcription
  misc_feature: MA Experiment 108561 PARAMETER Experiment Name: At_100uM_ABA_cDNA_P Parameter: Timepoint (hr) Value: 6
  misc_feature: MA Experiment 108561 PARAMETER Experiment Name: At_100uM_ABA_cDNA_P Parameter: Tissue Value: Aerial
  misc_feature: MA Experiment 108561 PARAMETER Experiment Name: At_100uM_ABA_cDNA_P Parameter: Treatment Value: 100uM ABA vs. No Treatment
  misc_feature: MA Experiment ID: 108572 Result: Up-regulated in Transcription
  misc_feature: MA Experiment 108572 PARAMETER Experiment Name: At_Drought_cDNA_P Parameter: Timepoint (hr) Value: 1
  misc_feature: MA Experiment 108572 PARAMETER Experiment Name: At_Drought_cDNA_P Parameter: Tissue Value: Aerial
  misc_feature: MA Experiment 108572 PARAMETER Experiment Name: At_Drought_cDNA_P Parameter: Treatment Value: Drought vs. No Drought
  misc_feature: MA Experiment ID: 108573 Result: Up-regulated in Transcription
  misc_feature: MA Experiment 108573 PARAMETER Experiment Name: At_Drought_cDNA_P Parameter: Timepoint (hr) Value: 6
  misc_feature: MA Experiment 108573 PARAMETER Experiment Name: At_Drought_cDNA_P Parameter: Tissue Value: Aerial
  misc_feature: MA Experiment 108573 PARAMETER Experiment Name: At_Drought_cDNA_P Parameter: Treatment Value: Drought vs. No Drought
  misc_feature: MA Experiment ID: 108579 Result: Down-regulated in Transcription
  misc_feature: MA Experiment 108579 PARAMETER Experiment Name: At_4deg_Cold_cDNA_P Parameter: Temperature (deg C) Value: 4 vs. 22
  misc_feature: MA Experiment 108579 PARAMETER Experiment Name: At_4deg_Cold_cDNA_P Parameter: Timepoint (hr) Value: 6
  misc_feature: MA Experiment 108579 PARAMETER Experiment Name: At_4deg_Cold_cDNA_P Parameter: Tissue Value: Aerial
  misc_feature: MA Experiment ID: 20000180 Result: Up-regulated in Transcription
  misc_feature: MA Experiment 20000180 PARAMETER Experiment Name: At_Germinating_Seeds_P Parameter: Age (hr) Value: 24 vs. 0
  misc_feature: MA Experiment 20000180 PARAMETER Experiment Name: At_Germinating_Seeds_P Parameter: Tissue Value: Germinating Seeds
  misc_feature: MA Experiment ID: 20000227 Result: Down-regulated in Transcription
  misc_feature: MA Experiment 20000227 PARAMETER Experiment Name: At_Root-Tips-vs-Tops_P Parameter: Tissue Value: Root Tips vs. Root Tops
  misc_feature: MA Experiment ID: 20000234 Result: Down-regulated in Transcription
  misc_feature: MA Experiment 20000234 PARAMETER Experiment Name: At_Siliques_P Parameter: Age (day) Value: 21
  misc_feature: MA Experiment 20000234 PARAMETER Experiment Name: At_Siliques_P Parameter: Organism Value: A. thaliana
  misc_feature: MA Experiment 20000234 PARAMETER Experiment Name: At_Siliques_P Parameter: Plant Line Value: WS
  misc_feature: MA Experiment 20000234 PARAMETER Experiment Name: At_Siliques_P Parameter: Tissue Value: Less Than 5mm Siliques vs. Whole Plant
  misc_feature: MA Experiment ID: 20000235 Result: Down-regulated in Transcription
  misc_feature: MA Experiment 20000235 PARAMETER Experiment Name: At_Siliques_P Parameter: Age (day) Value: 21
  misc_feature: MA Experiment 20000235 PARAMETER Experiment Name: At_Siliques_P Parameter: Organism Value: A. thaliana
  misc_feature: MA Experiment 20000235 PARAMETER Experiment Name: At_Siliques_P Parameter: Plant Line Value: WS
  misc_feature: MA Experiment 20000235 PARAMETER Experiment Name: At_Siliques_P Parameter: Tissue Value: 5-10mm Siliques vs. Whole Plant
  misc_feature: MA Experiment ID: 20000265 Result: Down-regulated in Transcription
  misc_feature: MA Experiment 20000265 PARAMETER Experiment Name: At_Open_Flower_P Parameter: Age (day) Value: 21
  misc_feature: MA Experiment 20000265 PARAMETER Experiment Name: At_Open_Flower_P Parameter: Plant Line Value: WS
  misc_feature: MA Experiment 20000265 PARAMETER Experiment Name: At_Open_Flower_P Parameter: Tissue Value: Closed Flower vs. Whole Plant
  misc_feature: MA Experiment ID: 20000438 Result: Down-regulated in Transcription
  misc_feature: MA Experiment 20000438 PARAMETER Experiment Name: At_Shoots__P Parameter: Age (day) Value: 14
  misc_feature: MA Experiment 20000438 PARAMETER Experiment Name: At_Shoots__P Parameter: Tissue Value: Shoots vs. Whole Plant
  misc_feature: MA Experiment ID: 20000451 Result: Down-regulated in Transcription
  misc_feature: MA Experiment 20000451 PARAMETER Experiment Name: At_CS6879_Shoots-Roots_P Parameter: Age (day) Value: 14
  misc_feature: MA Experiment 20000451 PARAMETER Experiment Name: At_CS6879_Shoots-Roots_P Parameter: Organism Value: A. thaliana
  misc_feature: MA Experiment 20000451 PARAMETER Experiment Name: At_CS6879_Shoots-Roots_P Parameter: Plant Line Value: CS6879 vs. WS
  misc_feature: MA Experiment 20000451 PARAMETER Experiment Name: At_CS6879_Shoots-Roots_P Parameter: Tissue Value: Roots
  misc_feature: MA Experiment ID: 20000794 Result: Up-regulated in Transcription
  misc_feature: MA Experiment 20000794 PARAMETER Experiment Name: At_Petals_P Parameter: Age (day) Value: 23-25 days
  misc_feature: MA Experiment 20000794 PARAMETER Experiment Name: At_Petals_P Parameter: Plant Line Value: WS
  misc_feature: MA Experiment 20000794 PARAMETER Experiment Name: At_Petals_P Parameter: Tissue Value: Petals vs. Whole plant
  misc_feature: MA Experiment ID: 20001557 Result: Down-regulated in Transcription
  misc_feature: MA Experiment 20001557 PARAMETER Experiment Name: At_Drought_Soil_Dry_P Parameter: Age (day) Value: 27
  misc_feature: MA Experiment 20001557 PARAMETER Experiment Name: At_Drought_Soil_Dry_P Parameter: Organism Value: A. thaliana
  misc_feature: MA Experiment 20001557 PARAMETER Experiment Name: At_Drought_Soil_Dry_P Parameter: Plant Line Value: WS
  misc_feature: MA Experiment 20001557 PARAMETER Experiment Name: At_Drought_Soil_Dry_P Parameter: Post Timepoint (hr) Value: 3
  misc_feature: MA Experiment 20001557 PARAMETER Experiment Name: At_Drought_Soil_Dry_P Parameter: Post-Treatment Value: Re-Water vs. No Drought
  misc_feature: MA Experiment 20001557 PARAMETER Experiment Name: At_Drought_Soil_Dry_P Parameter: Timepoint (day) Value: 13
  misc_feature: MA Experiment 20001557 PARAMETER Experiment Name: At_Drought_Soil_Dry_P Parameter: Treatment Value: Drought vs. No Drought
  misc_feature: MA Experiment ID: 20001558 Result: Down-regulated in Transcription
  misc_feature: MA Experiment 20001558 PARAMETER Experiment Name: At_Drought_Soil_Dry_P Parameter: Age (day) Value: 27
  misc_feature: MA Experiment 20001558 PARAMETER Experiment Name: At_Drought_Soil_Dry_P Parameter: Organism Value: A. thaliana
  misc_feature: MA Experiment 20001558 PARAMETER Experiment Name: At_Drought_Soil_Dry_P Parameter: Plant Line Value: WS
  misc_feature: MA Experiment 20001558 PARAMETER Experiment Name: At_Drought_Soil_Dry_P Parameter: Post Timepoint (hr) Value: 6
  misc_feature: MA Experiment 20001558 PARAMETER Experiment Name: At_Drought_Soil_Dry_P Parameter: Post-Treatment Value: Re-Water vs. No Drought
  misc_feature: MA Experiment 20001558 PARAMETER Experiment Name: At_Drought_Soil_Dry_P Parameter: Timepoint (day) Value: 13
  misc_feature: MA Experiment 20001558 PARAMETER Experiment Name: At_Drought_Soil_Dry_P Parameter: Treatment Value: Drought vs. No Drought
gcaattgcaaaaagaaaaccaaaacaaagctcaatcatggctagtcggagagaagtacggtgccggtgcggcagacggatgtgggttcaaccagacgcccgtaccgtccaatgctcaacctgccacaccgtcacgcagctctactcgctagtggacatagctcgcggtgcaaaccgcataattcatgggtttcaacagctacttagacaacaccaaccgcaacatcatgaacaacaacaacaacaaatgatggctcaaccgccaccacggctgcttgagcctcttccctcgccgtttgggaagaagagagcagttttatgcggcgtgaactataagggaaaaagttatagcttgaaaggttgcatcagtgatgctaagtccatgagatctttattggttcaacaaatgggtttccctattgactctattctcatgctcacagaagatgaagccagcccgcagagaataccgacgaagagaaacattaggaaggcgatgagatggttagttgaagggaacagagcaagggactcactagtgttccatttctctggtcatggatctcagcagaatgactacaacggagacgagatcgatggtcaagatgaagccttgtgccctttagaccatgaaacagaaggaaaaatcattgatgacgagattaaccggatactcgtgaggcctctcgtccatggagctaagcttcacgctgtcatcgacgcctgtaacagcgggactgtccttgatttacccttcatttgcaggatggagaggaatggttcttatgaatgggaagaccatagatcagtcagagcttacaaaggaacagatggtggagcagctttctgtttcagtgcttgtgacgatgatgaatccagtggttacactcctgtgttcacggggaagaacacaggagccatgacttatagcttcataaaggcggtgaagacagctggaccagcacccacgtatggccacctgcttaaccttatgtgttctgcaatacgagaggcccagtctcgcctcgcctttaacggggactacacaagctctgatgcatccgcggagccactgctaacatcatctgaggaatttgacgtgtacgcgacaaagtttgtactctgaatgctgtacatatgatgctgcaaatagctcggaaacgtttctatgtgtatgtatcatgtaatgattatgttgcatagcctctctcttcttacgagcaataaagctatgaaataattgattcgctaagaaatttaaaatg

SEQ ID NO: 21410 - protein, 374 aa, Arabidopsis thaliana
  peptide (1)..(374): Ceres Seq. ID no. 12422385
  misc_feature (102)..(374): Pfam Name: Caspase domain Pfam Description: Caspase domain
  misc_feature (94)..(317): Homolog of NCBI NO: 30686772 NR Description: expressed protein [Arabidopsis thaliana]
  misc_feature (94)..(317): Homolog of NCBI NO: 7485453 NR Description: hypothetical protein F13M23.250 - Arabidopsis
  misc_feature (36)..(296): Homolog of NCBI NO: 3258570 NR Description: Unknown protein [Arabidopsis thaliana]
  misc_feature (94)..(337): Homolog of NCBI NO: 32482814 NR Description: metacaspase 2 [Arabidopsis thaliana]
  misc_feature (23)..(374): Homolog of NCBI NO: 37536924 NR Description: hypothetical protein [Oryza sativa (japonica
  misc_feature (36)..(374): Homolog of NCBI NO: 30678252 NR Description: expressed protein [Arabidopsis thaliana]
  misc_feature (13)..(298): Homolog of NCBI NO: 30697974 NR Description: expressed protein [Arabidopsis thaliana]
  misc_feature (13)..(346): Homolog of NCBI NO: 11358463 NR Description: hypothetical protein [imported] - Arabidopsis
  misc_feature (13)..(374): Homolog of NCBI NO: 37788549 NR Description: metacaspase 3 [Arabidopsis thaliana]
  misc_feature (13)..(374): Homolog of NCBI NO: 15237654 NR Description: expressed protein
AIAKRKPKQSSIMASRREVRCRCGRRMWVQPDARTVQCSTCHTVTQLYSLVDIARGANRIIHGFQQLLRQHQPQHHEQQQQQMMAQPPPRLLEPLPSPFGKKRAVLCGVNYKGKSYSLKGCISDAKSMRSLLVQQMGFPIDSILMLTEDEASPQRIPTKRNIRKAMRWLVEGNRARDSLVFHFSGHGSQQNDYNGDEIDGQDEALCPLDHETEGKIIDDEINRILVRPLVHGAKLHAVIDACNSGTVLDLPFICRMERNGSYEWEDHRSVRAYKGTDGGAAFCFSACDDDESSGYTPVFTGKNTGAMTYSFIKAVKTAGPAPTYGHLLNLMCSAIREAQSRLAFNGDYTSSDASAEPLLTSSEEFDVYATKFVL

SEQ ID NO: 21411 - protein, 362 aa, Arabidopsis thaliana
  peptide (1)..(362): Ceres Seq. ID no. 12422386
  misc_feature (90)..(362): Pfam Name: Caspase domain Pfam Description: Caspase domain
  misc_feature (82)..(305): Homolog of NCBI NO: 30686772 NR Description: expressed protein [Arabidopsis thaliana]
  misc_feature (82)..(305): Homolog of NCBI NO: 7485453 NR Description: hypothetical protein F13M23.250 - Arabidopsis
  misc_feature (24)..(284): Homolog of NCBI NO: 3258570 NR Description: Unknown protein [Arabidopsis thaliana]
  misc_feature (82)..(325): Homolog of NCBI NO: 32482814 NR Description: metacaspase 2 [Arabidopsis thaliana]
  misc_feature (11)..(362): Homolog of NCBI NO: 37536924 NR Description: hypothetical protein [Oryza sativa (japonica
  misc_feature (24)..(362): Homolog of NCBI NO: 30678252 NR Description: expressed protein [Arabidopsis thaliana]
  misc_feature (1)..(286): Homolog of NCBI NO: 30697974 NR Description: expressed protein [Arabidopsis thaliana]
  misc_feature (1)..(334): Homolog of NCBI NO: 11358463 NR Description: hypothetical protein [imported] - Arabidopsis
  misc_feature (1)..(362): Homolog of NCBI NO: 37788549 NR Description: metacaspase 3 [Arabidopsis thaliana]
  misc_feature (1)..(362): Homolog of NCBI NO: 15237654 NR Description: expressed protein
MASRREVRCRCGRRMWVQPDARTVQCSTCHTVTQLYSLVDIARGANRIIHGFQQLLRQHQPQHHEQQQQQMMAQPPPRLLEPLPSPFGKKRAVLCGVNYKGKSYSLKGCISDAKSMRSLLVQQMGFPIDSILMLTEDEASPQRIPTKRNIRKAMRWLVEGNRARDSLVFHFSGHGSQQNDYNGDEIDGQDEALCPLDHETEGKIIDDEINRILVRPLVHGAKLHAVIDACNSGTVLDLPFICRMERNGSYEWEDHRSVRAYKGTDGGAAFCFSACDDDESSGYTPVFTGKNTGAMTYSFIKAVKTAGPAPTYGHLLNLMCSAIREAQSRLAFNGDYTSSDASAEPLLTSSEEFDVYATKFVL

SEQ ID NO: 21412 - protein, 348 aa, Arabidopsis thaliana
  peptide (1)..(348): Ceres Seq. ID no. 12422387
  misc_feature (76)..(348): Pfam Name: Caspase domain Pfam Description: Caspase domain
  misc_feature (68)..(291): Homolog of NCBI NO: 30686772 NR Description: expressed protein [Arabidopsis thaliana]
  misc_feature (68)..(291): Homolog of NCBI NO: 7485453 NR Description: hypothetical protein F13M23.250 - Arabidopsis
  misc_feature (10)..(270): Homolog of NCBI NO: 3258570 NR Description: Unknown protein [Arabidopsis thaliana]
  misc_feature (68)..(311): Homolog of NCBI NO: 32482814 NR Description: metacaspase 2 [Arabidopsis thaliana]
  misc_feature (1)..(348): Homolog of NCBI NO: 37536924 NR Description: hypothetical protein [Oryza sativa (japonica
  misc_feature (10)..(348): Homolog of NCBI NO: 30678252 NR Description: expressed protein [Arabidopsis thaliana]
  misc_feature (1)..(272): Homolog of NCBI NO: 30697974 NR Description: expressed protein [Arabidopsis thaliana]
  misc_feature (1)..(320): Homolog of NCBI NO: 11358463 NR Description: hypothetical protein [imported] - Arabidopsis
  misc_feature (1)..(348): Homolog of NCBI NO: 37788549 NR Description: metacaspase 3 [Arabidopsis thaliana]
  misc_feature (1)..(348): Homolog of NCBI NO: 15237654 NR Description: expressed protein
MWVQPDARTVQCSTCHTVTQLYSLVDIARGANRIIHGFQQLLRQHQPQHHEQQQQQMMAQPPPRLLEPLPSPFGKKRAVLCGVNYKGKSYSLKGCISDAKSMRSLLVQQMGFPIDSILMLTEDEASPQRIPTKRNIRKAMRWLVEGNRARDSLVFHFSGHGSQQNDYNGDEIDGQDEALCPLDHETEGKIIDDEINRILVRPLVHGAKLHAVIDACNSGTVLDLPFICRMERNGSYEWEDHRSVRAYKGTDGGAAFCFSACDDDESSGYTPVFTGKNTGAMTYSFIKAVKTAGPAPTYGHLLNLMCSAIREAQSRLAFNGDYTSSDASAEPLLTSSEEFDVYATKFVL

SEQ ID NO: 21413 - DNA, 825 bp, Arabidopsis thaliana
  misc_feature (1)..(825): Ceres Seq. ID no. 12343466
  misc_feature: MA Experiment ID: 20000794 Result: Up-regulated in Transcription
  misc_feature: MA Experiment 20000794 PARAMETER Experiment Name: At_Petals_P Parameter: Age (day) Value: 23-25 days
  misc_feature: MA Experiment 20000794 PARAMETER Experiment Name: At_Petals_P Parameter: Plant Line Value: WS
  misc_feature: MA Experiment 20000794 PARAMETER Experiment Name: At_Petals_P Parameter: Tissue Value: Petals vs. Whole plant
attcaattcatttccgtttgaaggaggtagtcggagactgagaatcatctgagatcggaaacgacaaacctaattttcccgaagaatcgagaccattatgtggaggagaatcgtttcatcgcatcttaaatccatctccgccgtcgggtcctgcgcggctccgtcgtgcaggcacgccgtcgtagagtccactcacctttctctctcgactcgtgcatcctccattcccgcatattcctccatattctctcgtcaaatcggctccgctgcagcggatactgctgtgaagaagcgtgttgaagatgtgatgcctattgcaaccggtcacgagaaagaggaactacaagccgaattggaggggaggaagctggacgatatagactttcctgaagggccttttggaacaaaggaagctcctgctgtagtcaaatcctactacgacatgagaatagttggttgccctggaggtgaaggagaggatgagcatgatgttgtctggttttggctggagaaaggcaagtcttttgaatgccctgtgtgtacacagtacttcaagcttgaagtggtcggccctggaggacctcctgacggacatggtgatgaccatcactgatccaaggaaaacaatctattgtaataagaaatagtgtggcttctgctaaatgtgaagcagcctcgtcttgtttttttttttggttttaattctaccctcagttctctaccaattgcttcagtgattgccttaaaccgccgaaaatagatggtccatcttcaggctctcgtcgccattttttgccaaataattgagatgctacctttgttctc

SEQ ID NO: 21414 - protein, 171 aa, Arabidopsis thaliana
  peptide (1)..(171): Ceres Seq. ID no. 12343467
  misc_feature (62)..(160): Pfam Name: Cytochrome c oxidase subunit Vb Pfam Description: Cytochrome c oxidase subunit Vb
  misc_feature (20)..(171): Homolog of NCBI NO: 32410127 NR Description: hypothetical protein [Neurospora crassa]
  misc_feature (74)..(154): Homolog of NCBI NO: 117102 NR Description: CYTOCHROME C OXIDASE POLYPEPTIDE VB (VI)
  misc_feature (74)..(154): Homolog of NCBI NO: 223590 NR Description: oxidase IV,cytochrome
  misc_feature (127)..(171): Homolog of NCBI NO: 5903035 NR Description: Similar to gb|D85381 cytochrome c oxidase subunit precursor from Oryza sativa. ESTs gb|R30504 and gb|AA598195 come
  misc_feature (1)..(113): Homolog of NCBI NO: 7484634 NR Description: probable cytochrome-c oxidase (EC 1.9.3.1) Vb
  misc_feature (1)..(171): Homolog of NCBI NO: 34912592 NR Description: cytochrome c oxidase subunit Vb precursor
  misc_feature (33)..(171): Homolog of NCBI NO: 5803264 NR Description: ESTs AU057456(S21460),AU057455(S21460) correspond a region of the predicted gene.~Similar to cytochrome c oxidase
  misc_feature (1)..(171): Homolog of NCBI NO: 15232644 NR Description: putative cytochrome c oxidase subunit Vb
  misc_feature (1)..(171): Homolog of NCBI NO: 15220092 NR Description: cytochrome c oxidase subunit, putative
  misc_feature (1)..(171): Homolog of NCBI NO: 21592567 NR Description: cytochrome c oxidase subunit, putative
MWRRIVSSHLKSISAVGSCAAPSCRHAVVESTHLSLSTRASSIPAYSSIFSRQIGSAAADTAVKKRVEDVMPIATGHEKEELQAELEGRKLDDIDFPEGPFGTKEAPAVVKSYYDMRIVGCPGGEGEDEHDVVWFWLEKGKSFECPVCTQYFKLEVVGPGGPPDGHGDDHH

SEQ ID NO: 21415 - protein, 101 aa, Arabidopsis thaliana
  peptide (1)..(101): Ceres Seq. ID no. 12343468
  misc_feature (1)..(90): Pfam Name: Cytochrome c oxidase subunit Vb Pfam Description: Cytochrome c oxidase subunit Vb
  misc_feature (1)..(101): Homolog of NCBI NO: 15232644 NR Description: putative cytochrome c oxidase subunit Vb
  misc_feature (1)..(101): Homolog of NCBI NO: 15220092 NR Description: cytochrome c oxidase subunit, putative
  misc_feature (4)..(84): Homolog of NCBI NO: 117102 NR Description: CYTOCHROME C OXIDASE POLYPEPTIDE VB (VI)
  misc_feature (57)..(101): Homolog of NCBI NO: 5903035 NR Description: Similar to gb|D85381 cytochrome c oxidase subunit precursor from Oryza sativa. ESTs gb|R30504 and gb|AA598195 come
  misc_feature (1)..(101): Homolog of NCBI NO: 34912592 NR Description: cytochrome c oxidase subunit Vb precursor
  misc_feature (1)..(101): Homolog of NCBI NO: 5803264 NR Description: ESTs AU057456(S21460),AU057455(S21460) correspond a region of the predicted gene.~Similar to cytochrome c oxidase
  misc_feature (1)..(43): Homolog of NCBI NO: 7484634 NR Description: probable cytochrome-c oxidase (EC 1.9.3.1) Vb
  misc_feature (4)..(84): Homolog of NCBI NO: 223590 NR Description: oxidase IV,cytochrome
  misc_feature (1)..(101): Homolog of NCBI NO: 32410127 NR Description: hypothetical protein [Neurospora crassa]
  misc_feature (1)..(101): Homolog of NCBI NO: 21592567 NR Description: cytochrome c oxidase subunit, putative
MPIATGHEKEELQAELEGRKLDDIDFPEGPFGTKEAPAVVKSYYDMRIVGCPGGEGEDEHDVVWFWLEKGKSFECPVCTQYFKLEVVGPGGPPDGHGDDHH

SEQ ID NO: 21416 - DNA, 911 bp, Arabidopsis thaliana
  misc_feature (1)..(911): Ceres Seq. ID no. 12329320
  misc_feature: MA Experiment ID: 108434 Result: Up-regulated in Transcription
  misc_feature: MA Experiment 108434 PARAMETER Experiment Name: At_Root_Tips_cDNA_P Parameter: Tissue Value: Root Tips
  misc_feature: MA Experiment ID: 108462 Result: Down-regulated in Transcription
  misc_feature: MA Experiment 108462 PARAMETER Experiment Name: At_Germinating_Seeds_cDNA_P Parameter: Age (day) Value: 2 vs. 0
  misc_feature: MA Experiment 108462 PARAMETER Experiment Name: At_Germinating_Seeds_cDNA_P Parameter: Tissue Value: Germinating Seeds
  misc_feature: MA Experiment ID: 108463 Result: Down-regulated in Transcription
  misc_feature: MA Experiment 108463 PARAMETER Experiment Name: At_Germinating_Seeds_cDNA_P Parameter: Age (day) Value: 3 vs. 0
  misc_feature: MA Experiment 108463 PARAMETER Experiment Name: At_Germinating_Seeds_cDNA_P Parameter: Tissue Value: Germinating Seeds
  misc_feature: MA Experiment ID: 108464 Result: Down-regulated in Transcription
  misc_feature: MA Experiment 108464 PARAMETER Experiment Name: At_Germinating_Seeds_cDNA_P Parameter: Age (day) Value: 4 vs. 0
  misc_feature: MA Experiment 108464 PARAMETER Experiment Name: At_Germinating_Seeds_cDNA_P Parameter: Tissue Value: Germinating Seeds
  misc_feature: MA Experiment ID: 20000144 Result: Up-regulated in Transcription
  misc_feature: MA Experiment 20000144 PARAMETER Experiment Name: At_42deg_Heat_cDNA_P Parameter: Temperature (deg C) Value: 42 vs. 22
  misc_feature: MA Experiment 20000144 PARAMETER Experiment Name: At_42deg_Heat_cDNA_P Parameter: Timepoint (hr) Value: 1
  misc_feature: MA Experiment 20000144 PARAMETER Experiment Name: At_42deg_Heat_cDNA_P Parameter: Tissue Value: Aerial
  misc_feature: MA Experiment ID: 20000224 Result: Down-regulated in Transcription
  misc_feature: MA Experiment ID: 20001558 Result: Up-regulated in Transcription
  misc_feature: MA Experiment 20001558 PARAMETER Experiment Name: At_Drought_Soil_Dry_P Parameter: Age (day) Value: 27
  misc_feature: MA Experiment 20001558 PARAMETER Experiment Name: At_Drought_Soil_Dry_P Parameter: Organism Value: A. thaliana
  misc_feature: MA Experiment 20001558 PARAMETER Experiment Name: At_Drought_Soil_Dry_P Parameter: Plant Line Value: WS
  misc_feature: MA Experiment 20001558 PARAMETER Experiment Name: At_Drought_Soil_Dry_P Parameter: Post Timepoint (hr) Value: 6
  misc_feature: MA Experiment 20001558 PARAMETER Experiment Name: At_Drought_Soil_Dry_P Parameter: Post-Treatment Value: Re-Water vs. No Drought
  misc_feature: MA Experiment 20001558 PARAMETER Experiment Name: At_Drought_Soil_Dry_P Parameter: Timepoint (day) Value: 13
  misc_feature: MA Experiment 20001558 PARAMETER Experiment Name: At_Drought_Soil_Dry_P Parameter: Treatment Value: Drought vs. No Drought
  misc_feature: MA Experiment ID: 20001911 Result: Down-regulated in Transcription
  misc_feature: MA Experiment 20001911 PARAMETER Experiment Name: At_Drought_Reproduction_P Parameter: Age (day) Value: 40
  misc_feature: MA Experiment 20001911 PARAMETER Experiment Name: At_Drought_Reproduction_P Parameter: Organism Value: A. thaliana
  misc_feature: MA Experiment 20001911 PARAMETER Experiment Name: At_Drought_Reproduction_P Parameter: Plant Line Value: WS
  misc_feature: MA Experiment 20001911 PARAMETER Experiment Name: At_Drought_Reproduction_P Parameter: Timepoint (day) Value: 10
  misc_feature: MA Experiment 20001911 PARAMETER Experiment Name: At_Drought_Reproduction_P Parameter: Tissue Value: Flowers
  misc_feature: MA Experiment 20001911 PARAMETER Experiment Name: At_Drought_Reproduction_P Parameter: Treatment Value: Drought vs. No Drought
aactctagactggaccgagttcgctaccttcgtctcgccttcggcctttttctggttcttcacttctgacgagattcgcttttaccagagagagagagagatgagaatgacatttttgagttatctgaagcaatggcgtggaacagcgaaagaagcattcgagaatgtatcaatcgtcgccaagtttctctgtttgcttcatgtcaccgatcgatacataatctccacgacccacgttcacgggccgagcatgcttccgacgcttaatctaaccggcgatgtaatattggcggaacatttatcacaccggtttggtaagattggactcggtgacgttgtattggttcgatctcctagagacccaaaaaggatggtgacaaagcgaatcttgggtttagaaggcgatagactcactttttctgctgacccattggtcggtgatgcttcagtgagcgttttggttccgaaaggtcatgtttggattcagggagataacttgtatgcttcaactgattcacgtcattttgggcctgtaccttacagtctcattgaaggaaaagctcttctacgggtctggccaccagaatactttgggtcattgagatgacgattatatacacatacacattcaggtaatcaggttgtctgcctactgtatacgtcaagcgatcacttcaacgattttgttgcactgtaactcatgcgagtaatgtatcattcatgtgggataagcattttcgtctactctcctttttggcagtaatagaagaaaagccatggtcctgatattgtttctgaaacccgaacttcaatatcaaatgttaagattcatattgttggtatcgaaaaagctggtgcgttatgggatgataattgtgtccttgatacaaagttttatagatgttttgatt

SEQ ID NO: 21417 - protein, 201 aa, Arabidopsis thaliana
  peptide (1)..(201): Ceres Seq. ID no. 12329321
  misc_feature (79)..(136): Pfam Name: Signal peptidase I Pfam Description: Signal peptidase I
  misc_feature (46)..(190): Homolog of NCBI NO: 34856630 NR Description: similar to RIKEN cDNA 1500034J20 [Rattus
  misc_feature (46)..(201): Homolog of NCBI NO: 21450679 NR Description: hypothetical protein FLJ25059 [Homo sapiens]
  misc_feature (28)..(176): Homolog of NCBI NO: 8778577 NR Description: F28C11.10 [Arabidopsis thaliana]
  misc_feature (46)..(201): Homolog of NCBI NO: 21312276 NR Description: RIKEN cDNA 1500034J20 [Mus musculus]
  misc_feature (45)..(190): Homolog of NCBI NO: 15220621 NR Description: hypothetical protein; protein id: At1g29960.1
  misc_feature (45)..(190): Homolog of NCBI NO: 25518432 NR Description: hypothetical protein F5O8.3 - Arabidopsis
  misc_feature (45)..(190): Homolog of NCBI NO: 22329754 NR Description: polygalacturonase, putative; protein id:
  misc_feature (45)..(190): Homolog of NCBI NO: 22208508 NR Description: unknown protein [Sorghum bicolor]
  misc_feature (71)..(158): Homolog of NCBI NO: 8671873 NR Description: Contains similarity to 17.6 KD class I heat shock from Arabidopsis thaliana gi|P13853 and contains Hsp20/alpha PF|00011 and signal peptidase I PF|00461 domains. ESTs
  misc_feature (34)..(201): Homolog of NCBI NO: 30695525 NR Description: expressed protein [Arabidopsis thaliana]
TLDWTEFATFVSPSAFFWFFTSDEIRFYQREREMRMTFLSYLKQWRGTAKEAFENVSIVAKFLCLLHVTDRYIISTTHVHGPSMLPTLNLTGDVILAEHLSHRFGKIGLGDVVLVRSPRDPKRMVTKRILGLEGDRLTFSADPLVGDASVSVLVPKGHVWIQGDNLYASTDSRHFGPVPYSLIEGKALLRVWPPEYFGSLR

SEQ ID NO: 21418 - protein, 168 aa, Arabidopsis thaliana
  peptide (1)..(168): Ceres Seq. ID no. 12329322
  misc_feature (46)..(103): Pfam Name: Signal peptidase I Pfam Description: Signal peptidase I
  misc_feature (13)..(157): Homolog of NCBI NO: 34856630 NR Description: similar to RIKEN cDNA 1500034J20 [Rattus
  misc_feature (13)..(168): Homolog of NCBI NO: 21450679 NR Description: hypothetical protein FLJ25059 [Homo sapiens]
  misc_feature (1)..(143): Homolog of NCBI NO: 8778577 NR Description: F28C11.10 [Arabidopsis thaliana]
  misc_feature (13)..(168): Homolog of NCBI NO: 21312276 NR Description: RIKEN cDNA 1500034J20 [Mus musculus]
  misc_feature (12)..(157): Homolog of NCBI NO: 15220621 NR Description: hypothetical protein; protein id: At1g29960.1
  misc_feature (12)..(157): Homolog of NCBI NO: 25518432 NR Description: hypothetical protein F5O8.3 - Arabidopsis
  misc_feature (12)..(157): Homolog of NCBI NO: 22329754 NR Description: polygalacturonase, putative; protein id:
  misc_feature (12)..(157): Homolog of NCBI NO: 22208508 NR Description: unknown protein [Sorghum bicolor]
  misc_feature (38)..(125): Homolog of NCBI NO: 8671873 NR Description: Contains similarity to 17.6 KD class I heat shock from Arabidopsis thaliana gi|P13853 and contains Hsp20/alpha PF|00011 and signal peptidase I PF|00461 domains. ESTs
  misc_feature (1)..(168): Homolog of NCBI NO: 30695525 NR Description: expressed protein [Arabidopsis thaliana]
MRMTFLSYLKQWRGTAKEAFENVSIVAKFLCLLHVTDRYIISTTHVHGPSMLPTLNLTGDVILAEHLSHRFGKIGLGDVVLVRSPRDPKRMVTKRILGLEGDRLTFSADPLVGDASVSVLVPKGHVWIQGDNLYASTDSRHFGPVPYSLIEGKALLRVWPPEYFGSLR

SEQ ID NO: 21419 - protein, 166 aa, Arabidopsis thaliana
  peptide (1)..(166): Ceres Seq. ID no. 12329323
  misc_feature (44)..(101): Pfam Name: Signal peptidase I Pfam Description: Signal peptidase I
  misc_feature (11)..(155): Homolog of NCBI NO: 34856630 NR Description: similar to RIKEN cDNA 1500034J20 [Rattus
  misc_feature (11)..(166): Homolog of NCBI NO: 21450679 NR Description: hypothetical protein FLJ25059 [Homo sapiens]
  misc_feature (1)..(141): Homolog of NCBI NO: 8778577 NR Description: F28C11.10 [Arabidopsis thaliana]
  misc_feature (11)..(166): Homolog of NCBI NO: 21312276 NR Description: RIKEN cDNA 1500034J20 [Mus musculus]
  misc_feature (10)..(155): Homolog of NCBI NO: 15220621 NR Description: hypothetical protein; protein id: At1g29960.1
  misc_feature (10)..(155): Homolog of NCBI NO: 25518432 NR Description: hypothetical protein F5O8.3 - Arabidopsis
  misc_feature (10)..(155): Homolog of NCBI NO: 22329754 NR Description: polygalacturonase, putative; protein id:
  misc_feature (10)..(155): Homolog of NCBI NO: 22208508 NR Description: unknown protein [Sorghum bicolor]
  misc_feature (36)..(123): Homolog of NCBI NO: 8671873 NR Description: Contains similarity to 17.6 KD class I heat shock from Arabidopsis thaliana gi|P13853 and contains Hsp20/alpha PF|00011 and signal peptidase I PF|00461 domains. ESTs
  misc_feature (1)..(166): Homolog of NCBI NO: 30695525 NR Description: expressed protein [Arabidopsis thaliana]
MTFLSYLKQWRGTAKEAFENVSIVAKFLCLLHVTDRYIISTTHVHGPSMLPTLNLTGDVILAEHLSHRFGKIGLGDVVLVRSPRDPKRMVTKRILGLEGDRLTFSADPLVGDASVSVLVPKGHVWIQGDNLYASTDSRHFGPVPYSLIEGKALLRVWPPEYFGSLR

SEQ ID NO: 21420 - DNA, 812 bp, Arabidopsis thaliana
  misc_feature (1)..(812): Ceres Seq. ID no. 12331932
  misc_feature: MA Experiment ID: 20000214 Result: Down-regulated in Transcription
  misc_feature: MA Experiment 20000214 PARAMETER Experiment Name: At_4deg_Cold_P Parameter: Timepoint (hr) Value: 6
  misc_feature: MA Experiment ID: 20000224 Result: Down-regulated in Transcription
accaatagagtaattcaactgccccaaattgctctcgactttttattctcggattagcgtttgtgctttcgcatcagagaatctctcagttcttctcaatttaggtcatcagatctcacaatcaatcgactcgaactcaaatctcacttcatcaatcaaatcatgactcttggctcaggatcgagtgttgtcgttccgaggaatttccggttgctggaggagcttgaacgtggagagaaaggtattggagatggaactgtgagctatggaatggatgatggagatgacatttatatgcgctcttggactggcactatcatcggtcctcacaacactgtacatgagggtcggatttatcagttgaagctcttctgtgacaaagattaccctgagaaacctccgactgttcggttccattcgcgtatcaacatgacttgtgtcaaccatgataccggcgtggtggattcaaagaagtttggggttcttgcaaactggcaaagacagtacacaatggaggacatactgactcaattgaagaaggagatggctgcatcgcataaccggaagcttgttcaacctcccgaaggaactttcttctaatactctcaaagcctacctttgaggggcttctccattgttggtcttcaagcttttctttcgtaccttaaagtaaaaacaatggtgtctgtcgatgaatgatgatgttcgattgatcatctggagtttaaatccttgtgtgcaaatatatctagacaacgctgtctcacgacttcatcttctcagtttagatataatatgggaaacaaccttct

SEQ ID NO: 21421 - protein, 145 aa, Arabidopsis thaliana
  peptide (1)..(145): Ceres Seq. ID no. 12331933
  misc_feature (7)..(142): Homolog of NCBI NO: 25326240 NR Description: protein F26F24.10 [imported] - Arabidopsis
  misc_feature (11)..(145): Homolog of NCBI NO: 13324790 NR Description: putative DNA-binding protein [Oryza sativa]
  misc_feature (3)..(142): Homolog of NCBI NO: 18409647 NR Description: E2, ubiquitin-conjugating enzyme, putative
  misc_feature (3)..(142): Homolog of NCBI NO: 21593918 NR Description: E2, ubiquitin-conjugating enzyme, putative
  misc_feature (7)..(142): Homolog of NCBI NO: 18395221 NR Description: E2, ubiquitin-conjugating enzyme, putative
  misc_feature (6)..(145): Homolog of NCBI NO: 2982253 NR Description: CROC-1-like protein [Picea mariana]
  misc_feature (1)..(145): Homolog of NCBI NO: 30693656 NR Description: ubiquitin-conjugating enzyme family [Arabidopsis
  misc_feature (1)..(145): Homolog of NCBI NO: 18409633 NR Description: E2, ubiquitin-conjugating enzyme, putative
  misc_feature (1)..(145): Homolog of NCBI NO: 30686662 NR Description: ubiquitin-conjugating enzyme family [Arabidopsis
  misc_feature (1)..(145): Homolog of NCBI NO: 18404032 NR Description: E2, ubiquitin-conjugating enzyme, putative
MTLGSGSSVVVPRNFRLLEELERGEKGIGDGTVSYGMDDGDDIYMRSWTGTIIGPHNTVHEGRIYQLKLFCDKDYPEKPPTVRFHSRINMTCVNHDTGVVDSKKFGVLANWQRQYTMEDILTQLKKEMAASHNRKLVQPPEGTFF

SEQ ID NO: 21422 - protein, 109 aa, Arabidopsis thaliana
  peptide (1)..(109): Ceres Seq. ID no. 12331934
  misc_feature (1)..(106): Homolog of NCBI NO: 25326240 NR Description: protein F26F24.10 [imported] - Arabidopsis
  misc_feature (1)..(109): Homolog of NCBI NO: 13324790 NR Description: putative DNA-binding protein [Oryza sativa]
  misc_feature (1)..(106): Homolog of NCBI NO: 18409647 NR Description: E2, ubiquitin-conjugating enzyme, putative
  misc_feature (1)..(106): Homolog of NCBI NO: 21593918 NR Description: E2, ubiquitin-conjugating enzyme, putative
  misc_feature (1)..(106): Homolog of NCBI NO: 18395221 NR Description: E2, ubiquitin-conjugating enzyme, putative
  misc_feature (1)..(109): Homolog of NCBI NO: 2982253 NR Description: CROC-1-like protein [Picea mariana]
  misc_feature (1)..(109): Homolog of NCBI NO: 30693656 NR Description: ubiquitin-conjugating enzyme family [Arabidopsis
  misc_feature (1)..(109): Homolog of NCBI NO: 18409633 NR Description: E2, ubiquitin-conjugating enzyme, putative
  misc_feature (1)..(109): Homolog of NCBI NO: 30686662 NR Description: ubiquitin-conjugating enzyme family [Arabidopsis
  misc_feature (1)..(109): Homolog of NCBI NO: 18404032 NR Description: E2, ubiquitin-conjugating enzyme, putative
MDDGDDIYMRSWTGTIIGPHNTVHEGRIYQLKLFCDKDYPEKPPTVRFHSRINMTCVNHDTGVVDSKKFGVLANWQRQYTMEDILTQLKKEMAASHNRKLVQPPEGTFF

SEQ ID NO: 21423 - protein, 101 aa, Arabidopsis thaliana
  peptide (1)..(101): Ceres Seq. ID no. 12331935
  misc_feature (1)..(98): Homolog of NCBI NO: 25326240 NR Description: protein F26F24.10 [imported] - Arabidopsis
  misc_feature (1)..(101): Homolog of NCBI NO: 13324790 NR Description: putative DNA-binding protein [Oryza sativa]
  misc_feature (1)..(98): Homolog of NCBI NO: 18409647 NR Description: E2, ubiquitin-conjugating enzyme, putative
  misc_feature (1)..(98): Homolog of NCBI NO: 21593918 NR Description: E2, ubiquitin-conjugating enzyme, putative
  misc_feature (1)..(98): Homolog of NCBI NO: 18395221 NR Description: E2, ubiquitin-conjugating enzyme, putative
  misc_feature (1)..(101): Homolog of NCBI NO: 2982253 NR Description: CROC-1-like protein [Picea mariana]
  misc_feature (1)..(101): Homolog of NCBI NO: 30693656 NR Description: ubiquitin-conjugating enzyme family [Arabidopsis
  misc_feature (1)..(101): Homolog of NCBI NO: 18409633 NR Description: E2, ubiquitin-conjugating enzyme, putative
  misc_feature (1)..(101): Homolog of NCBI NO: 30686662 NR Description: ubiquitin-conjugating enzyme family [Arabidopsis
  misc_feature (1)..(101): Homolog of NCBI NO: 18404032 NR Description: E2, ubiquitin-conjugating enzyme, putative
MRSWTGTIIGPHNTVHEGRIYQLKLFCDKDYPEKPPTVRFHSRINMTCVNHDTGVVDSKKFGVLANWQRQYTMEDILTQLKKEMAASHNRKLVQPPEGTFF

SEQ ID NO: 21424 - DNA, 784 bp, Arabidopsis thaliana
  misc_feature (1)..(784): Ceres Seq. ID no. 13509916
  misc_feature: MA Experiment ID: 108577 Result: Down-regulated in Transcription
  misc_feature: MA Experiment 108577 PARAMETER Experiment Name: At_42deg_Heat_cDNA_P Parameter: Temperature (deg C) Value: 42 vs. 22
  misc_feature: MA Experiment 108577 PARAMETER Experiment Name: At_42deg_Heat_cDNA_P Parameter: Timepoint (hr) Value: 6
  misc_feature: MA Experiment 108577 PARAMETER Experiment Name: At_42deg_Heat_cDNA_P Parameter: Tissue Value: Aerial
  misc_feature: MA Experiment ID: 108579 Result: Down-regulated in Transcription
  misc_feature: MA Experiment 108579 PARAMETER Experiment Name: At_4deg_Cold_cDNA_P Parameter: Temperature (deg C) Value: 4 vs. 22
  misc_feature: MA Experiment 108579 PARAMETER Experiment Name: At_4deg_Cold_cDNA_P Parameter: Timepoint (hr) Value: 6
  misc_feature: MA Experiment 108579 PARAMETER Experiment Name: At_4deg_Cold_cDNA_P Parameter: Tissue Value: Aerial
  misc_feature: MA Experiment ID: 108595 Result: Up-regulated in Transcription
  misc_feature: MA Experiment 108595 PARAMETER Experiment Name: At_Ler-pi_Ovule_cDNA_P Parameter: Plant Line Value: null
  misc_feature: MA Experiment ID: 20000069 Result: Up-regulated in Transcription
  misc_feature: MA Experiment 20000069 PARAMETER Experiment Name: At_100uM_ABA_Mutants_cDNA_P Parameter: Plant Line Value: CS23
  misc_feature: MA Experiment 20000069 PARAMETER Experiment Name: At_100uM_ABA_Mutants_cDNA_P Parameter: Timepoint (hr) Value: 6
  misc_feature: MA Experiment 20000069 PARAMETER Experiment Name: At_100uM_ABA_Mutants_cDNA_P Parameter: Tissue Value: Aerial
  misc_feature: MA Experiment 20000069 PARAMETER Experiment Name: At_100uM_ABA_Mutants_cDNA_P Parameter: Treatment Value: 100uM ABA vs. No Treatment
  misc_feature: MA Experiment ID: 20000070 Result: Up-regulated in Transcription
  misc_feature: MA Experiment 20000070 PARAMETER Experiment Name: At_100uM_ABA_Mutants_cDNA_P Parameter: Plant Line Value: CS24
  misc_feature: MA Experiment 20000070 PARAMETER Experiment Name: At_100uM_ABA_Mutants_cDNA_P Parameter: Timepoint (hr) Value: 6
  misc_feature: MA Experiment 20000070 PARAMETER Experiment Name: At_100uM_ABA_Mutants_cDNA_P Parameter: Tissue Value: Aerial
  misc_feature: MA Experiment 20000070 PARAMETER Experiment Name: At_100uM_ABA_Mutants_cDNA_P Parameter: Treatment Value: 100uM ABA vs. No Treatment
  misc_feature: MA Experiment ID: 20000071 Result: Up-regulated in Transcription
  misc_feature: MA Experiment 20000071 PARAMETER Experiment Name: At_100uM_ABA_Mutants_cDNA_P Parameter: Plant Line Value: CS8104
  misc_feature: MA Experiment 20000071 PARAMETER Experiment Name: At_100uM_ABA_Mutants_cDNA_P Parameter: Timepoint (hr) Value: 6
  misc_feature: MA Experiment 20000071 PARAMETER Experiment Name: At_100uM_ABA_Mutants_cDNA_P Parameter: Tissue Value: Aerial
  misc_feature: MA Experiment 20000071 PARAMETER Experiment Name: At_100uM_ABA_Mutants_cDNA_P Parameter: Treatment Value: 100uM ABA vs. No Treatment
  misc_feature: MA Experiment ID: 20000072 Result: Up-regulated in Transcription
  misc_feature: MA Experiment 20000072 PARAMETER Experiment Name: At_100uM_ABA_Mutants_cDNA_P Parameter: Plant Line Value: CS8105
  misc_feature: MA Experiment 20000072 PARAMETER Experiment Name: At_100uM_ABA_Mutants_cDNA_P Parameter: Timepoint (hr) Value: 6
  misc_feature: MA Experiment 20000072 PARAMETER Experiment Name: At_100uM_ABA_Mutants_cDNA_P Parameter: Tissue Value: Aerial
  misc_feature: MA Experiment 20000072 PARAMETER Experiment Name: At_100uM_ABA_Mutants_cDNA_P Parameter: Treatment Value: 100uM ABA vs. No Treatment
  misc_feature: MA Experiment ID: 20000086 Result: Up-regulated in Transcription
  misc_feature: MA Experiment 20000086 PARAMETER Experiment Name: At_100uM_ABA_Mutants_cDNA_P Parameter: Plant Line Value: CS22
  misc_feature: MA Experiment 20000086 PARAMETER Experiment Name: At_100uM_ABA_Mutants_cDNA_P Parameter: Timepoint (hr) Value: 6
  misc_feature: MA Experiment 20000086 PARAMETER Experiment Name: At_100uM_ABA_Mutants_cDNA_P Parameter: Tissue Value: Aerial
  misc_feature: MA Experiment 20000086 PARAMETER Experiment Name: At_100uM_ABA_Mutants_cDNA_P Parameter: Treatment Value: 100uM ABA vs. No Treatment
  misc_feature: MA Experiment ID: 20000087 Result: Up-regulated in Transcription
  misc_feature: MA Experiment 20000087 PARAMETER Experiment Name: At_100uM_ABA_Mutants_cDNA_P Parameter: Plant Line Value: WS
  misc_feature: MA Experiment 20000087 PARAMETER Experiment Name: At_100uM_ABA_Mutants_cDNA_P Parameter: Timepoint (hr) Value: 6
  misc_feature: MA Experiment 20000087 PARAMETER Experiment Name: At_100uM_ABA_Mutants_cDNA_P Parameter: Tissue Value: Aerial
  misc_feature: MA Experiment 20000087 PARAMETER Experiment Name: At_100uM_ABA_Mutants_cDNA_P Parameter: Treatment Value: 100uM ABA vs. No Treatment
  misc_feature: MA Experiment ID: 20000088 Result: Up-regulated in Transcription
  misc_feature: MA Experiment 20000088 PARAMETER Experiment Name: At_100uM_ABA_Mutants_cDNA_P Parameter: Plant Line Value: Landsberg
  misc_feature: MA Experiment 20000088 PARAMETER Experiment Name: At_100uM_ABA_Mutants_cDNA_P Parameter: Timepoint (hr) Value: 6
  misc_feature: MA Experiment 20000088 PARAMETER Experiment Name: At_100uM_ABA_Mutants_cDNA_P Parameter: Tissue Value: Aerial
  misc_feature: MA Experiment 20000088 PARAMETER Experiment Name: At_100uM_ABA_Mutants_cDNA_P Parameter: Treatment Value: 100uM ABA vs. No Treatment
  misc_feature: MA Experiment ID: 20000089 Result: Up-regulated in Transcription
  misc_feature: MA Experiment ID: 20000090 Result: Up-regulated in Transcription
  misc_feature: MA Experiment ID: 20000117 Result: Up-regulated in Transcription
  misc_feature: MA Experiment 20000117 PARAMETER Experiment Name: At_100uM_ABA_Mutants_cDNA_P Parameter: Plant Line Value: Columbia
  misc_feature: MA Experiment 20000117 PARAMETER Experiment Name: At_100uM_ABA_Mutants_cDNA_P Parameter: Timepoint (hr) Value: 6
  misc_feature: MA Experiment 20000117 PARAMETER Experiment Name: At_100uM_ABA_Mutants_cDNA_P Parameter: Tissue Value: Aerial
  misc_feature: MA Experiment 20000117 PARAMETER Experiment Name: At_100uM_ABA_Mutants_cDNA_P Parameter: Treatment Value: 100uM ABA vs. No Treatment
  misc_feature: MA Experiment ID: 20000315 Result: Down-regulated in Transcription
  misc_feature: MA Experiment 20000315 PARAMETER Experiment Name: At_14day_Shoots-Roots_Sub_P Parameter: Age (day) Value: 14
  misc_feature: MA Experiment 20000315 PARAMETER Experiment Name: At_14day_Shoots-Roots_Sub_P Parameter: Organism Value: A. thaliana
  misc_feature: MA Experiment 20000315 PARAMETER Experiment Name: At_14day_Shoots-Roots_Sub_P Parameter: Plant Line Value: WS
  misc_feature: MA Experiment 20000315 PARAMETER Experiment Name: At_14day_Shoots-Roots_Sub_P Parameter: Tissue Value: Shoots vs. Whole Plant
  misc_feature: MA Experiment ID: 20000328 Result: Down-regulated in Transcription
  misc_feature: MA Experiment 20000328 PARAMETER Experiment Name: At_42deg_Heat_Sub_P Parameter: Age (day) Value: 14
  misc_feature: MA Experiment 20000328 PARAMETER Experiment Name: At_42deg_Heat_Sub_P Parameter: Organism Value: A. thaliana
  misc_feature: MA Experiment 20000328 PARAMETER Experiment Name: At_42deg_Heat_Sub_P Parameter: Plant Line Value: WS
  misc_feature: MA Experiment 20000328 PARAMETER Experiment Name: At_42deg_Heat_Sub_P Parameter: Temperature (deg C) Value: 42 vs. 22
  misc_feature: MA Experiment 20000328 PARAMETER Experiment Name: At_42deg_Heat_Sub_P Parameter: Timepoint (hr) Value: 6
  misc_feature: MA Experiment 20000328 PARAMETER Experiment Name: At_42deg_Heat_Sub_P Parameter: Tissue Value: Aerial
  misc_feature: MA Experiment ID: 20000329 Result: Down-regulated in Transcription
  misc_feature: MA Experiment 20000329 PARAMETER Experiment Name: At_4deg_Cold_Sub_P Parameter: Age (day) Value: 14
  misc_feature: MA Experiment 20000329 PARAMETER Experiment Name: At_4deg_Cold_Sub_P Parameter: Organism Value: A. thaliana
  misc_feature: MA Experiment 20000329 PARAMETER Experiment Name: At_4deg_Cold_Sub_P Parameter: Plant Line Value: WS
  misc_feature: MA Experiment 20000329 PARAMETER Experiment Name: At_4deg_Cold_Sub_P Parameter: Temperature (deg C) Value: 4 vs. 22
  misc_feature: MA Experiment 20000329 PARAMETER Experiment Name: At_4deg_Cold_Sub_P Parameter: Timepoint (hr) Value: 6
  misc_feature: MA Experiment 20000329 PARAMETER Experiment Name: At_4deg_Cold_Sub_P Parameter: Tissue Value: Aerial
ttttttttcggttttcacggtaaggctcggaggaaaacctaattcgtccggagaatctccacctcactctcgccaaacgcatctctgttgtagcttgtgatggatccaacacagaacacaagtgcagggattggtgggagcaatggtacaatcagatatcaaaccaatgatgggacttcaactgtgaccgttgctgatgattcaaaggagaatctttcccaagtcataaactctattgagaaaactttaggagtccttcatcagttacaccttaccgtcacttctttcacacccgcgtctcaactccatctcctccagcgccttaactctcttgtgatggagctagataacatgactaagttgtctgagaaatgcaacattcaaatccccatggaggttcttaacttgattgatgatgggaagaacccggatgagtttacgaaagatgttcttaatagctgcatagctagaaatcaagttactaagggcaagactgatgcttttaaggatttgagaaaacatattctggaggagcttgaacagacttttcctgatgaagtcgatatgtatagagaaatccgtgctagttctgctgctgaagcgaaacggttggcgcaatcgcaaagtgtgttaccaaatggggatgcaaaggtcaagaatgagctataagagccaagtttcctttttatctttaccttgtagaatataatgactgagtcgatgaatgtgatgtaacacgaacaatcccaagtgtaatttctaataatatctgttggttctcttc

SEQ ID NO: 21425 - protein, 189 aa, Arabidopsis thaliana
  peptide (1)..(189): Ceres Seq. ID no. 13509917
  misc_feature (45)..(181): Homolog of NCBI NO: 29841376 NR Description: similar to GenBank Accession Number BC003353
  misc_feature (39)..(164): Homolog of NCBI NO: 24665095 NR Description: CG5057-PA [Drosophila melanogaster]
  misc_feature (39)..(164): Homolog of NCBI NO: 9799628 NR Description: Nut2 [Drosophila melanogaster]
  misc_feature (37)..(161): Homolog of NCBI NO: 13097162 NR Description: Similar to CG5057 gene product [Homo sapiens]
  misc_feature (37)..(161): Homolog of NCBI NO: 29145113 NR Description: similar to DNA segment, Chr 13, Wayne State
  misc_feature (37)..(161): Homolog of NCBI NO: 20070410 NR Description: DNA segment, Chr 13, Wayne State University 50,
  misc_feature (13)..(161): Homolog of NCBI NO: 34873422 NR Description: similar to DNA segment, Chr 13, Wayne State
  misc_feature (1)..(189): Homolog of NCBI NO: 15238215 NR Description: expressed protein [Arabidopsis thaliana]
  misc_feature (1)..(166): Homolog of NCBI NO: 25403266 NR Description: protein T24P13.4 [imported] - Arabidopsis
  misc_feature (1)..(189): Homolog of NCBI NO: 18396004 NR Description: expressed protein [Arabidopsis thaliana]
MDPTQNTSAGIGGSNGTIRYQTNDGTSTVTVADDSKENLSQVINSIEKTLGVLHQLHLTVTSFTPASQLHLLQRLNSLVMELDNMTKLSEKCNIQIPMEVLNLIDDGKNPDEFTKDVLNSCIARNQVTKGKTDAFKDLRKHILEELEQTFPDEVDMYREIRASSAAEAKRLAQSQSVLPNGDAKVKNEL

SEQ ID NO: 21426 - protein, 110 aa, Arabidopsis thaliana
  peptide (1)..(110): Ceres Seq. ID no. 13509918
  misc_feature (1)..(82): Homolog of NCBI NO: 20070410 NR Description: DNA segment, Chr 13, Wayne State University 50,
  misc_feature (1)..(82): Homolog of NCBI NO: 34873422 NR Description: similar to DNA segment, Chr 13, Wayne State
  misc_feature (1)..(110): Homolog of NCBI NO: 15238215 NR Description: expressed protein [Arabidopsis thaliana]
  misc_feature (1)..(87): Homolog of NCBI NO: 25403266 NR Description: protein T24P13.4 [imported] - Arabidopsis
  misc_feature (1)..(110): Homolog of NCBI NO: 18396004 NR Description: expressed protein [Arabidopsis thaliana]
  misc_feature (1)..(102): Homolog of NCBI NO: 29841376 NR Description: similar to GenBank Accession Number BC003353
  misc_feature (1)..(85): Homolog of NCBI NO: 24665095 NR Description: CG5057-PA [Drosophila melanogaster]
  misc_feature (1)..(85): Homolog of NCBI NO: 9799628 NR Description: Nut2 [Drosophila melanogaster]
  misc_feature (1)..(82): Homolog of NCBI NO: 13097162 NR Description: Similar to CG5057 gene product [Homo sapiens]
  misc_feature (1)..(82): Homolog of NCBI NO: 29145113 NR Description: similar to DNA segment, Chr 13, Wayne State
MELDNMTKLSEKCNIQIPMEVLNLIDDGKNPDEFTKDVLNSCIARNQVTKGKTDAFKDLRKHILEELEQTFPDEVDMYREIRASSAAEAKRLAQSQSVLPNGDAKVKNEL

SEQ ID NO: 21427 - protein, 105 aa, Arabidopsis thaliana
  peptide (1)..(105): Ceres Seq. ID no. 13509919
  misc_feature (1)..(97): Homolog of NCBI NO: 29841376 NR Description: similar to GenBank Accession Number BC003353
  misc_feature (1)..(80): Homolog of NCBI NO: 24665095 NR Description: CG5057-PA [Drosophila melanogaster]
  misc_feature (1)..(80): Homolog of NCBI NO: 9799628 NR Description: Nut2 [Drosophila melanogaster]
  misc_feature (1)..(77): Homolog of NCBI NO: 13097162 NR Description: Similar to CG5057 gene product [Homo sapiens]
  misc_feature (1)..(77): Homolog of NCBI NO: 29145113 NR Description: similar to DNA segment, Chr 13, Wayne State
  misc_feature (1)..(77): Homolog of NCBI NO: 20070410 NR Description: DNA segment, Chr 13, Wayne State University 50,
  misc_feature (1)..(77): Homolog of NCBI NO: 34873422 NR Description: similar to DNA segment, Chr 13, Wayne State
  misc_feature (1)..(105): Homolog of NCBI NO: 15238215 NR Description: expressed protein [Arabidopsis thaliana]
  misc_feature (1)..(82): Homolog of NCBI NO: 25403266 NR Description: protein T24P13.4 [imported] - Arabidopsis
  misc_feature (1)..(105): Homolog of NCBI NO: 18396004 NR Description: expressed protein [Arabidopsis thaliana]
MTKLSEKCNIQIPMEVLNLIDDGKNPDEFTKDVLNSCIARNQVTKGKTDAFKDLRKHILEELEQTFPDEVDMYREIRASSAAEAKRLAQSQSVLPNGDAKVKNEL

SEQ ID NO: 21428 - DNA, 729 bp, Arabidopsis thaliana
  misc_feature (1)..(729): Ceres Seq. ID no. 12393366
  misc_feature: MA Experiment ID: 108434 Result: Up-regulated in Transcription
  misc_feature: MA Experiment 108434 PARAMETER Experiment Name: At_Root_Tips_cDNA_P Parameter: Tissue Value: Root Tips
  misc_feature: MA Experiment ID: 108461 Result: Down-regulated in Transcription
  misc_feature: MA Experiment 108461 PARAMETER Experiment Name: At_Germinating_Seeds_cDNA_P Parameter: Age (day) Value: 1 vs. 0
  misc_feature: MA Experiment 108461 PARAMETER Experiment Name: At_Germinating_Seeds_cDNA_P Parameter: Tissue Value: Germinating Seeds
  misc_feature: MA Experiment ID: 108462 Result: Down-regulated in Transcription
  misc_feature: MA Experiment 108462 PARAMETER Experiment Name: At_Germinating_Seeds_cDNA_P Parameter: Age (day) Value: 2 vs. 0
  misc_feature: MA Experiment 108462 PARAMETER Experiment Name: At_Germinating_Seeds_cDNA_P Parameter: Tissue Value: Germinating Seeds
  misc_feature: MA Experiment ID: 108463 Result: Down-regulated in Transcription
  misc_feature: MA Experiment 108463 PARAMETER Experiment Name: At_Germinating_Seeds_cDNA_P Parameter: Age (day) Value: 3 vs. 0
  misc_feature: MA Experiment 108463 PARAMETER Experiment Name: At_Germinating_Seeds_cDNA_P Parameter: Tissue Value: Germinating Seeds
  misc_feature: MA Experiment ID: 108573 Result: Down-regulated in Transcription
  misc_feature: MA Experiment 108573 PARAMETER Experiment Name: At_Drought_cDNA_P Parameter: Timepoint (hr) Value: 6
  misc_feature: MA Experiment 108573 PARAMETER Experiment Name: At_Drought_cDNA_P Parameter: Tissue Value: Aerial
  misc_feature: MA Experiment 108573 PARAMETER Experiment Name: At_Drought_cDNA_P Parameter: Treatment Value: Drought vs. No Drought
  misc_feature: MA Experiment ID: 20000179 Result: Down-regulated in Transcription
  misc_feature: MA Experiment 20000179 PARAMETER Experiment Name: At_Germinating_Seeds_P Parameter: Age (hr) Value: 6 vs. 0
  misc_feature: MA Experiment 20000179 PARAMETER Experiment Name: At_Germinating_Seeds_P Parameter: Tissue Value: Germinating Seeds
  misc_feature: MA Experiment ID: 20000227 Result: Up-regulated in Transcription
  misc_feature: MA Experiment 20000227 PARAMETER Experiment Name: At_Root-Tips-vs-Tops_P Parameter: Tissue Value: Root Tips vs. Root Tops
aactctaagtttttctttcttctttctctgctctcaaagctcaagagaactctatccttattaacttacaaggataactaaaaccggtgtaatcacgatcatagtagaagatgggcggtcccggatcatcaccatgtgcttcgtgtaagcttcttcgacgacgatgtgcaaaagattgcatcttagcaccttattttcctcctgacgatcctcacaaattcgccattgttcataaggtctttggtgccagcaacgtcagcaaaatgttgcaggagctaccagttcatcaaagagctgacgcggtgaatagtctggtttttgaagcaaacgcaagagtaagagatccggtctacggctgcgtaggagcaatctcctacttacaaaaccaagtctcgcagcttcagatgcaactagcagtggctcaagccgagattctttgcattcagatgcaaaatgagccaaccttacagtctcatcatcaagtacttgaactagaccaagaccacaaagctctcttactaaacaacaacaacatcaataactgcaacaccaacaacaacaataacaactttggttatgccatgtcttctggacagttcaactctaactttgcctcaccaagcagcataatgcaaatgcagatgcaaatgcaaatgcaagaccctcttaagcaagaatctctttggacttaatgtaataataataataattaatgttcgacaagtttgc

SEQ ID NO: 21429 - protein, 193 aa, Arabidopsis thaliana
  peptide (1)..(193): Ceres Seq. ID no. 12393367
  misc_feature (4)..(109): Homolog of NCBI NO: 34896184 NR Description: contains ESTs C98868(E3203),C98869(E3203)~similar
  misc_feature (7)..(112): Homolog of NCBI NO: 15219279 NR Description: hypothetical protein; protein id: At1g16530.1
  misc_feature (2)..(109): Homolog of NCBI NO: 21618113 NR Description: LOB DOMAIN 13 [Arabidopsis thaliana]
  misc_feature (2)..(109): Homolog of NCBI NO: 18405401 NR Description: expressed protein
  misc_feature (6)..(108): Homolog of NCBI NO: 15242624 NR Description: putative protein
  misc_feature (7)..(120): Homolog of NCBI NO: 15226404 NR Description: hypothetical protein; protein id: At2g28500.1
  misc_feature (7)..(153): Homolog of NCBI NO: 15223050 NR Description: unknown protein; protein id: At1g07900.1
  misc_feature (6)..(122): Homolog of NCBI NO: 15221679 NR Description: hypothetical protein; protein id: At1g31320.1
  misc_feature (1)..(193): Homolog of NCBI NO: 18402268 NR Description: expressed protein
  misc_feature (1)..(193): Homolog of NCBI NO: 21592574 NR Description: unknown [Arabidopsis thaliana]
MGGPGSSPCASCKLLRRRCAKDCILAPYFPPDDPHKFAIVHKVFGASNVSKMLQELPVHQRADAVNSLVFEANARVRDPVYGCVGAISYLQNQVSQLQMQLAVAQAEILCIQMQNEPTLQSHHQVLELDQDHKALLLNNNNINNCNTNNNNNNFGYAMSSGQFNSNFASPSSIMQMQMQMQMQDPLKQESLWT

SEQ ID NO: 21430 - protein, 142 aa, Arabidopsis thaliana
  peptide (1)..(142): Ceres Seq. ID no. 12393368
  misc_feature (1)..(58): Homolog of NCBI NO: 34896184 NR Description: contains ESTs C98868(E3203),C98869(E3203)~similar
  misc_feature (1)..(61): Homolog of NCBI NO: 15219279 NR Description: hypothetical protein; protein id: At1g16530.1
  misc_feature (1)..(58): Homolog of NCBI NO: 21618113 NR Description: LOB DOMAIN 13 [Arabidopsis thaliana]
  misc_feature (1)..(58): Homolog of NCBI NO: 18405401 NR Description: expressed protein
  misc_feature (1)..(57): Homolog of NCBI NO: 15242624 NR Description: putative protein
  misc_feature (1)..(69): Homolog of NCBI NO: 15226404 NR Description: hypothetical protein; protein id: At2g28500.1
  misc_feature (1)..(102): Homolog of NCBI NO: 15223050 NR Description: unknown protein; protein id: At1g07900.1
  misc_feature (1)..(71): Homolog of NCBI NO: 15221679 NR Description: hypothetical protein; protein id: At1g31320.1
  misc_feature (1)..(142): Homolog of NCBI NO: 18402268 NR Description: expressed protein
  misc_feature (1)..(142): Homolog of NCBI NO: 21592574 NR Description: unknown [Arabidopsis thaliana]
MLQELPVHQRADAVNSLVFEANARVRDPVYGCVGAISYLQNQVSQLQMQLAVAQAEILCIQMQNEPTLQSHHQVLELDQDHKALLLNNNNINNCNTNNNNNNFGYAMSSGQFNSNFASPSSIMQMQMQMQMQDPLKQESLWT

SEQ ID NO: 21431 - DNA, 1161 bp, Arabidopsis thaliana
  misc_feature (1)..(1161): Ceres Seq. ID no. 12333859
  misc_feature: MA Experiment ID: 108434 Result: Down-regulated in Transcription
  misc_feature: MA Experiment 108434 PARAMETER Experiment Name: At_Root_Tips_cDNA_P Parameter: Tissue Value: Root Tips
  misc_feature: MA Experiment ID: 108488 Result: Down-regulated in Transcription
  misc_feature: MA Experiment ID: 20000224 Result: Down-regulated in Transcription
  misc_feature: MA Experiment ID: 20000268 Result: Down-regulated in Transcription
  misc_feature: MA Experiment 20000268 PARAMETER Experiment Name: At_100mM_NaCl__P Parameter: Age (day) Value: 14
  misc_feature: MA Experiment 20000268 PARAMETER Experiment Name: At_100mM_NaCl__P Parameter: Organism Value: A. thaliana
  misc_feature: MA Experiment 20000268 PARAMETER Experiment Name: At_100mM_NaCl__P Parameter: Plant Line Value: WS
  misc_feature: MA Experiment 20000268 PARAMETER Experiment Name: At_100mM_NaCl__P Parameter: Timepoint (hr) Value: 6
  misc_feature: MA Experiment 20000268 PARAMETER Experiment Name: At_100mM_NaCl__P Parameter: Tissue Value: Whole Plant
  misc_feature: MA Experiment 20000268 PARAMETER Experiment Name: At_100mM_NaCl__P Parameter: Treatment Value: 100mM NaCl vs. No Treatment
aaaaaaggataagcttggtgttactttatcgccttctttcgtttggcctttgatcctatcataagctttttttcgtttatcaatcttctcgattcagccacaattcttgtttctcagataattcatctcctttctttgattcgtttccttctcttctgtcactcagatctagatctagatctaggtttttttctttctcatcggaaatttgacttagaggcttgttttgatctagggtttggtctttgggaattttgaaaaaaaaaacaaaattaggaatgaatctatgagctactcaatcctgtttcgtcggattcgtattctacactctttctccgtcgtttacctctactacacctacgttttctcatgaagtaatcgttctcgatctcagttttcgtttttgatctaacttattctttgatagatttagaaatcggggattttcagattgtgtctttgagaggtttttataggaaaatatctctagaagaagaagaagaatattatattgattttaattttggtgagaagaagtcaaaaagtcaacgagaaatggggtcgttgcaaatgcaaacaagtcctgaatccgataatgatccgaggtacgccacggtgacggatgagaggaagaggaagagaatgatctctaacagagaatctgctcggaggtcaaggatgaggaaacagaagcaacttggtgatttgatcaacgaagtcactcttctcaagaatgataacgctaaaatcaccgaacaggttgatgaagcttcaaagaaatacattgaaatggagtctaagaacaatgtcttgagggcacaggcttcggagttgacggataggttaagatcattgaactctgtgcttgagatggttgaagagattagtggtcaggctttggatattcctgagattcctgaatctatgcagaacccttggcagatgccttgtccaatgcaaccaatcagagcttctgctgacatgtttgattgctgaagatggatgattcatatctgaaggatcaaaaatgaagcattgagatcgagtctttggtctgttttacttactgtccttgttgtaacaattagtgtgtcattggtgaattgagtcttgtgttgtcaatggacaacgcaatctttatgcaatttcaatttgttcgtg

SEQ ID NO: 21432 - protein, 146 aa, Arabidopsis thaliana
  peptide (1)..(146): Ceres Seq. ID no. 12333860
  misc_feature (21)..(85): Pfam Name: bZIP transcription factor Pfam Description: bZIP transcription factor
  misc_feature (12)..(141): Homolog of NCBI NO: 40019253 NR Description: ocs-element binding factor 1 [Secale cereale]
  misc_feature (1)..(143): Homolog of NCBI NO: 3986151 NR Description: rdLIP [Raphanus sativus]
  misc_feature (1)..(146): Homolog of NCBI NO: 7489297 NR Description: DNA-binding protein bZIP-1 - garden snapdragon
  misc_feature (1)..(144): Homolog of NCBI NO: 5901747 NR Description: bZIP DNA-binding protein [Lycopersicon esculentum]
  misc_feature (1)..(143): Homolog of NCBI NO: 7489118 NR Description: DNA-binding protein tbz17 - common tobacco
  misc_feature (7)..(144): Homolog of NCBI NO: 7489298 NR Description: DNA-binding protein bZIP-2 - garden snapdragon
  misc_feature (1)..(144): Homolog of NCBI NO: 16580132 NR Description: bZIP transcription factor BZI-3 [Nicotiana
  misc_feature (1)..(144): Homolog of NCBI NO: 10241920 NR Description: TBZF [Nicotiana tabacum]
  misc_feature (5)..(144): Homolog of NCBI NO: 9650826 NR Description: common plant regulatory factor 6 [Petroselinum
  misc_feature (1)..(146): Homolog of NCBI NO: 15228754 NR Description: bZIP family transcription factor
MGSLQMQTSPESDNDPRYATVTDERKRKRMISNRESARRSRMRKQKQLGDLINEVTLLKNDNAKITEQVDEASKKYIEMESKNNVLRAQASELTDRLRSLNSVLEMVEEISGQALDIPEIPESMQNPWQMPCPMQPIRASADMFDC

SEQ ID NO: 21433 - protein, 141 aa, Arabidopsis thaliana
  peptide (1)..(141): Ceres Seq. ID no. 12333861
  misc_feature (16)..(80): Pfam Name: bZIP transcription factor Pfam Description: bZIP transcription factor
  misc_feature (7)..(136): Homolog of NCBI NO: 40019253 NR Description: ocs-element binding factor 1 [Secale cereale]
  misc_feature (1)..(138): Homolog of NCBI NO: 3986151 NR Description: rdLIP [Raphanus sativus]
  misc_feature (1)..(141): Homolog of NCBI NO: 7489297 NR Description: DNA-binding protein bZIP-1 - garden snapdragon
  misc_feature (1)..(139): Homolog of NCBI NO: 5901747 NR Description: bZIP DNA-binding protein [Lycopersicon esculentum]
  misc_feature (1)..(138): Homolog of NCBI NO: 7489118 NR Description: DNA-binding protein tbz17 - common tobacco
  misc_feature (2)..(139): Homolog of NCBI NO: 7489298 NR Description: DNA-binding protein bZIP-2 - garden snapdragon
  misc_feature (1)..(139): Homolog of NCBI NO: 16580132 NR Description: bZIP transcription factor BZI-3 [Nicotiana
  misc_feature (1)..(139): Homolog of NCBI NO: 10241920 NR Description: TBZF [Nicotiana tabacum]
  misc_feature (1)..(139): Homolog of NCBI NO: 9650826 NR Description: common plant regulatory factor 6 [Petroselinum
  misc_feature (1)..(141): Homolog of NCBI NO: 15228754 NR Description: bZIP family transcription factor
MQTSPESDNDPRYATVTDERKRKRMISNRESARRSRMRKQKQLGDLINEVTLLKNDNAKITEQVDEASKKYIEMESKNNVLRAQASELTDRLRSLNSVLEMVEEISGQALDIPEIPESMQNPWQMPCPMQPIRASADMFDC

SEQ ID NO: 21434 - protein, 117 aa, Arabidopsis thaliana
  peptide (1)..(117): Ceres Seq. ID no. 12333862
  misc_feature (1)..(56): Pfam Name: bZIP transcription factor Pfam Description: bZIP transcription factor
  misc_feature (1)..(112): Homolog of NCBI NO: 40019253 NR Description: ocs-element binding factor 1 [Secale cereale]
  misc_feature (1)..(114): Homolog of NCBI NO: 3986151 NR Description: rdLIP [Raphanus sativus]
  misc_feature (1)..(117): Homolog of NCBI NO: 7489297 NR Description: DNA-binding protein bZIP-1 - garden snapdragon
  misc_feature (1)..(115): Homolog of NCBI NO: 5901747 NR Description: bZIP DNA-binding protein [Lycopersicon esculentum]
  misc_feature (1)..(114): Homolog of NCBI NO: 7489118 NR Description: DNA-binding protein tbz17 - common tobacco
  misc_feature (1)..(115): Homolog of NCBI NO: 7489298 NR Description: DNA-binding protein bZIP-2 - garden snapdragon
  misc_feature (1)..(115): Homolog of NCBI NO: 16580132 NR Description: bZIP transcription factor BZI-3 [Nicotiana
  misc_feature (1)..(115): Homolog of NCBI NO: 10241920 NR Description: TBZF [Nicotiana tabacum]
  misc_feature (1)..(115): Homolog of NCBI NO: 9650826 NR Description: common plant regulatory factor 6 [Petroselinum
  misc_feature (1)..(117): Homolog of NCBI NO: 15228754 NR Description: bZIP family transcription factor
MISNRESARRSRMRKQKQLGDLINEVTLLKNDNAKITEQVDEASKKYIEMESKNNVLRAQASELTDRLRSLNSVLEMVEEISGQALDIPEIPESMQNPWQMPCPMQPIRASADMFDC

SEQ ID NO: 21435 - DNA, 1853 bp, Arabidopsis thaliana
  misc_feature (1)..(1853): Ceres Seq. ID no. 12343429
  misc_feature: MA Experiment ID: 108573 Result: Up-regulated in Transcription
  misc_feature: MA Experiment 108573 PARAMETER Experiment Name: At_Drought_cDNA_P Parameter: Timepoint (hr) Value: 6
  misc_feature: MA Experiment 108573 PARAMETER Experiment Name: At_Drought_cDNA_P Parameter: Tissue Value: Aerial
  misc_feature: MA Experiment 108573 PARAMETER Experiment Name: At_Drought_cDNA_P Parameter: Treatment Value: Drought vs. No Drought
  misc_feature: MA Experiment ID: 108607 Result: Down-regulated in Transcription
  misc_feature: MA Experiment 108607 PARAMETER Experiment Name: At_100uM_ABA_cDNA_P Parameter: Timepoint (hr) Value: 4
  misc_feature: MA Experiment 108607 PARAMETER Experiment Name: At_100uM_ABA_cDNA_P Parameter: Tissue Value: Aerial
  misc_feature: MA Experiment 108607 PARAMETER Experiment Name: At_100uM_ABA_cDNA_P Parameter: Treatment Value: 100uM ABA vs. No Treatment
  misc_feature: MA Experiment ID: 20000087 Result: Down-regulated in Transcription
  misc_feature: MA Experiment 20000087 PARAMETER Experiment Name: At_100uM_ABA_Mutants_cDNA_P Parameter: Plant Line Value: WS
  misc_feature: MA Experiment 20000087 PARAMETER Experiment Name: At_100uM_ABA_Mutants_cDNA_P Parameter: Timepoint (hr) Value: 6
  misc_feature: MA Experiment 20000087 PARAMETER Experiment Name: At_100uM_ABA_Mutants_cDNA_P Parameter: Tissue Value: Aerial
  misc_feature: MA Experiment 20000087 PARAMETER Experiment Name: At_100uM_ABA_Mutants_cDNA_P Parameter: Treatment Value: 100uM ABA vs. No Treatment
  misc_feature: MA Experiment ID: 20000111 Result: Up-regulated in Transcription
  misc_feature: MA Experiment 20000111 PARAMETER Experiment Name: At_42deg_Heat_cDNA_P Parameter: Temperature (deg C) Value: 42 vs. 22
  misc_feature: MA Experiment 20000111 PARAMETER Experiment Name: At_42deg_Heat_cDNA_P Parameter: Timepoint (hr) Value: 6
  misc_feature: MA Experiment 20000111 PARAMETER Experiment Name: At_42deg_Heat_cDNA_P Parameter: Tissue Value: Aerial
  misc_feature: MA Experiment ID: 20001557 Result: Up-regulated in Transcription
  misc_feature: MA Experiment 20001557 PARAMETER Experiment Name: At_Drought_Soil_Dry_P Parameter: Age (day) Value: 27
  misc_feature: MA Experiment 20001557 PARAMETER Experiment Name: At_Drought_Soil_Dry_P Parameter: Organism Value: A. thaliana
  misc_feature: MA Experiment 20001557 PARAMETER Experiment Name: At_Drought_Soil_Dry_P Parameter: Plant Line Value: WS
  misc_feature: MA Experiment 20001557 PARAMETER Experiment Name: At_Drought_Soil_Dry_P Parameter: Post Timepoint (hr) Value: 3
  misc_feature: MA Experiment 20001557 PARAMETER Experiment Name: At_Drought_Soil_Dry_P Parameter: Post-Treatment Value: Re-Water vs. No Drought
  misc_feature: MA Experiment 20001557 PARAMETER Experiment Name: At_Drought_Soil_Dry_P Parameter: Timepoint (day) Value: 13
  misc_feature: MA Experiment 20001557 PARAMETER Experiment Name: At_Drought_Soil_Dry_P Parameter: Treatment Value: Drought vs. No Drought
attccttgcttcatttttcgtcaccctagccgctttactctcttgcgatatctctgaggtaattctggagcagcataaacaatcaattgattcattcttcttgataccaagttgtggaaactctaggattgtttgctgtatatctccagaattgctgttttgattgaatttaggtcgcttagctcagttgatagagcaccacattttttgtggtagaaatcgatttgtttgacagtctctaaccatgggtaaagagaattttcacatcaacattgtggtcattggccacgtcgattctggaaagtcgaccaccactggacacttgatctacaagttgggtggtattgacaagcgtgtcattgagaggttcgagaaggaggctgctgagatgaacaagaggtccttcaagtacgcatgggttttggacaaacttaaggctgagcgtgagcgtggtatcaccattgacattgctctctggaagttcgagaccaccaagtactactgcactgtcattgatgctcctggccatcgtgatttcatcaagaacatgatcactggtacctcccaggctgattgtgctgtccttatcatcgactccaccactggtggttttgaggctggtatctccaaggatggtcagacccgtgagcacgctctccttgctttcacccttggtgtcaaacagatgatctgctgttgtaacaagatggatgccactacccccaagtactccaaggccaggtacgatgaaattatcaaggaggtgtcttcctacttgaagaaggttggttacaaccccgacaaaatcccatttgtgcccatctctggattcgagggtgacaacatgattgagaggtccaccaacctagactggtacaagggaccaactcttcttgaggctcttgaccagatcaacgagcccaagaggccatcagacaagccccttcgtctcccacttcaggatgtctacaagattggtggtattggaacggtgccagtgggacgtgttgagactggtatgatcaagcctggtatggttgtgacctttgctcccacagggttgaccactgaggtcaagtctgttgagatgcaccacgagtctcttcttgaggcacttccaggtgacaacgttgggttcaatgttaagaatgttgctgtcaaggatcttaagagagggtacgtcgcatccaactccaaggatgaccctgccaagggtgctgctaacttcacctcccaggtcatcatcatgaaccaccctggtcagattggtaacggttacgccccagtcctggattgccacacctctcacattgcagtcaagttctctgagatcttgaccaagattgacaggcgttctggtaaggagattgagaaggagcccaagttcttgaagaatggtgatgctggtatggtgaagatgactccaaccaagcccatggttgtggagaccttctctgagtacccaccacttggacgtttcgctgtgagggacatgaggcagactgttgcagtcggtgttatcaagagtgttgacaagaaggacccaaccggagccaaggttaccaaggctgccgtcaagaagggtgcgaagtgaaccatcctcaaaactctatctgccgcaggtgaatcaaaggacagtgttagttttattacaatagtttggtatttggtcgcgtgtctgtgttcttgtttcgttttctccccgtcagagcgttgttctcgtaattgggttcttgatcggaggtggcggatctacacacacattcttcctgttttttgctttttatttgttttctcattttgaactgtttaaaatttctgttatatgaatgaatgttttccctgcggttatt

SEQ ID NO: 21436 - protein, 449 aa, Arabidopsis thaliana
  peptide (1)..(449): Ceres Seq. ID no. 12343430
  misc_feature (6)..(227): Pfam Name: Elongation factor Tu GTP binding domain Pfam Description: Elongation factor Tu GTP binding domain
  misc_feature (1)..(449): Homolog of NCBI NO: 15081765 NR Description: At1g07930/T6D22_3 [Arabidopsis thaliana]
  misc_feature (1)..(449): Homolog of NCBI NO: 17064954 NR Description: putative elongation factor 1-a [Arabidopsis
  misc_feature (1)..(449): Homolog of NCBI NO: 18086389 NR Description: At1g07930/T6D22_3 [Arabidopsis thaliana]
  misc_feature (1)..(449): Homolog of NCBI NO: 23397097 NR Description: putative translation elongation factor eEF-1
  misc_feature (1)..(449): Homolog of NCBI NO: 13430510 NR Description: putative translation elongation factor eEF-1
  misc_feature (1)..(449): Homolog of NCBI NO: 13605682 NR Description: At1g07930/T6D22_3 [Arabidopsis thaliana]
  misc_feature (1)..(449): Homolog of NCBI NO: 99688 NR Description: translation elongation factor eEF-1 alpha chain
  misc_feature (1)..(449): Homolog of NCBI NO: 15239308 NR Description: elongation factor 1-alpha (EF-1-alpha)
  misc_feature (1)..(449): Homolog of NCBI NO: 25407012 NR Description: protein T6D22.2 [imported] - Arabidopsis thaliana
  misc_feature (1)..(449): Homolog of NCBI NO: 25407012 NR Description: protein T6D22.2 [imported] - Arabidopsis thaliana
MGKENFHINIVVIGHVDSGKSTTTGHLIYKLGGIDKRVIERFEKEAAEMNKRSFKYAWVLDKLKAERERGITIDIALWKFETTKYYCTVIDAPGHRDFIKNMITGTSQADCAVLIIDSTTGGFEAGISKDGQTREHALLAFTLGVKQMICCCNKMDATTPKYSKARYDEIIKEVSSYLKKVGYNPDKIPFVPISGFEGDNMIERSTNLDWYKGPTLLEALDQINEPKRPSDKPLRLPLQDVYKIGGIGTVPVGRVETGMIKPGMVVTFAPTGLTTEVKSVEMHHESLLEALPGDNVGFNVKNVAVKDLKRGYVASNSKDDPAKGAANFTSQVIIMNHPGQIGNGYAPVLDCHTSHIAVKFSEILTKIDRRSGKEIEKEPKFLKNGDAGMVKMTPTKPMVVETFSEYPPLGRFAVRDMRQTVAVGVIKSVDKKDPTGAKVTKAAVKKGAK

SEQ ID NO: 21437 - protein, 401 aa, Arabidopsis thaliana
  peptide (1)..(401): Ceres Seq. ID no. 12343431
  misc_feature (1)..(179): Pfam Name: Elongation factor Tu GTP binding domain Pfam Description: Elongation factor Tu GTP binding domain
  misc_feature (1)..(401): Homolog of NCBI NO: 15081765 NR Description: At1g07930/T6D22_3 [Arabidopsis thaliana]
  misc_feature (1)..(401): Homolog of NCBI NO: 17064954 NR Description: putative elongation factor 1-a [Arabidopsis
  misc_feature (1)..(401): Homolog of NCBI NO: 18086389 NR Description: At1g07930/T6D22_3 [Arabidopsis thaliana]
  misc_feature (1)..(401): Homolog of NCBI NO: 23397097 NR Description: putative translation elongation factor eEF-1
  misc_feature (1)..(401): Homolog of NCBI NO: 13430510 NR Description: putative translation elongation factor eEF-1
  misc_feature (1)..(401): Homolog of NCBI NO: 13605682 NR Description: At1g07930/T6D22_3 [Arabidopsis thaliana]
  misc_feature (1)..(401): Homolog of NCBI NO: 99688 NR Description: translation elongation factor eEF-1 alpha chain
  misc_feature (1)..(401): Homolog of NCBI NO: 15239308 NR Description: elongation factor 1-alpha (EF-1-alpha)
  misc_feature (1)..(401): Homolog of NCBI NO: 25407012 NR Description: protein T6D22.2 [imported] - Arabidopsis thaliana
  misc_feature (1)..(401): Homolog of NCBI NO: 25407012 NR Description: protein T6D22.2 [imported] - Arabidopsis thaliana
MNKRSFKYAWVLDKLKAERERGITIDIALWKFETTKYYCTVIDAPGHRDFIKNMITGTSQADCAVLIIDSTTGGFEAGISKDGQTREHALLAFTLGVKQMICCCNKMDATTPKYSKARYDEIIKEVSSYLKKVGYNPDKIPFVPISGFEGDNMIERSTNLDWYKGPTLLEALDQINEPKRPSDKPLRLPLQDVYKIGGIGTVPVGRVETGMIKPGMVVTFAPTGLTTEVKSVEMHHESLLEALPGDNVGFNVKNVAVKDLKRGYVASNSKDDPAKGAANFTSQVIIMNHPGQIGNGYAPVLDCHTSHIAVKFSEILTKIDRRSGKEIEKEPKFLKNGDAGMVKMTPTKPMVVETFSEYPPLGRFAVRDMRQTVAVGVIKSVDKKDPTGAKVTKAAVKKGAK

SEQ ID NO: 21438 - protein, 348 aa, Arabidopsis thaliana
  peptide (1)..(348): Ceres Seq. ID no. 12343432
  misc_feature (1)..(126): Pfam Name: Elongation factor Tu GTP binding domain Pfam Description: Elongation factor Tu GTP binding domain
  misc_feature (1)..(348): Homolog of NCBI NO: 99688 NR Description: translation elongation factor eEF-1 alpha chain
  misc_feature (1)..(348): Homolog of NCBI NO: 15239308 NR Description: elongation factor 1-alpha (EF-1-alpha)
  misc_feature (1)..(348): Homolog of NCBI NO: 15081765 NR Description: At1g07930/T6D22_3 [Arabidopsis thaliana]
  misc_feature (1)..(348): Homolog of NCBI NO: 18086389 NR Description: At1g07930/T6D22_3 [Arabidopsis thaliana]
  misc_feature (1)..(348): Homolog of NCBI NO: 13430510 NR Description: putative translation elongation factor eEF-1
  misc_feature (1)..(348): Homolog of NCBI NO: 13605682 NR Description: At1g07930/T6D22_3 [Arabidopsis thaliana]
  misc_feature (1)..(348): Homolog of NCBI NO: 23397097 NR Description: putative translation elongation factor eEF-1
  misc_feature (1)..(348): Homolog of NCBI NO: 17064954 NR Description: putative elongation factor 1-a [Arabidopsis
  misc_feature (1)..(348): Homolog of NCBI NO: 25407012 NR Description: protein T6D22.2 [imported] - Arabidopsis thaliana
  misc_feature (1)..(348): Homolog of NCBI NO: 25407012 NR Description: protein T6D22.2 [imported] - Arabidopsis thaliana
MITGTSQADCAVLIIDSTTGGFEAGISKDGQTREHALLAFTLGVKQMICCCNKMDATTPKYSKARYDEIIKEVSSYLKKVGYNPDKIPFVPISGFEGDNMIERSTNLDWYKGPTLLEALDQINEPKRPSDKPLRLPLQDVYKIGGIGTVPVGRVETGMIKPGMVVTFAPTGLTTEVKSVEMHHESLLEALPGDNVGFNVKNVAVKDLKRGYVASNSKDDPAKGAANFTSQVIIMNHPGQIGNGYAPVLDCHTSHIAVKFSEILTKIDRRSGKEIEKEPKFLKNGDAGMVKMTPTKPMVVETFSEYPPLGRFAVRDMRQTVAVGVIKSVDKKDPTGAKVTKAAVKKGAK

SEQ ID NO: 21439 - DNA, 851 bp, Arabidopsis thaliana
  misc_feature (1)..(851): Ceres Seq. ID no. 12385791
  misc_feature: MA Experiment ID: 108469 Result: Down-regulated in Transcription
  misc_feature: MA Experiment ID: 108572 Result: Down-regulated in Transcription
  misc_feature: MA Experiment 108572 PARAMETER Experiment Name: At_Drought_cDNA_P Parameter: Timepoint (hr) Value: 1
  misc_feature: MA Experiment 108572 PARAMETER Experiment Name: At_Drought_cDNA_P Parameter: Tissue Value: Aerial
  misc_feature: MA Experiment 108572 PARAMETER Experiment Name: At_Drought_cDNA_P Parameter: Treatment Value: Drought vs. No Drought
  misc_feature: MA Experiment ID: 108573 Result: Down-regulated in Transcription
  misc_feature: MA Experiment 108573 PARAMETER Experiment Name: At_Drought_cDNA_P Parameter: Timepoint (hr) Value: 6
  misc_feature: MA Experiment 108573 PARAMETER Experiment Name: At_Drought_cDNA_P Parameter: Tissue Value: Aerial
  misc_feature: MA Experiment 108573 PARAMETER Experiment Name: At_Drought_cDNA_P Parameter: Treatment Value: Drought vs. No Drought
  misc_feature: MA Experiment ID: 20000069 Result: Down-regulated in Transcription
  misc_feature: MA Experiment 20000069 PARAMETER Experiment Name: At_100uM_ABA_Mutants_cDNA_P Parameter: Plant Line Value: CS23
  misc_feature: MA Experiment 20000069 PARAMETER Experiment Name: At_100uM_ABA_Mutants_cDNA_P Parameter: Timepoint (hr) Value: 6
  misc_feature: MA Experiment 20000069 PARAMETER Experiment Name: At_100uM_ABA_Mutants_cDNA_P Parameter: Tissue Value: Aerial
  misc_feature: MA Experiment 20000069 PARAMETER Experiment Name: At_100uM_ABA_Mutants_cDNA_P Parameter: Treatment Value: 100uM ABA vs. No Treatment
  misc_feature: MA Experiment ID: 20000070 Result: Down-regulated in Transcription
  misc_feature: MA Experiment 20000070 PARAMETER Experiment Name: At_100uM_ABA_Mutants_cDNA_P Parameter: Plant Line Value: CS24
  misc_feature: MA Experiment 20000070 PARAMETER Experiment Name: At_100uM_ABA_Mutants_cDNA_P Parameter: Timepoint (hr) Value: 6
  misc_feature: MA Experiment 20000070 PARAMETER Experiment Name: At_100uM_ABA_Mutants_cDNA_P Parameter: Tissue Value: Aerial
  misc_feature: MA Experiment 20000070 PARAMETER Experiment Name: At_100uM_ABA_Mutants_cDNA_P Parameter: Treatment Value: 100uM ABA vs. No Treatment
  misc_feature: MA Experiment ID: 20000071 Result: Down-regulated in Transcription
  misc_feature: MA Experiment 20000071 PARAMETER Experiment Name: At_100uM_ABA_Mutants_cDNA_P Parameter: Plant Line Value: CS8104
  misc_feature: MA Experiment 20000071 PARAMETER Experiment Name: At_100uM_ABA_Mutants_cDNA_P Parameter: Timepoint (hr) Value: 6
  misc_feature: MA Experiment 20000071 PARAMETER Experiment Name: At_100uM_ABA_Mutants_cDNA_P Parameter: Tissue Value: Aerial
  misc_feature: MA Experiment 20000071 PARAMETER Experiment Name: At_100uM_ABA_Mutants_cDNA_P Parameter: Treatment Value: 100uM ABA vs. No Treatment
  misc_feature: MA Experiment ID: 20000089 Result: Down-regulated in Transcription
  misc_feature: MA Experiment ID: 20000111 Result: Up-regulated in Transcription
  misc_feature: MA Experiment 20000111 PARAMETER Experiment Name: At_42deg_Heat_cDNA_P Parameter: Temperature (deg C) Value: 42 vs. 22
  misc_feature: MA Experiment 20000111 PARAMETER Experiment Name: At_42deg_Heat_cDNA_P Parameter: Timepoint (hr) Value: 6
  misc_feature: MA Experiment 20000111 PARAMETER Experiment Name: At_42deg_Heat_cDNA_P Parameter: Tissue Value: Aerial
  misc_feature: MA Experiment ID: 20000173 Result: Up-regulated in Transcription
  misc_feature: MA Experiment 20000173 PARAMETER Experiment Name: At_42deg_Heat_P Parameter: Age (day) Value: 14
  misc_feature: MA Experiment 20000173 PARAMETER Experiment Name: At_42deg_Heat_P Parameter: Organism Value: A. thaliana
  misc_feature: MA Experiment 20000173 PARAMETER Experiment Name: At_42deg_Heat_P Parameter: Plant Line Value: WS
  misc_feature: MA Experiment 20000173 PARAMETER Experiment Name: At_42deg_Heat_P Parameter: Temperature (deg C) Value: 42 vs. 22
  misc_feature: MA Experiment 20000173 PARAMETER Experiment Name: At_42deg_Heat_P Parameter: Timepoint (hr) Value: 6
  misc_feature: MA Experiment 20000173 PARAMETER Experiment Name: At_42deg_Heat_P Parameter: Tissue Value: Aerial
  misc_feature: MA Experiment ID: 20000180 Result: Up-regulated in Transcription
  misc_feature: MA Experiment 20000180 PARAMETER Experiment Name: At_Germinating_Seeds_P Parameter: Age (hr) Value: 24 vs. 0
  misc_feature: MA Experiment 20000180 PARAMETER Experiment Name: At_Germinating_Seeds_P Parameter: Tissue Value: Germinating Seeds
  misc_feature: MA Experiment ID: 20000182 Result: Down-regulated in Transcription
  misc_feature: MA Experiment 20000182 PARAMETER Experiment Name: At_2mM_SA_P Parameter: Age (day) Value: 14
  misc_feature: MA Experiment 20000182 PARAMETER Experiment Name: At_2mM_SA_P Parameter: Organism Value: A. thaliana
  misc_feature: MA Experiment 20000182 PARAMETER Experiment Name: At_2mM_SA_P Parameter: Plant Line Value: WS
  misc_feature: MA Experiment 20000182 PARAMETER Experiment Name: At_2mM_SA_P Parameter: Timepoint (hr) Value: 6
  misc_feature: MA Experiment 20000182 PARAMETER Experiment Name: At_2mM_SA_P Parameter: Tissue Value: Aerial
  misc_feature: MA Experiment 20000182 PARAMETER Experiment Name: At_2mM_SA_P Parameter: Treatment Value: 2mM SA vs. No Treatment
  misc_feature: MA Experiment ID: 20000185 Result: Down-regulated in Transcription
  misc_feature: MA Experiment 20000185 PARAMETER Experiment Name: At_Roots__P Parameter: Age (day) Value: 7 vs. 21
  misc_feature: MA Experiment 20000185 PARAMETER Experiment Name: At_Roots__P Parameter: Organism Value: A. thaliana
  misc_feature: MA Experiment 20000185 PARAMETER Experiment Name: At_Roots__P Parameter: Tissue Value: Roots vs. Whole Plant
  misc_feature: MA Experiment ID: 20000224 Result: Up-regulated in Transcription
  misc_feature: MA Experiment ID: 20000227 Result: Down-regulated in Transcription
  misc_feature: MA Experiment 20000227 PARAMETER Experiment Name: At_Root-Tips-vs-Tops_P Parameter: Tissue Value: Root Tips vs. Root Tops
  misc_feature: MA Experiment ID: 20000234 Result: Up-regulated in Transcription
  misc_feature: MA Experiment 20000234 PARAMETER Experiment Name: At_Siliques_P Parameter: Age (day) Value: 21
  misc_feature: MA Experiment 20000234 PARAMETER Experiment Name: At_Siliques_P Parameter: Organism Value: A. thaliana
  misc_feature: MA Experiment 20000234 PARAMETER Experiment Name: At_Siliques_P Parameter: Plant Line Value: WS
  misc_feature: MA Experiment 20000234 PARAMETER Experiment Name: At_Siliques_P Parameter: Tissue Value: Less Than 5mm Siliques vs. Whole Plant
  misc_feature: MA Experiment ID: 20000264 Result: Up-regulated in Transcription
  misc_feature: MA Experiment 20000264 PARAMETER Experiment Name: At_Open_Flower_P Parameter: Age (day) Value: 21
  misc_feature: MA Experiment 20000264 PARAMETER Experiment Name: At_Open_Flower_P Parameter: Plant Line Value: WS
  misc_feature: MA Experiment 20000264 PARAMETER Experiment Name: At_Open_Flower_P Parameter: Tissue Value: Open Flower vs. Whole Plant
  misc_feature: MA Experiment ID: 20000265 Result: Up-regulated in Transcription
  misc_feature: MA Experiment 20000265 PARAMETER Experiment Name: At_Open_Flower_P Parameter: Age (day) Value: 21
  misc_feature: MA Experiment 20000265 PARAMETER Experiment Name: At_Open_Flower_P Parameter: Plant Line Value: WS
  misc_feature: MA Experiment 20000265 PARAMETER Experiment Name: At_Open_Flower_P Parameter: Tissue Value: Closed Flower vs. Whole Plant
  misc_feature: MA Experiment ID: 20000286 Result: Up-regulated in Transcription
  misc_feature: MA Experiment 20000286 PARAMETER Experiment Name: At_Open_Flower_P Parameter: Age (day) Value: 21
  misc_feature: MA Experiment 20000286 PARAMETER Experiment Name: At_Open_Flower_P Parameter: Plant Line Value: WS
  misc_feature: MA Experiment 20000286 PARAMETER Experiment Name: At_Open_Flower_P Parameter: Tissue Value: Half Open vs. Whole Plant
  misc_feature: MA Experiment ID: 20000439 Result: Down-regulated in Transcription
  misc_feature: MA Experiment 20000439 PARAMETER Experiment Name: At_Roots__P Parameter: Age (day) Value: 14 vs. 21
  misc_feature: MA Experiment 20000439 PARAMETER Experiment Name: At_Roots__P Parameter: Organism Value: A. thaliana
  misc_feature: MA Experiment 20000439 PARAMETER Experiment Name: At_Roots__P Parameter: Tissue Value: Roots vs. Whole Plant
  misc_feature: MA Experiment ID: 20001247 Result: Down-regulated in Transcription
  misc_feature: MA Experiment 20001247 PARAMETER Experiment Name: At_Far-red-induction_P Parameter: Age (day) Value: 7
  misc_feature: MA Experiment 20001247 PARAMETER Experiment Name: At_Far-red-induction_P Parameter: Light Value: Far-red vs. White
  misc_feature: MA Experiment 20001247 PARAMETER Experiment Name: At_Far-red-induction_P Parameter: Organism Value: A. thaliana
  misc_feature: MA Experiment 20001247 PARAMETER Experiment Name: At_Far-red-induction_P Parameter: Plant Line Value: Columbia
  misc_feature: MA Experiment 20001247 PARAMETER Experiment Name: At_Far-red-induction_P Parameter: Timepoint (hr) Value: 1
  misc_feature: MA Experiment 20001247 PARAMETER Experiment Name: At_Far-red-induction_P Parameter: Tissue Value: Whole Plant
  misc_feature: MA Experiment ID: 20001248 Result: Down-regulated in Transcription
  misc_feature: MA Experiment 20001248 PARAMETER Experiment Name: At_Far-red-induction_P Parameter: Age (day) Value: 7
  misc_feature: MA Experiment 20001248 PARAMETER Experiment Name: At_Far-red-induction_P Parameter: Light Value: Far-red vs. White
  misc_feature: MA Experiment 20001248 PARAMETER Experiment Name: At_Far-red-induction_P Parameter: Organism Value: A. thaliana
  misc_feature: MA Experiment 20001248 PARAMETER Experiment Name: At_Far-red-induction_P Parameter: Plant Line Value: Columbia
  misc_feature: MA Experiment 20001248 PARAMETER Experiment Name: At_Far-red-induction_P Parameter: Timepoint (hr) Value: 4
  misc_feature: MA Experiment 20001248 PARAMETER Experiment Name: At_Far-red-induction_P Parameter: Tissue Value: Whole Plant
  misc_feature: MA Experiment ID: 20001450 Result: Down-regulated in Transcription
  misc_feature: MA Experiment 20001450 PARAMETER Experiment Name: At_Far-red-induction_P Parameter: Age (day) Value: 7
  misc_feature: MA Experiment 20001450 PARAMETER Experiment Name: At_Far-red-induction_P Parameter: Light Value: Far-red vs. White
  misc_feature: MA Experiment 20001450 PARAMETER Experiment Name: At_Far-red-induction_P Parameter: Organism Value: A. thaliana
  misc_feature: MA Experiment 20001450 PARAMETER Experiment Name: At_Far-red-induction_P Parameter: Plant Line Value: Columbia
  misc_feature: MA Experiment 20001450 PARAMETER Experiment Name: At_Far-red-induction_P Parameter: Timepoint (hr) Value: 8
  misc_feature: MA Experiment 20001450 PARAMETER Experiment Name: At_Far-red-induction_P Parameter: Tissue Value: Whole Plant
  misc_feature: MA Experiment ID: 20001556 Result: Up-regulated in Transcription
  misc_feature: MA Experiment 20001556 PARAMETER Experiment Name: At_Drought_Soil_Dry_P Parameter: Age (day) Value: 26
  misc_feature: MA Experiment 20001556 PARAMETER Experiment Name: At_Drought_Soil_Dry_P Parameter: Organism Value: A. thaliana
  misc_feature: MA Experiment 20001556 PARAMETER Experiment Name: At_Drought_Soil_Dry_P Parameter: Plant Line Value: WS
  misc_feature: MA Experiment 20001556 PARAMETER Experiment Name: At_Drought_Soil_Dry_P Parameter: Post Timepoint (hr) Value: None
  misc_feature: MA Experiment 20001556 PARAMETER Experiment Name: At_Drought_Soil_Dry_P Parameter: Post-Treatment Value: None
  misc_feature: MA Experiment 20001556 PARAMETER Experiment Name: At_Drought_Soil_Dry_P Parameter: Timepoint (day) Value: 12
  misc_feature: MA Experiment 20001556 PARAMETER Experiment Name: At_Drought_Soil_Dry_P Parameter: Treatment Value: Drought vs. No Drought
  misc_feature: MA Experiment ID: 20001757 Result: Up-regulated in Transcription
  misc_feature: MA Experiment 20001757 PARAMETER Experiment Name: At_50mM_NH4NO3_L-to-H_P Parameter: Timepoint (hr) Value: 6
  misc_feature: MA Experiment 20001757 PARAMETER Experiment Name: At_50mM_NH4NO3_L-to-H_P Parameter: Tissue Value: Leaf
  misc_feature: MA Experiment 20001757 PARAMETER Experiment Name: At_50mM_NH4NO3_L-to-H_P Parameter: Treatment Value: 50mM NH4NO3 vs 100mM Mannitol
aaagaagtaagctacctagataaaaccgccatggccaccggtttaggcttctttaagctctccttcctccttagcctcctctccggtggatcagacctattaggtcccgatgccgaatccggagtcgcccaaattgggaagttcccgccgtcgtgtaacagaatcgaatgcccgagctacgagctggttcactccggaaatggatacgaaattcgccggtacaacaacaccgtctgggtttccactgaaccgattccagatatctctctcgttgatgctaccagaaccgctttcttccaattgtttgcatacattcaggggaagaacgagtatcatcagaagatagaaatgactgctccggttatctctcaagtctcaccaagcgacggtccattctgtgaatcttccttcactgtatcattctacgttcctaaaaagaaccagcctgatccagctccgtcggagaatctccacattcagaaatggaactctaggtacgtggccgtgagacaattcagtggattcgtgtctgatgatagcataggagaacaagcggcggcgctagactcgagcctcaaaggtacggcttgggctaatgcaatagcgaaaagcaaagaagacggtggtgttgggtcggattcagcttacacggtcgctcagtataactcacccttcgagttctccggtcgggtcaatgagatttggttaccgttcgagctcgatgtttaagctctgcttagtgaaccctttttctatacatttgaataaaataagaggttaatctgtaaagtgcaaaccttttttctgatacaaattttgcagaaacaggggaatttgatgaaatgagattg

SEQ ID NO: 21440 - protein, 242 aa, Arabidopsis thaliana
  peptide (1)..(242): Ceres Seq. ID no. 12385792
  misc_feature (54)..(239): Pfam Name: SOUL heme-binding protein Pfam Description: SOUL heme-binding protein
  misc_feature (69)..(236): Homolog of NCBI NO: 15778345 NR Description: C6ORF34B [Homo sapiens]
  misc_feature (69)..(236): Homolog of NCBI NO: 7657603 NR Description: heme binding protein 2
  misc_feature (36)..(236): Homolog of NCBI NO: 9507129 NR Description: heme binding protein 2; putative heme-binding
  misc_feature (55)..(236): Homolog of NCBI NO: 28278449 NR Description: Similar to heme binding protein 2 [Danio rerio]
  misc_feature (49)..(241): Homolog of NCBI NO: 34904402 NR Description: unnamed protein product [Oryza sativa (japonica
  misc_feature (11)..(240): Homolog of NCBI NO: 15218357 NR Description: hypothetical protein; protein id: At1g78460.1
  misc_feature (11)..(241): Homolog of NCBI NO: 21593898 NR Description: SOUL-like protein [Arabidopsis thaliana]
  misc_feature (11)..(241): Homolog of NCBI NO: 18411970 NR Description: expressed protein
  misc_feature (38)..(239): Homolog of NCBI NO: 34903864 NR Description: unnamed protein product [Oryza sativa (japonica
  misc_feature (11)..(242): Homolog of NCBI NO: 15220033 NR Description: SOUL-like protein
KEVSYLDKTAMATGLGFFKLSFLLSLLSGGSDLLGPDAESGVAQIGKFPPSCNRIECPSYELVHSGNGYEIRRYNNTVWVSTEPIPDISLVDATRTAFFQLFAYIQGKNEYHQKIEMTAPVISQVSPSDGPFCESSFTVSFYVPKKNQPDPAPSENLHIQKWNSRYVAVRQFSGFVSDDSIGEQAAALDSSLKGTAWANAIAKSKEDGGVGSDSAYTVAQYNSPFEFSGRVNEIWLPFELDV

SEQ ID NO: 21441 - protein, 232 aa, Arabidopsis thaliana
  peptide (1)..(232): Ceres Seq. ID no. 12385793
  misc_feature (44)..(229): Pfam Name: SOUL heme-binding protein Pfam Description: SOUL heme-binding protein
  misc_feature (59)..(226): Homolog of NCBI NO: 15778345 NR Description: C6ORF34B [Homo sapiens]
  misc_feature (59)..(226): Homolog of NCBI NO: 7657603 NR Description: heme binding protein 2
  misc_feature (26)..(226): Homolog of NCBI NO: 9507129 NR Description: heme binding protein 2; putative heme-binding
  misc_feature (45)..(226): Homolog of NCBI NO: 28278449 NR Description: Similar to heme binding protein 2 [Danio rerio]
  misc_feature (39)..(231): Homolog of NCBI NO: 34904402 NR Description: unnamed protein product [Oryza sativa (japonica
  misc_feature (1)..(230): Homolog of NCBI NO: 15218357 NR Description: hypothetical protein; protein id: At1g78460.1
  misc_feature (1)..(231): Homolog of NCBI NO: 21593898 NR Description: SOUL-like protein [Arabidopsis thaliana]
  misc_feature (1)..(231): Homolog of NCBI NO: 18411970 NR Description: expressed protein
  misc_feature (28)..(229): Homolog of NCBI NO: 34903864 NR Description: unnamed protein product [Oryza sativa (japonica
  misc_feature (1)..(232): Homolog of NCBI NO: 15220033 NR Description: SOUL-like protein
MATGLGFFKLSFLLSLLSGGSDLLGPDAESGVAQIGKFPPSCNRIECPSYELVHSGNGYEIRRYNNTVWVSTEPIPDISLVDATRTAFFQLFAYIQGKNEYHQKIEMTAPVISQVSPSDGPFCESSFTVSFYVPKKNQPDPAPSENLHIQKWNSRYVAVRQFSGFVSDDSIGEQAAALDSSLKGTAWANAIAKSKEDGGVGSDSAYTVAQYNSPFEFSGRVNEIWLPFELDV

SEQ ID NO: 21442 - protein, 126 aa, Arabidopsis thaliana
  peptide (1)..(126): Ceres Seq. ID no. 12385794
  misc_feature (1)..(123): Pfam Name: SOUL heme-binding protein Pfam Description: SOUL heme-binding protein
  misc_feature (1)..(120): Homolog of NCBI NO: 15778345 NR Description: C6ORF34B [Homo sapiens]
  misc_feature (1)..(120): Homolog of NCBI NO: 7657603 NR Description: heme binding protein 2
  misc_feature (1)..(120): Homolog of NCBI NO: 9507129 NR Description: heme binding protein 2; putative heme-binding
  misc_feature (1)..(120): Homolog of NCBI NO: 28278449 NR Description: Similar to heme binding protein 2 [Danio rerio]
  misc_feature (1)..(125): Homolog of NCBI NO: 34904402 NR Description: unnamed protein product [Oryza sativa (japonica
  misc_feature (1)..(124): Homolog of NCBI NO: 15218357 NR Description: hypothetical protein; protein id: At1g78460.1
  misc_feature (1)..(125): Homolog of NCBI NO: 21593898 NR Description: SOUL-like protein [Arabidopsis thaliana]
  misc_feature (1)..(125): Homolog of NCBI NO: 18411970 NR Description: expressed protein
  misc_feature (1)..(123): Homolog of NCBI NO: 34903864 NR Description: unnamed protein product [Oryza sativa (japonica
  misc_feature (1)..(126): Homolog of NCBI NO: 15220033 NR Description: SOUL-like protein
MTAPVISQVSPSDGPFCESSFTVSFYVPKKNQPDPAPSENLHIQKWNSRYVAVRQFSGFVSDDSIGEQAAALDSSLKGTAWANAIAKSKEDGGVGSDSAYTVAQYNSPFEFSGRVNEIWLPFELDV

SEQ ID NO: 21443 - DNA, 810 bp, Arabidopsis thaliana
  misc_feature (1)..(810): Ceres Seq. ID no. 12561474
  misc_feature: MA Experiment ID: 108434 Result: Up-regulated in Transcription
  misc_feature: MA Experiment 108434 PARAMETER Experiment Name: At_Root_Tips_cDNA_P Parameter: Tissue Value: Root Tips
  misc_feature: MA Experiment ID: 108462 Result: Down-regulated in Transcription
  misc_feature: MA Experiment 108462 PARAMETER Experiment Name: At_Germinating_Seeds_cDNA_P Parameter: Age (day) Value: 2 vs. 0
  misc_feature: MA Experiment 108462 PARAMETER Experiment Name: At_Germinating_Seeds_cDNA_P Parameter: Tissue Value: Germinating Seeds
  misc_feature: MA Experiment ID: 108463 Result: Down-regulated in Transcription
  misc_feature: MA Experiment 108463 PARAMETER Experiment Name: At_Germinating_Seeds_cDNA_P Parameter: Age (day) Value: 3 vs. 0
  misc_feature: MA Experiment 108463 PARAMETER Experiment Name: At_Germinating_Seeds_cDNA_P Parameter: Tissue Value: Germinating Seeds
  misc_feature: MA Experiment ID: 20000087 Result: Down-regulated in Transcription
  misc_feature: MA Experiment 20000087 PARAMETER Experiment Name: At_100uM_ABA_Mutants_cDNA_P Parameter: Plant Line Value: WS
  misc_feature: MA Experiment 20000087 PARAMETER Experiment Name: At_100uM_ABA_Mutants_cDNA_P Parameter: Timepoint (hr) Value: 6
  misc_feature: MA Experiment 20000087 PARAMETER Experiment Name: At_100uM_ABA_Mutants_cDNA_P Parameter: Tissue Value: Aerial
  misc_feature: MA Experiment 20000087 PARAMETER Experiment Name: At_100uM_ABA_Mutants_cDNA_P Parameter: Treatment Value: 100uM ABA vs. No Treatment
  misc_feature: MA Experiment ID: 20000173 Result: Up-regulated in Transcription
  misc_feature: MA Experiment 20000173 PARAMETER Experiment Name: At_42deg_Heat_P Parameter: Age (day) Value: 14
  misc_feature: MA Experiment 20000173 PARAMETER Experiment Name: At_42deg_Heat_P Parameter: Organism Value: A. thaliana
  misc_feature: MA Experiment 20000173 PARAMETER Experiment Name: At_42deg_Heat_P Parameter: Plant Line Value: WS
  misc_feature: MA Experiment 20000173 PARAMETER Experiment Name: At_42deg_Heat_P Parameter: Temperature (deg C) Value: 42 vs. 22
  misc_feature: MA Experiment 20000173 PARAMETER Experiment Name: At_42deg_Heat_P Parameter: Timepoint (hr) Value: 6
  misc_feature: MA Experiment 20000173 PARAMETER Experiment Name: At_42deg_Heat_P Parameter: Tissue Value: Aerial
  misc_feature: MA Experiment ID: 20000495 Result: Down-regulated in Transcription
  misc_feature: MA Experiment 20000495 PARAMETER Experiment Name: At_Guard_Cells_P Parameter: Harvest Date Value: 8/2/2002
  misc_feature: MA Experiment 20000495 PARAMETER Experiment Name: At_Guard_Cells_P Parameter: Organism Value: A. thaliana
  misc_feature: MA Experiment 20000495 PARAMETER Experiment Name: At_Guard_Cells_P Parameter: Tissue Value: Guard Cells vs. Leaves
  misc_feature: MA Experiment ID: 20000794 Result: Down-regulated in Transcription
  misc_feature: MA Experiment 20000794 PARAMETER Experiment Name: At_Petals_P Parameter: Age (day) Value: 23-25 days
  misc_feature: MA Experiment 20000794 PARAMETER Experiment Name: At_Petals_P Parameter: Plant Line Value: WS
  misc_feature: MA Experiment 20000794 PARAMETER Experiment Name: At_Petals_P Parameter: Tissue Value: Petals vs. Whole plant
  misc_feature: MA Experiment ID: 20001558 Result: Up-regulated in Transcription
  misc_feature: MA Experiment 20001558 PARAMETER Experiment Name: At_Drought_Soil_Dry_P Parameter: Age (day) Value: 27
  misc_feature: MA Experiment 20001558 PARAMETER Experiment Name: At_Drought_Soil_Dry_P Parameter: Organism Value: A. thaliana
  misc_feature: MA Experiment 20001558 PARAMETER Experiment Name: At_Drought_Soil_Dry_P Parameter: Plant Line Value: WS
  misc_feature: MA Experiment 20001558 PARAMETER Experiment Name: At_Drought_Soil_Dry_P Parameter: Post Timepoint (hr) Value: 6
  misc_feature: MA Experiment 20001558 PARAMETER Experiment Name: At_Drought_Soil_Dry_P Parameter: Post-Treatment Value: Re-Water vs. No Drought
  misc_feature: MA Experiment 20001558 PARAMETER Experiment Name: At_Drought_Soil_Dry_P Parameter: Timepoint (day) Value: 13
  misc_feature: MA Experiment 20001558 PARAMETER Experiment Name: At_Drought_Soil_Dry_P Parameter: Treatment Value: Drought vs. No Drought
ctcttctgcctcctccttcactcttcatcttcaaagactgcgccttttagctcagtgaaaaaggttcgagcttcggaaactatggcagcattccctaaccttaactctgatgctggattgaagaagctcgacgagcatcttctcactcgcagttacattactggataccaggcttcaaaggatgatatcaccgtctttgcagctcttgcaaagcccccaacttcacagtatgtgaacgcttctcgttggtacaatcacattgatgccctcttgaggatctctggtgtctctgctgaaggaagcggtgtcattgttgagggatcagctcctatcactgaggaggctgttgctactccccctgcagctgattctaaggatgctgcggctgatgaagaagatgatgatgatgttgaccttttcggagaggagaccgaagaggaaaagaaagctgctgaagagagagcagcttctgtcaaggcatctacaaagaagaaggaatctggaaagtcctcagttttgattgatatcaaaccgtgggatgatgagactgacatgaagaagcttgaggaagctgtgaagtccattcagatggaaggtttgttttggggagcatcaaagcttgtcccagttggttatggtatcaagaagttgcagattttgtgcaccattgttgacgaccttgtctctattgacaccatgatcgaagagcaactcactgttgaaccgatcaatgaatatgtccagagctgtgacattgttgccttcaacaagatatgtaagtttcatgaacctattcgtaattctttttaa

SEQ ID NO: 21444 - protein, 269 aa, Arabidopsis thaliana
  peptide (1)..(269): Ceres Seq. ID no. 12561475
  misc_feature (169)..(258): Pfam Name: EF-1 guanine nucleotide exchange domain Pfam Description: EF-1 guanine nucleotide exchange domain
  misc_feature (30)..(258): Homolog of NCBI NO: 6166140 NR Description: ELONGATION FACTOR 1-BETA (EF-1-BETA)
  misc_feature (31)..(258): Homolog of NCBI NO: 6015063 NR Description: ELONGATION FACTOR 1-BETA (EF-1-BETA)
  misc_feature (31)..(258): Homolog of NCBI NO: 6015064 NR Description: ELONGATION FACTOR 1-BETA (EF-1-BETA)
  misc_feature (31)..(258): Homolog of NCBI NO: 38232568 NR Description: translational elongation factor 1 subunit Bbeta
  misc_feature (28)..(258): Homolog of NCBI NO: 2119929 NR Description: translation elongation factor eEF-1 beta chain -
  misc_feature (28)..(258): Homolog of NCBI NO: 15224107 NR Description: putative  elongation factor beta-1
  misc_feature (28)..(258): Homolog of NCBI NO: 21593028 NR Description: putative elongation factor beta-1 [Arabidopsis
  misc_feature (28)..(258): Homolog of NCBI NO: 480620 NR Description: translation elongation factor eEF-1 beta-A1 chain
  misc_feature (28)..(258): Homolog of NCBI NO: 30691619 NR Description: elongation factor 1-beta -related [Arabidopsis
  misc_feature (28)..(269): Homolog of NCBI NO: 25299531 NR Description: probable elongation factor 1-beta
LFCLLLHSSSSKTAPFSSVKKVRASETMAAFPNLNSDAGLKKLDEHLLTRSYITGYQASKDDITVFAALAKPPTSQYVNASRWYNHIDALLRISGVSAEGSGVIVEGSAPITEEAVATPPAADSKDAAADEEDDDDVDLFGEETEEEKKAAEERAASVKASTKKKESGKSSVLIDIKPWDDETDMKKLEEAVKSIQMEGLFWGASKLVPVGYGIKKLQILCTIVDDLVSIDTMIEEQLTVEPINEYVQSCDIVAFNKICKFHEPIRNSF

SEQ ID NO: 21445 - protein, 242 aa, Arabidopsis thaliana
  peptide (1)..(242): Ceres Seq. ID no. 12561476
  misc_feature (142)..(231): Pfam Name: EF-1 guanine nucleotide exchange domain Pfam Description: EF-1 guanine nucleotide exchange domain
  misc_feature (3)..(231): Homolog of NCBI NO: 6166140 NR Description: ELONGATION FACTOR 1-BETA (EF-1-BETA)
  misc_feature (4)..(231): Homolog of NCBI NO: 6015063 NR Description: ELONGATION FACTOR 1-BETA (EF-1-BETA)
  misc_feature (4)..(231): Homolog of NCBI NO: 6015064 NR Description: ELONGATION FACTOR 1-BETA (EF-1-BETA)
  misc_feature (4)..(231): Homolog of NCBI NO: 38232568 NR Description: translational elongation factor 1 subunit Bbeta
  misc_feature (1)..(231): Homolog of NCBI NO: 2119929 NR Description: translation elongation factor eEF-1 beta chain -
  misc_feature (1)..(231): Homolog of NCBI NO: 15224107 NR Description: putative  elongation factor beta-1
  misc_feature (1)..(231): Homolog of NCBI NO: 21593028 NR Description: putative elongation factor beta-1 [Arabidopsis
  misc_feature (1)..(231): Homolog of NCBI NO: 480620 NR Description: translation elongation factor eEF-1 beta-A1 chain
  misc_feature (1)..(231): Homolog of NCBI NO: 30691619 NR Description: elongation factor 1-beta -related [Arabidopsis
  misc_feature (1)..(242): Homolog of NCBI NO: 25299531 NR Description: probable elongation factor 1-beta
MAAFPNLNSDAGLKKLDEHLLTRSYITGYQASKDDITVFAALAKPPTSQYVNASRWYNHIDALLRISGVSAEGSGVIVEGSAPITEEAVATPPAADSKDAAADEEDDDDVDLFGEETEEEKKAAEERAASVKASTKKKESGKSSVLIDIKPWDDETDMKKLEEAVKSIQMEGLFWGASKLVPVGYGIKKLQILCTIVDDLVSIDTMIEEQLTVEPINEYVQSCDIVAFNKICKFHEPIRNSF

SEQ ID NO: 21446 - DNA, 1037 bp, Arabidopsis thaliana
  misc_feature (1)..(1037): Ceres Seq. ID no. 12421608
  misc_feature: MA Experiment ID: 108501 Result: Down-regulated in Transcription
  misc_feature: MA Experiment 108501 PARAMETER Experiment Name: At_ap2_floral_buds_cDNA_P Parameter: Plant Line Value: ap2 (Ler.)
  misc_feature: MA Experiment 108501 PARAMETER Experiment Name: At_ap2_floral_buds_cDNA_P Parameter: Tissue Value: Closed Flower
  misc_feature: MA Experiment ID: 20000111 Result: Up-regulated in Transcription
  misc_feature: MA Experiment 20000111 PARAMETER Experiment Name: At_42deg_Heat_cDNA_P Parameter: Temperature (deg C) Value: 42 vs. 22
  misc_feature: MA Experiment 20000111 PARAMETER Experiment Name: At_42deg_Heat_cDNA_P Parameter: Timepoint (hr) Value: 6
  misc_feature: MA Experiment 20000111 PARAMETER Experiment Name: At_42deg_Heat_cDNA_P Parameter: Tissue Value: Aerial
  misc_feature: MA Experiment ID: 20000112 Result: Up-regulated in Transcription
  misc_feature: MA Experiment 20000112 PARAMETER Experiment Name: At_42deg_Heat_cDNA_P Parameter: Temperature (deg C) Value: 42 vs. 22
  misc_feature: MA Experiment 20000112 PARAMETER Experiment Name: At_42deg_Heat_cDNA_P Parameter: Timepoint (hr) Value: 2
  misc_feature: MA Experiment 20000112 PARAMETER Experiment Name: At_42deg_Heat_cDNA_P Parameter: Tissue Value: Aerial
  misc_feature: MA Experiment ID: 20000144 Result: Up-regulated in Transcription
  misc_feature: MA Experiment 20000144 PARAMETER Experiment Name: At_42deg_Heat_cDNA_P Parameter: Temperature (deg C) Value: 42 vs. 22
  misc_feature: MA Experiment 20000144 PARAMETER Experiment Name: At_42deg_Heat_cDNA_P Parameter: Timepoint (hr) Value: 1
  misc_feature: MA Experiment 20000144 PARAMETER Experiment Name: At_42deg_Heat_cDNA_P Parameter: Tissue Value: Aerial
  misc_feature: MA Experiment ID: 20000173 Result: Up-regulated in Transcription
  misc_feature: MA Experiment 20000173 PARAMETER Experiment Name: At_42deg_Heat_P Parameter: Age (day) Value: 14
  misc_feature: MA Experiment 20000173 PARAMETER Experiment Name: At_42deg_Heat_P Parameter: Organism Value: A. thaliana
  misc_feature: MA Experiment 20000173 PARAMETER Experiment Name: At_42deg_Heat_P Parameter: Plant Line Value: WS
  misc_feature: MA Experiment 20000173 PARAMETER Experiment Name: At_42deg_Heat_P Parameter: Temperature (deg C) Value: 42 vs. 22
  misc_feature: MA Experiment 20000173 PARAMETER Experiment Name: At_42deg_Heat_P Parameter: Timepoint (hr) Value: 6
  misc_feature: MA Experiment 20000173 PARAMETER Experiment Name: At_42deg_Heat_P Parameter: Tissue Value: Aerial
  misc_feature: MA Experiment ID: 20000224 Result: Down-regulated in Transcription
  misc_feature: MA Experiment ID: 20000438 Result: Down-regulated in Transcription
  misc_feature: MA Experiment 20000438 PARAMETER Experiment Name: At_Shoots__P Parameter: Age (day) Value: 14
  misc_feature: MA Experiment 20000438 PARAMETER Experiment Name: At_Shoots__P Parameter: Tissue Value: Shoots vs. Whole Plant
  misc_feature: MA Experiment ID: 20001451 Result: Up-regulated in Transcription
  misc_feature: MA Experiment 20001451 PARAMETER Experiment Name: At_Far-red-induction_P Parameter: Age (day) Value: 7
  misc_feature: MA Experiment 20001451 PARAMETER Experiment Name: At_Far-red-induction_P Parameter: Light Value: Far-red vs. White
  misc_feature: MA Experiment 20001451 PARAMETER Experiment Name: At_Far-red-induction_P Parameter: Organism Value: A. thaliana
  misc_feature: MA Experiment 20001451 PARAMETER Experiment Name: At_Far-red-induction_P Parameter: Plant Line Value: Columbia
  misc_feature: MA Experiment 20001451 PARAMETER Experiment Name: At_Far-red-induction_P Parameter: Timepoint (hr) Value: 24
  misc_feature: MA Experiment 20001451 PARAMETER Experiment Name: At_Far-red-induction_P Parameter: Tissue Value: Whole Plant
aatcgaaccatccaagacccgaattggatggattgggatcgggataatgggatcagcgatggtttctcatatcctcgccgcaggctattcagtcaccgtttatgctcgcgatcttcgtaaaacaaaggatctgcaaaccaaaggaggtcgtaccgccaatagccccaaagagttagcggagatgagcgacgttgtgtacgatcgttggaaactctaacgatgttagattgttgcttcttggggatgatggtgtactctctggtcttaaacccggtggagtaacagtggacatgactagtagcaagccaggattggcgcgtgagatatacgcggaggcgaggcggagggattgctgggcggtggatgcgcctgtatcgggtggagacgctggagcacgtgaggggaagctaacgatattcgccggcggagattccgagattgtggagtggttggctccggtgatgaaaacgatgggaattgtgaggtttatgggaggagctgggagtggacagagctgtaaaattgggaatcagatttgtgttggaagcaacatgattggattagctgaagggattgtgtttgctgagaaggcgggtttagatccggtgaaatggcttgaggcggttaaggatggtgcagctggatcggcggttatgcggcttttcggggagatgatggcgaagagggactataaggcgacggggtttgcggagtatatggtgaaagatttgggaatggcagcggaagcggcaacggcgatgcctggaactgctttgaacaagcagttgttcactggaatggtggcaaatggagatgggaagttaggatttcaaggcgtcgtcgatgttattaggagacttaacggcttatcctgataaaactagtgttaactaggcaagcttgttttccatttggttagaagttgctaataagaacatggagtctcaccaatctcgagaactatagttacaagagtgtgtaacattagtttccaattggattatcaacttctacctcctataactatttctctgttg

SEQ ID NO: 21447 - protein, 194 aa, Arabidopsis thaliana
  peptide (1)..(194): Ceres Seq. ID no. 12421609
  misc_feature (1)..(70): Pfam Name: NAD binding domain of 6-phosphogluconate dehydrogenase Pfam Description: NAD binding domain of 6-phosphogluconate
  misc_feature (1)..(186): Homolog of NCBI NO: 28379084 NR Description: 3-hydroxyisobutyrate dehydrogenase
  misc_feature (1)..(183): Homolog of NCBI NO: 15896585 NR Description: Dehydrogenase related to 3-hydroxyisobutyrate
  misc_feature (1)..(185): Homolog of NCBI NO: 22982959 NR Description: hypothetical protein [Burkholderia fungorum]
  misc_feature (1)..(183): Homolog of NCBI NO: 16078460 NR Description: similar to 3-hydroxyisobutyrate dehydrogenase
  misc_feature (1)..(181): Homolog of NCBI NO: 30022129 NR Description: 3-hydroxyisobutyrate dehydrogenase [Bacillus
  misc_feature (1)..(191): Homolog of NCBI NO: 34909392 NR Description: putative dehydrogenase [Oryza sativa (japonica
  misc_feature (1)..(194): Homolog of NCBI NO: 15233455 NR Description: putative protein
  misc_feature (1)..(194): Homolog of NCBI NO: 25283629 NR Description: probable dehydrogenase F23N20.17
  misc_feature (1)..(194): Homolog of NCBI NO: 18409781 NR Description: putative dehydrogenase
  misc_feature (1)..(194): Homolog of NCBI NO: 30698779 NR Description: dehydrogenase -related [Arabidopsis thaliana]
MTSSKPGLAREIYAEARRRDCWAVDAPVSGGDAGAREGKLTIFAGGDSEIVEWLAPVMKTMGIVRFMGGAGSGQSCKIGNQICVGSNMIGLAEGIVFAEKAGLDPVKWLEAVKDGAAGSAVMRLFGEMMAKRDYKATGFAEYMVKDLGMAAEAATAMPGTALNKQLFTGMVANGDGKLGFQGVVDVIRRLNGLS

SEQ ID NO: 21448 - protein, 137 aa, Arabidopsis thaliana
  peptide (1)..(137): Ceres Seq. ID no. 12421610
  misc_feature (1)..(137): Homolog of NCBI NO: 15233455 NR Description: putative protein
  misc_feature (1)..(137): Homolog of NCBI NO: 25283629 NR Description: probable dehydrogenase F23N20.17
  misc_feature (1)..(137): Homolog of NCBI NO: 18409781 NR Description: putative dehydrogenase
  misc_feature (1)..(137): Homolog of NCBI NO: 30698779 NR Description: dehydrogenase -related [Arabidopsis thaliana]
  misc_feature (1)..(129): Homolog of NCBI NO: 28379084 NR Description: 3-hydroxyisobutyrate dehydrogenase
  misc_feature (1)..(126): Homolog of NCBI NO: 15896585 NR Description: Dehydrogenase related to 3-hydroxyisobutyrate
  misc_feature (1)..(128): Homolog of NCBI NO: 22982959 NR Description: hypothetical protein [Burkholderia fungorum]
  misc_feature (1)..(126): Homolog of NCBI NO: 16078460 NR Description: similar to 3-hydroxyisobutyrate dehydrogenase
  misc_feature (1)..(124): Homolog of NCBI NO: 30022129 NR Description: 3-hydroxyisobutyrate dehydrogenase [Bacillus
  misc_feature (1)..(134): Homolog of NCBI NO: 34909392 NR Description: putative dehydrogenase [Oryza sativa (japonica
MKTMGIVRFMGGAGSGQSCKIGNQICVGSNMIGLAEGIVFAEKAGLDPVKWLEAVKDGAAGSAVMRLFGEMMAKRDYKATGFAEYMVKDLGMAAEAATAMPGTALNKQLFTGMVANGDGKLGFQGVVDVIRRLNGLS

SEQ ID NO: 21449 - protein, 134 aa, Arabidopsis thaliana
  peptide (1)..(134): Ceres Seq. ID no. 12421611
  misc_feature (1)..(126): Homolog of NCBI NO: 28379084 NR Description: 3-hydroxyisobutyrate dehydrogenase
  misc_feature (1)..(123): Homolog of NCBI NO: 15896585 NR Description: Dehydrogenase related to 3-hydroxyisobutyrate
  misc_feature (1)..(125): Homolog of NCBI NO: 22982959 NR Description: hypothetical protein [Burkholderia fungorum]
  misc_feature (1)..(123): Homolog of NCBI NO: 16078460 NR Description: similar to 3-hydroxyisobutyrate dehydrogenase
  misc_feature (1)..(121): Homolog of NCBI NO: 30022129 NR Description: 3-hydroxyisobutyrate dehydrogenase [Bacillus
  misc_feature (1)..(131): Homolog of NCBI NO: 34909392 NR Description: putative dehydrogenase [Oryza sativa (japonica
  misc_feature (1)..(134): Homolog of NCBI NO: 15233455 NR Description: putative protein
  misc_feature (1)..(134): Homolog of NCBI NO: 25283629 NR Description: probable dehydrogenase F23N20.17
  misc_feature (1)..(134): Homolog of NCBI NO: 18409781 NR Description: putative dehydrogenase
  misc_feature (1)..(134): Homolog of NCBI NO: 30698779 NR Description: dehydrogenase -related [Arabidopsis thaliana]
MGIVRFMGGAGSGQSCKIGNQICVGSNMIGLAEGIVFAEKAGLDPVKWLEAVKDGAAGSAVMRLFGEMMAKRDYKATGFAEYMVKDLGMAAEAATAMPGTALNKQLFTGMVANGDGKLGFQGVVDVIRRLNGLS

SEQ ID NO: 21450 - DNA, 1314 bp, Arabidopsis thaliana
  misc_feature (1)..(1314): Ceres Seq. ID no. 12325966
  misc_feature: MA Experiment ID: 108434 Result: Down-regulated in Transcription
  misc_feature: MA Experiment 108434 PARAMETER Experiment Name: At_Root_Tips_cDNA_P Parameter: Tissue Value: Root Tips
  misc_feature: MA Experiment ID: 108435 Result: Up-regulated in Transcription
  misc_feature: MA Experiment 108435 PARAMETER Experiment Name: At_stm_Mutants_cDNA_P Parameter: Plant Line Value: wt Landsburg vs stm
  misc_feature: MA Experiment 108435 PARAMETER Experiment Name: At_stm_Mutants_cDNA_P Parameter: Tissue Value: Shoot Apical Meristem Region
  misc_feature: MA Experiment ID: 108462 Result: Up-regulated in Transcription
  misc_feature: MA Experiment 108462 PARAMETER Experiment Name: At_Germinating_Seeds_cDNA_P Parameter: Age (day) Value: 2 vs. 0
  misc_feature: MA Experiment 108462 PARAMETER Experiment Name: At_Germinating_Seeds_cDNA_P Parameter: Tissue Value: Germinating Seeds
  misc_feature: MA Experiment ID: 108463 Result: Up-regulated in Transcription
  misc_feature: MA Experiment 108463 PARAMETER Experiment Name: At_Germinating_Seeds_cDNA_P Parameter: Age (day) Value: 3 vs. 0
  misc_feature: MA Experiment 108463 PARAMETER Experiment Name: At_Germinating_Seeds_cDNA_P Parameter: Tissue Value: Germinating Seeds
  misc_feature: MA Experiment ID: 108464 Result: Up-regulated in Transcription
  misc_feature: MA Experiment 108464 PARAMETER Experiment Name: At_Germinating_Seeds_cDNA_P Parameter: Age (day) Value: 4 vs. 0
  misc_feature: MA Experiment 108464 PARAMETER Experiment Name: At_Germinating_Seeds_cDNA_P Parameter: Tissue Value: Germinating Seeds
  misc_feature: MA Experiment ID: 108501 Result: Down-regulated in Transcription
  misc_feature: MA Experiment 108501 PARAMETER Experiment Name: At_ap2_floral_buds_cDNA_P Parameter: Plant Line Value: ap2 (Ler.)
  misc_feature: MA Experiment 108501 PARAMETER Experiment Name: At_ap2_floral_buds_cDNA_P Parameter: Tissue Value: Closed Flower
  misc_feature: MA Experiment ID: 108594 Result: Down-regulated in Transcription
  misc_feature: MA Experiment 108594 PARAMETER Experiment Name: At_Ler-rhl_Root_cDNA_P Parameter: Plant Line Value: null
  misc_feature: MA Experiment ID: 20000184 Result: Up-regulated in Transcription
  misc_feature: MA Experiment 20000184 PARAMETER Experiment Name: At_Shoots__P Parameter: Age (day) Value: 7
  misc_feature: MA Experiment 20000184 PARAMETER Experiment Name: At_Shoots__P Parameter: Tissue Value: Shoots vs. Whole Plant
  misc_feature: MA Experiment ID: 20000185 Result: Up-regulated in Transcription
  misc_feature: MA Experiment 20000185 PARAMETER Experiment Name: At_Roots__P Parameter: Age (day) Value: 7 vs. 21
  misc_feature: MA Experiment 20000185 PARAMETER Experiment Name: At_Roots__P Parameter: Organism Value: A. thaliana
  misc_feature: MA Experiment 20000185 PARAMETER Experiment Name: At_Roots__P Parameter: Tissue Value: Roots vs. Whole Plant
  misc_feature: MA Experiment ID: 20000227 Result: Down-regulated in Transcription
  misc_feature: MA Experiment 20000227 PARAMETER Experiment Name: At_Root-Tips-vs-Tops_P Parameter: Tissue Value: Root Tips vs. Root Tops
  misc_feature: MA Experiment ID: 20000439 Result: Up-regulated in Transcription
  misc_feature: MA Experiment 20000439 PARAMETER Experiment Name: At_Roots__P Parameter: Age (day) Value: 14 vs. 21
  misc_feature: MA Experiment 20000439 PARAMETER Experiment Name: At_Roots__P Parameter: Organism Value: A. thaliana
  misc_feature: MA Experiment 20000439 PARAMETER Experiment Name: At_Roots__P Parameter: Tissue Value: Roots vs. Whole Plant
  misc_feature: MA Experiment ID: 20000460 Result: Down-regulated in Transcription
  misc_feature: MA Experiment 20000460 PARAMETER Experiment Name: At_10percent_PEG_P Parameter: Age (day) Value: 12
  misc_feature: MA Experiment 20000460 PARAMETER Experiment Name: At_10percent_PEG_P Parameter: Organism Value: A. thaliana
  misc_feature: MA Experiment 20000460 PARAMETER Experiment Name: At_10percent_PEG_P Parameter: Plant Line Value: WS
  misc_feature: MA Experiment 20000460 PARAMETER Experiment Name: At_10percent_PEG_P Parameter: Timepoint (day) Value: 12
  misc_feature: MA Experiment 20000460 PARAMETER Experiment Name: At_10percent_PEG_P Parameter: Tissue Value: Whole Plant
  misc_feature: MA Experiment 20000460 PARAMETER Experiment Name: At_10percent_PEG_P Parameter: Treatment Value: 10percent PEG vs. No Treatment
  misc_feature: MA Experiment ID: 20001248 Result: Down-regulated in Transcription
  misc_feature: MA Experiment 20001248 PARAMETER Experiment Name: At_Far-red-induction_P Parameter: Age (day) Value: 7
  misc_feature: MA Experiment 20001248 PARAMETER Experiment Name: At_Far-red-induction_P Parameter: Light Value: Far-red vs. White
  misc_feature: MA Experiment 20001248 PARAMETER Experiment Name: At_Far-red-induction_P Parameter: Organism Value: A. thaliana
  misc_feature: MA Experiment 20001248 PARAMETER Experiment Name: At_Far-red-induction_P Parameter: Plant Line Value: Columbia
  misc_feature: MA Experiment 20001248 PARAMETER Experiment Name: At_Far-red-induction_P Parameter: Timepoint (hr) Value: 4
  misc_feature: MA Experiment 20001248 PARAMETER Experiment Name: At_Far-red-induction_P Parameter: Tissue Value: Whole Plant
  misc_feature: MA Experiment ID: 20001761 Result: Down-regulated in Transcription
  misc_feature: MA Experiment 20001761 PARAMETER Experiment Name: At_50mM_NH4NO3_L-to-H_P Parameter: Timepoint (hr) Value: 4
  misc_feature: MA Experiment 20001761 PARAMETER Experiment Name: At_50mM_NH4NO3_L-to-H_P Parameter: Tissue Value: Siliques
  misc_feature: MA Experiment 20001761 PARAMETER Experiment Name: At_50mM_NH4NO3_L-to-H_P Parameter: Treatment Value: 50mM NH4NO3 vs 100mM Mannitol
  misc_feature: MA Experiment ID: 20001904 Result: Up-regulated in Transcription
  misc_feature: MA Experiment 20001904 PARAMETER Experiment Name: At_Drought_Reproduction_P Parameter: Age (day) Value: 37
  misc_feature: MA Experiment 20001904 PARAMETER Experiment Name: At_Drought_Reproduction_P Parameter: Organism Value: A. thaliana
  misc_feature: MA Experiment 20001904 PARAMETER Experiment Name: At_Drought_Reproduction_P Parameter: Plant Line Value: WS
  misc_feature: MA Experiment 20001904 PARAMETER Experiment Name: At_Drought_Reproduction_P Parameter: Timepoint (day) Value: 7
  misc_feature: MA Experiment 20001904 PARAMETER Experiment Name: At_Drought_Reproduction_P Parameter: Tissue Value: Rosettes
  misc_feature: MA Experiment 20001904 PARAMETER Experiment Name: At_Drought_Reproduction_P Parameter: Treatment Value: Drought vs. No Drought
  misc_feature: MA Experiment ID: 20001906 Result: Up-regulated in Transcription
  misc_feature: MA Experiment 20001906 PARAMETER Experiment Name: At_Drought_Reproduction_P Parameter: Age (day) Value: 35
  misc_feature: MA Experiment 20001906 PARAMETER Experiment Name: At_Drought_Reproduction_P Parameter: Organism Value: A. thaliana
  misc_feature: MA Experiment 20001906 PARAMETER Experiment Name: At_Drought_Reproduction_P Parameter: Plant Line Value: WS
  misc_feature: MA Experiment 20001906 PARAMETER Experiment Name: At_Drought_Reproduction_P Parameter: Timepoint (day) Value: 5
  misc_feature: MA Experiment 20001906 PARAMETER Experiment Name: At_Drought_Reproduction_P Parameter: Tissue Value: Siliques
  misc_feature: MA Experiment 20001906 PARAMETER Experiment Name: At_Drought_Reproduction_P Parameter: Treatment Value: Drought vs. No Drought
aaacacacattcaaatttggcgacatgaagttctgcgcgatattcgtgttattcatcgttcttgcaatcaacggctacgattgcaagatagtccaatttatatttggagattcattgtctgatgtaggcaacaataagaatctacctaggagtttagcgacggcgaatctgcccttttacggtattgattttggcaatggtttgcctaatggaaggttcactaatggccgcactgtttcagacattataggtgataaaattggattgccaagaccagtagccttcttggatccatcaatgaatgaagatgtaatacttgaaaatggagtgaactatgcttcaggaggtggtggaatcttgaacgaaactggtggttatttcatccaaagattttcgctgtggaagcaaatagaattattccaagggacacaagatgtagttgtggcaaagatagggaaaaaagaagcagacaagttctttcaagatgctcgatacgttgtcgctttaggcagcaatgacttcattaacaactatttgatgcctgtctatagcgactcttggaaatacaatgatcaaaccttcgtcgactacttaatggaaacacttgaatctcaactcaaggtgttacatagtttaggagcgaggaagctaatggtgtttggtttaggaccaatgggttgtatcccactgcaaagagctctaagcctggatggaaattgtcaaaacaaagcgagtaatcttgctaagagattcaacaaagctgccaccacaatgctcctagatctcgagaccaagctccctaacgcaagctacaggtttggtgaagcctatgacctcgtcaacgacgtcatcactaacccaaaaaaatacgggtttgataactcggattcgccgtgttgctcgttctacagaatccggcctgcgctaacgtgtattccagcgtcgacattgtgtaaagacagaagtaagtatgtgttttgggatgagtatcatcccaccgataaggctaacgaactcgtcgctaatatactcatcaaaagatttgacttcatgcgtgccgatgacggtatctcccatgctccatctcccgcgccggatatttctccttcttccgacaataactgatcggaattacagtcttaattatatataataattccggtttctgtaaattgtgatcatgttgtggagagtttcgtttgtctttcattttgatcatgtcaaataatgtttgattttctgtaattgttcttcttttgttgtatctgttaattcgagaatttgtcttataatagtaaagatattatcatgttt

SEQ ID NO: 21451 - protein, 374 aa, Arabidopsis thaliana
  peptide (1)..(374): Ceres Seq. ID no. 12325967
  misc_feature (33)..(345): Homolog of NCBI NO: 38345537 NR Description: OSJNBa0020J04.12 [Oryza sativa (japonica
  misc_feature (33)..(354): Homolog of NCBI NO: 15241626 NR Description: GDSL-motif lipase acylhydrolase-like protein
  misc_feature (33)..(342): Homolog of NCBI NO: 11280578 NR Description: hypothetical protein F14F8_100 - Arabidopsis
  misc_feature (33)..(342): Homolog of NCBI NO: 18417760 NR Description: putative protein
  misc_feature (33)..(345): Homolog of NCBI NO: 15227849 NR Description: putative GDSL-motif lipase/hydrolase
  misc_feature (33)..(345): Homolog of NCBI NO: 15229742 NR Description: putative protein; protein id: At3g50400.1
  misc_feature (30)..(365): Homolog of NCBI NO: 30693137 NR Description: lipase family [Arabidopsis thaliana]
  misc_feature (30)..(365): Homolog of NCBI NO: 21537293 NR Description: GDSL-motif lipase/hydrolase-like protein
  misc_feature (100)..(374): Homolog of NCBI NO: 27808542 NR Description: At1g74460 [Arabidopsis thaliana]
  misc_feature (9)..(374): Homolog of NCBI NO: 15221260 NR Description: putative lipase/acylhydrolase
KHTFKFGDMKFCAIFVLFIVLAINGYDCKIVQFIFGDSLSDVGNNKNLPRSLATANLPFYGIDFGNGLPNGRFTNGRTVSDIIGDKIGLPRPVAFLDPSMNEDVILENGVNYASGGGGILNETGGYFIQRFSLWKQIELFQGTQDVVVAKIGKKEADKFFQDARYVVALGSNDFINNYLMPVYSDSWKYNDQTFVDYLMETLESQLKVLHSLGARKLMVFGLGPMGCIPLQRALSLDGNCQNKASNLAKRFNKAATTMLLDLETKLPNASYRFGEAYDLVNDVITNPKKYGFDNSDSPCCSFYRIRPALTCIPASTLCKDRSKYVFWDEYHPTDKANELVANILIKRFDFMRADDGISHAPSPAPDISPSSDNN

SEQ ID NO: 21452 - protein, 366 aa, Arabidopsis thaliana
  peptide (1)..(366): Ceres Seq. ID no. 12325968
  misc_feature (25)..(337): Homolog of NCBI NO: 38345537 NR Description: OSJNBa0020J04.12 [Oryza sativa (japonica
  misc_feature (25)..(346): Homolog of NCBI NO: 15241626 NR Description: GDSL-motif lipase acylhydrolase-like protein
  misc_feature (25)..(334): Homolog of NCBI NO: 11280578 NR Description: hypothetical protein F14F8_100 - Arabidopsis
  misc_feature (25)..(334): Homolog of NCBI NO: 18417760 NR Description: putative protein
  misc_feature (25)..(337): Homolog of NCBI NO: 15227849 NR Description: putative GDSL-motif lipase/hydrolase
  misc_feature (25)..(337): Homolog of NCBI NO: 15229742 NR Description: putative protein; protein id: At3g50400.1
  misc_feature (22)..(357): Homolog of NCBI NO: 30693137 NR Description: lipase family [Arabidopsis thaliana]
  misc_feature (22)..(357): Homolog of NCBI NO: 21537293 NR Description: GDSL-motif lipase/hydrolase-like protein
  misc_feature (92)..(366): Homolog of NCBI NO: 27808542 NR Description: At1g74460 [Arabidopsis thaliana]
  misc_feature (1)..(366): Homolog of NCBI NO: 15221260 NR Description: putative lipase/acylhydrolase
MKFCAIFVLFIVLAINGYDCKIVQFIFGDSLSDVGNNKNLPRSLATANLPFYGIDFGNGLPNGRFTNGRTVSDIIGDKIGLPRPVAFLDPSMNEDVILENGVNYASGGGGILNETGGYFIQRFSLWKQIELFQGTQDVVVAKIGKKEADKFFQDARYVVALGSNDFINNYLMPVYSDSWKYNDQTFVDYLMETLESQLKVLHSLGARKLMVFGLGPMGCIPLQRALSLDGNCQNKASNLAKRFNKAATTMLLDLETKLPNASYRFGEAYDLVNDVITNPKKYGFDNSDSPCCSFYRIRPALTCIPASTLCKDRSKYVFWDEYHPTDKANELVANILIKRFDFMRADDGISHAPSPAPDISPSSDNN

SEQ ID NO: 21453 - protein, 275 aa, Arabidopsis thaliana
  peptide (1)..(275): Ceres Seq. ID no. 12325969
  misc_feature (1)..(246): Homolog of NCBI NO: 38345537 NR Description: OSJNBa0020J04.12 [Oryza sativa (japonica
  misc_feature (1)..(255): Homolog of NCBI NO: 15241626 NR Description: GDSL-motif lipase acylhydrolase-like protein
  misc_feature (1)..(243): Homolog of NCBI NO: 11280578 NR Description: hypothetical protein F14F8_100 - Arabidopsis
  misc_feature (1)..(243): Homolog of NCBI NO: 18417760 NR Description: putative protein
  misc_feature (1)..(246): Homolog of NCBI NO: 15227849 NR Description: putative GDSL-motif lipase/hydrolase
  misc_feature (1)..(246): Homolog of NCBI NO: 15229742 NR Description: putative protein; protein id: At3g50400.1
  misc_feature (1)..(266): Homolog of NCBI NO: 30693137 NR Description: lipase family [Arabidopsis thaliana]
  misc_feature (1)..(266): Homolog of NCBI NO: 21537293 NR Description: GDSL-motif lipase/hydrolase-like protein
  misc_feature (1)..(275): Homolog of NCBI NO: 27808542 NR Description: At1g74460 [Arabidopsis thaliana]
  misc_feature (1)..(275): Homolog of NCBI NO: 15221260 NR Description: putative lipase/acylhydrolase
MNEDVILENGVNYASGGGGILNETGGYFIQRFSLWKQIELFQGTQDVVVAKIGKKEADKFFQDARYVVALGSNDFINNYLMPVYSDSWKYNDQTFVDYLMETLESQLKVLHSLGARKLMVFGLGPMGCIPLQRALSLDGNCQNKASNLAKRFNKAATTMLLDLETKLPNASYRFGEAYDLVNDVITNPKKYGFDNSDSPCCSFYRIRPALTCIPASTLCKDRSKYVFWDEYHPTDKANELVANILIKRFDFMRADDGISHAPSPAPDISPSSDNN

SEQ ID NO: 21454 - DNA, 1258 bp, Arabidopsis thaliana
  misc_feature (1)..(1258): Ceres Seq. ID no. 12481988
  misc_feature: MA Experiment ID: 108434 Result: Down-regulated in Transcription
  misc_feature: MA Experiment 108434 PARAMETER Experiment Name: At_Root_Tips_cDNA_P Parameter: Tissue Value: Root Tips
  misc_feature: MA Experiment ID: 108488 Result: Down-regulated in Transcription
  misc_feature: MA Experiment ID: 108501 Result: Down-regulated in Transcription
  misc_feature: MA Experiment 108501 PARAMETER Experiment Name: At_ap2_floral_buds_cDNA_P Parameter: Plant Line Value: ap2 (Ler.)
  misc_feature: MA Experiment 108501 PARAMETER Experiment Name: At_ap2_floral_buds_cDNA_P Parameter: Tissue Value: Closed Flower
  misc_feature: MA Experiment ID: 20000117 Result: Up-regulated in Transcription
  misc_feature: MA Experiment 20000117 PARAMETER Experiment Name: At_100uM_ABA_Mutants_cDNA_P Parameter: Plant Line Value: Columbia
  misc_feature: MA Experiment 20000117 PARAMETER Experiment Name: At_100uM_ABA_Mutants_cDNA_P Parameter: Timepoint (hr) Value: 6
  misc_feature: MA Experiment 20000117 PARAMETER Experiment Name: At_100uM_ABA_Mutants_cDNA_P Parameter: Tissue Value: Aerial
  misc_feature: MA Experiment 20000117 PARAMETER Experiment Name: At_100uM_ABA_Mutants_cDNA_P Parameter: Treatment Value: 100uM ABA vs. No Treatment
  misc_feature: MA Experiment ID: 20000184 Result: Down-regulated in Transcription
  misc_feature: MA Experiment 20000184 PARAMETER Experiment Name: At_Shoots__P Parameter: Age (day) Value: 7
  misc_feature: MA Experiment 20000184 PARAMETER Experiment Name: At_Shoots__P Parameter: Tissue Value: Shoots vs. Whole Plant
  misc_feature: MA Experiment ID: 20000185 Result: Up-regulated in Transcription
  misc_feature: MA Experiment 20000185 PARAMETER Experiment Name: At_Roots__P Parameter: Age (day) Value: 7 vs. 21
  misc_feature: MA Experiment 20000185 PARAMETER Experiment Name: At_Roots__P Parameter: Organism Value: A. thaliana
  misc_feature: MA Experiment 20000185 PARAMETER Experiment Name: At_Roots__P Parameter: Tissue Value: Roots vs. Whole Plant
  misc_feature: MA Experiment ID: 20000264 Result: Up-regulated in Transcription
  misc_feature: MA Experiment 20000264 PARAMETER Experiment Name: At_Open_Flower_P Parameter: Age (day) Value: 21
  misc_feature: MA Experiment 20000264 PARAMETER Experiment Name: At_Open_Flower_P Parameter: Plant Line Value: WS
  misc_feature: MA Experiment 20000264 PARAMETER Experiment Name: At_Open_Flower_P Parameter: Tissue Value: Open Flower vs. Whole Plant
  misc_feature: MA Experiment ID: 20000439 Result: Up-regulated in Transcription
  misc_feature: MA Experiment 20000439 PARAMETER Experiment Name: At_Roots__P Parameter: Age (day) Value: 14 vs. 21
  misc_feature: MA Experiment 20000439 PARAMETER Experiment Name: At_Roots__P Parameter: Organism Value: A. thaliana
  misc_feature: MA Experiment 20000439 PARAMETER Experiment Name: At_Roots__P Parameter: Tissue Value: Roots vs. Whole Plant
  misc_feature: MA Experiment ID: 20000451 Result: Down-regulated in Transcription
  misc_feature: MA Experiment 20000451 PARAMETER Experiment Name: At_CS6879_Shoots-Roots_P Parameter: Age (day) Value: 14
  misc_feature: MA Experiment 20000451 PARAMETER Experiment Name: At_CS6879_Shoots-Roots_P Parameter: Organism Value: A. thaliana
  misc_feature: MA Experiment 20000451 PARAMETER Experiment Name: At_CS6879_Shoots-Roots_P Parameter: Plant Line Value: CS6879 vs. WS
  misc_feature: MA Experiment 20000451 PARAMETER Experiment Name: At_CS6879_Shoots-Roots_P Parameter: Tissue Value: Roots
  misc_feature: MA Experiment ID: 20000495 Result: Up-regulated in Transcription
  misc_feature: MA Experiment 20000495 PARAMETER Experiment Name: At_Guard_Cells_P Parameter: Harvest Date Value: 8/2/2002
  misc_feature: MA Experiment 20000495 PARAMETER Experiment Name: At_Guard_Cells_P Parameter: Organism Value: A. thaliana
  misc_feature: MA Experiment 20000495 PARAMETER Experiment Name: At_Guard_Cells_P Parameter: Tissue Value: Guard Cells vs. Leaves
  misc_feature: MA Experiment ID: 20000794 Result: Up-regulated in Transcription
  misc_feature: MA Experiment 20000794 PARAMETER Experiment Name: At_Petals_P Parameter: Age (day) Value: 23-25 days
  misc_feature: MA Experiment 20000794 PARAMETER Experiment Name: At_Petals_P Parameter: Plant Line Value: WS
  misc_feature: MA Experiment 20000794 PARAMETER Experiment Name: At_Petals_P Parameter: Tissue Value: Petals vs. Whole plant
  misc_feature: MA Experiment ID: 20001450 Result: Up-regulated in Transcription
  misc_feature: MA Experiment 20001450 PARAMETER Experiment Name: At_Far-red-induction_P Parameter: Age (day) Value: 7
  misc_feature: MA Experiment 20001450 PARAMETER Experiment Name: At_Far-red-induction_P Parameter: Light Value: Far-red vs. White
  misc_feature: MA Experiment 20001450 PARAMETER Experiment Name: At_Far-red-induction_P Parameter: Organism Value: A. thaliana
  misc_feature: MA Experiment 20001450 PARAMETER Experiment Name: At_Far-red-induction_P Parameter: Plant Line Value: Columbia
  misc_feature: MA Experiment 20001450 PARAMETER Experiment Name: At_Far-red-induction_P Parameter: Timepoint (hr) Value: 8
  misc_feature: MA Experiment 20001450 PARAMETER Experiment Name: At_Far-red-induction_P Parameter: Tissue Value: Whole Plant
  misc_feature: MA Experiment ID: 20001554 Result: Up-regulated in Transcription
  misc_feature: MA Experiment 20001554 PARAMETER Experiment Name: At_Drought_Soil_Dry_P Parameter: Age (day) Value: 21
  misc_feature: MA Experiment 20001554 PARAMETER Experiment Name: At_Drought_Soil_Dry_P Parameter: Organism Value: A. thaliana
  misc_feature: MA Experiment 20001554 PARAMETER Experiment Name: At_Drought_Soil_Dry_P Parameter: Plant Line Value: WS
  misc_feature: MA Experiment 20001554 PARAMETER Experiment Name: At_Drought_Soil_Dry_P Parameter: Post Timepoint (hr) Value: None
  misc_feature: MA Experiment 20001554 PARAMETER Experiment Name: At_Drought_Soil_Dry_P Parameter: Post-Treatment Value: None
  misc_feature: MA Experiment 20001554 PARAMETER Experiment Name: At_Drought_Soil_Dry_P Parameter: Timepoint (day) Value: 7
  misc_feature: MA Experiment 20001554 PARAMETER Experiment Name: At_Drought_Soil_Dry_P Parameter: Treatment Value: Drought vs. No Drought
taaaatgccttcgatttctctggcgccattgatttagttttctctctctgactacaaagtatccattcgttcaaaccagtttcttcccattttcgatttctgtcaaaattcaccaaccaactccaaaaactctgttattgaataagtttcttgatcttaaaacaaacgatctcaaagaatggcacgacacgatcctaatccatttgctgatgaagagatcaatccttttgcgaatcatacaagtgttcctcctgcgagcaactcttatctcaagccacttccaccggaaccttatgatcgtggtgcaaccgttgatatccctttggattctggcaatgatcttcgagctaaagagatggaactccaggccaaggagaacgaattgaagcggaaagagcaggagcttaaaagaagagaggacgcaatagcacgaactggagttgtcattgaagagaagaattggccggagttttttcctttaattcatcatgacattccaaatgagattccaattcatttacagaagatccaatacgtcgcattcaccacattgttagggttagtaggatgtctcttgtggaatattgtggcagtaactgtagcttggatcaaaggagaaggtcccactatatggcttctctcaataatttacttccttgctggggtacctggagcgtacgtcttatggtaccgtcctctttaccgagctacaagaactgatagtgccctgaagtttggagcttttttctttttttacgtgttccacatcgcgttctgcggctttgctgcagttgctccaccagtcatcttccaaggaaagtctctcacaggtttcttgccagcaatcgagcttctaactactaatgctgcagtcgggataatgtatttcattggtgctgggttcttctgcatcgaaacacttctcaatatctgggtcattcagcaagtatatgcatacttccgagggagtggcaaagctgcagagatgaagcgtgaagctacaaaatcgaccttgatgcgtgcactatgaagaaatcactcttcaccagaaaagtatcagtggctgcttgaggttaaaatcttgaatcatacacaaaatatttgacacaaccctttcctctgcaaagtctaggctgccaactctcttttgtttgaattactttgtaatggagacctcaaggaaactttgtgtggtttaaagttgtcaacaccatttcttcatgtatactagagcaaggtccttagagggatacgaatc

SEQ ID NO: 21455 - protein, 283 aa, Arabidopsis thaliana
  peptide (1)..(283): Ceres Seq. ID no. 12481989
  misc_feature (91)..(265): Pfam Name: SCAMP family Pfam Description: SCAMP family
  misc_feature (3)..(283): Homolog of NCBI NO: 25402653 NR Description: hypothetical protein [imported] - Arabidopsis
  misc_feature (3)..(283): Homolog of NCBI NO: 3941289 NR Description: similarity to SCAMP37 [Pisum sativum]
  misc_feature (3)..(283): Homolog of NCBI NO: 15220305 NR Description: secretory carrier membrane protein, putative
  misc_feature (19)..(282): Homolog of NCBI NO: 34899754 NR Description: putative secretory carrier membrane protein
  misc_feature (3)..(282): Homolog of NCBI NO: 7109232 NR Description: secretory carrier membrane protein [Oryza sativa]
  misc_feature (3)..(283): Homolog of NCBI NO: 15219893 NR Description: secretory carrier membrane protein
  misc_feature (1)..(77): Homolog of NCBI NO: 7485909 NR Description: hypothetical protein F21B7.17 - Arabidopsis
  misc_feature (148)..(283): Homolog of NCBI NO: 7485909 NR Description: hypothetical protein F21B7.17 - Arabidopsis
  misc_feature (1)..(283): Homolog of NCBI NO: 15226410 NR Description: putative secretory carrier-associated membrane
  misc_feature (1)..(283): Homolog of NCBI NO: 18379111 NR Description: expressed protein
MARHDPNPFADEEINPFANHTSVPPASNSYLKPLPPEPYDRGATVDIPLDSGNDLRAKEMELQAKENELKRKEQELKRREDAIARTGVVIEEKNWPEFFPLIHHDIPNEIPIHLQKIQYVAFTTLLGLVGCLLWNIVAVTVAWIKGEGPTIWLLSIIYFLAGVPGAYVLWYRPLYRATRTDSALKFGAFFFFYVFHIAFCGFAAVAPPVIFQGKSLTGFLPAIELLTTNAAVGIMYFIGAGFFCIETLLNIWVIQQVYAYFRGSGKAAEMKREATKSTLMRAL

SEQ ID NO: 21456 - protein, 224 aa, Arabidopsis thaliana
  peptide (1)..(224): Ceres Seq. ID no. 12481990
  misc_feature (32)..(206): Pfam Name: SCAMP family Pfam Description: SCAMP family
  misc_feature (1)..(224): Homolog of NCBI NO: 25402653 NR Description: hypothetical protein [imported] - Arabidopsis
  misc_feature (1)..(224): Homolog of NCBI NO: 3941289 NR Description: similarity to SCAMP37 [Pisum sativum]
  misc_feature (1)..(224): Homolog of NCBI NO: 15220305 NR Description: secretory carrier membrane protein, putative
  misc_feature (1)..(223): Homolog of NCBI NO: 34899754 NR Description: putative secretory carrier membrane protein
  misc_feature (1)..(223): Homolog of NCBI NO: 7109232 NR Description: secretory carrier membrane protein [Oryza sativa]
  misc_feature (1)..(224): Homolog of NCBI NO: 15219893 NR Description: secretory carrier membrane protein
  misc_feature (1)..(18): Homolog of NCBI NO: 7485909 NR Description: hypothetical protein F21B7.17 - Arabidopsis
  misc_feature (89)..(224): Homolog of NCBI NO: 7485909 NR Description: hypothetical protein F21B7.17 - Arabidopsis
  misc_feature (1)..(224): Homolog of NCBI NO: 15226410 NR Description: putative secretory carrier-associated membrane
  misc_feature (1)..(224): Homolog of NCBI NO: 18379111 NR Description: expressed protein
MELQAKENELKRKEQELKRREDAIARTGVVIEEKNWPEFFPLIHHDIPNEIPIHLQKIQYVAFTTLLGLVGCLLWNIVAVTVAWIKGEGPTIWLLSIIYFLAGVPGAYVLWYRPLYRATRTDSALKFGAFFFFYVFHIAFCGFAAVAPPVIFQGKSLTGFLPAIELLTTNAAVGIMYFIGAGFFCIETLLNIWVIQQVYAYFRGSGKAAEMKREATKSTLMRAL

SEQ ID NO: 21457 - DNA, 1369 bp, Arabidopsis thaliana
  misc_feature (1)..(1369): Ceres Seq. ID no. 13491211
  misc_feature: MA Experiment ID: 108569 Result: Up-regulated in Transcription
  misc_feature: MA Experiment 108569 PARAMETER Experiment Name: At_0.001%_MeJA__cDNA_P Parameter: Timepoint (hr) Value: 6
  misc_feature: MA Experiment 108569 PARAMETER Experiment Name: At_0.001%_MeJA__cDNA_P Parameter: Tissue Value: Aerial
  misc_feature: MA Experiment 108569 PARAMETER Experiment Name: At_0.001%_MeJA__cDNA_P Parameter: Treatment Value: 0.001% MeJA vs. No Treatment
  misc_feature: MA Experiment ID: 108573 Result: Up-regulated in Transcription
  misc_feature: MA Experiment 108573 PARAMETER Experiment Name: At_Drought_cDNA_P Parameter: Timepoint (hr) Value: 6
  misc_feature: MA Experiment 108573 PARAMETER Experiment Name: At_Drought_cDNA_P Parameter: Tissue Value: Aerial
  misc_feature: MA Experiment 108573 PARAMETER Experiment Name: At_Drought_cDNA_P Parameter: Treatment Value: Drought vs. No Drought
  misc_feature: MA Experiment ID: 20000070 Result: Up-regulated in Transcription
  misc_feature: MA Experiment 20000070 PARAMETER Experiment Name: At_100uM_ABA_Mutants_cDNA_P Parameter: Plant Line Value: CS24
  misc_feature: MA Experiment 20000070 PARAMETER Experiment Name: At_100uM_ABA_Mutants_cDNA_P Parameter: Timepoint (hr) Value: 6
  misc_feature: MA Experiment 20000070 PARAMETER Experiment Name: At_100uM_ABA_Mutants_cDNA_P Parameter: Tissue Value: Aerial
  misc_feature: MA Experiment 20000070 PARAMETER Experiment Name: At_100uM_ABA_Mutants_cDNA_P Parameter: Treatment Value: 100uM ABA vs. No Treatment
  misc_feature: MA Experiment ID: 20000071 Result: Up-regulated in Transcription
  misc_feature: MA Experiment 20000071 PARAMETER Experiment Name: At_100uM_ABA_Mutants_cDNA_P Parameter: Plant Line Value: CS8104
  misc_feature: MA Experiment 20000071 PARAMETER Experiment Name: At_100uM_ABA_Mutants_cDNA_P Parameter: Timepoint (hr) Value: 6
  misc_feature: MA Experiment 20000071 PARAMETER Experiment Name: At_100uM_ABA_Mutants_cDNA_P Parameter: Tissue Value: Aerial
  misc_feature: MA Experiment 20000071 PARAMETER Experiment Name: At_100uM_ABA_Mutants_cDNA_P Parameter: Treatment Value: 100uM ABA vs. No Treatment
  misc_feature: MA Experiment ID: 20000087 Result: Up-regulated in Transcription
  misc_feature: MA Experiment 20000087 PARAMETER Experiment Name: At_100uM_ABA_Mutants_cDNA_P Parameter: Plant Line Value: WS
  misc_feature: MA Experiment 20000087 PARAMETER Experiment Name: At_100uM_ABA_Mutants_cDNA_P Parameter: Timepoint (hr) Value: 6
  misc_feature: MA Experiment 20000087 PARAMETER Experiment Name: At_100uM_ABA_Mutants_cDNA_P Parameter: Tissue Value: Aerial
  misc_feature: MA Experiment 20000087 PARAMETER Experiment Name: At_100uM_ABA_Mutants_cDNA_P Parameter: Treatment Value: 100uM ABA vs. No Treatment
  misc_feature: MA Experiment ID: 20000093 Result: Down-regulated in Transcription
  misc_feature: MA Experiment 20000093 PARAMETER Experiment Name: At_42deg_Heat_cDNA_P Parameter: Temperature (deg C) Value: 42 vs. 22
  misc_feature: MA Experiment 20000093 PARAMETER Experiment Name: At_42deg_Heat_cDNA_P Parameter: Timepoint (hr) Value: 0.5
  misc_feature: MA Experiment 20000093 PARAMETER Experiment Name: At_42deg_Heat_cDNA_P Parameter: Tissue Value: Aerial
  misc_feature: MA Experiment ID: 20000111 Result: Down-regulated in Transcription
  misc_feature: MA Experiment 20000111 PARAMETER Experiment Name: At_42deg_Heat_cDNA_P Parameter: Temperature (deg C) Value: 42 vs. 22
  misc_feature: MA Experiment 20000111 PARAMETER Experiment Name: At_42deg_Heat_cDNA_P Parameter: Timepoint (hr) Value: 6
  misc_feature: MA Experiment 20000111 PARAMETER Experiment Name: At_42deg_Heat_cDNA_P Parameter: Tissue Value: Aerial
  misc_feature: MA Experiment ID: 20000112 Result: Down-regulated in Transcription
  misc_feature: MA Experiment 20000112 PARAMETER Experiment Name: At_42deg_Heat_cDNA_P Parameter: Temperature (deg C) Value: 42 vs. 22
  misc_feature: MA Experiment 20000112 PARAMETER Experiment Name: At_42deg_Heat_cDNA_P Parameter: Timepoint (hr) Value: 2
  misc_feature: MA Experiment 20000112 PARAMETER Experiment Name: At_42deg_Heat_cDNA_P Parameter: Tissue Value: Aerial
  misc_feature: MA Experiment ID: 20000117 Result: Up-regulated in Transcription
  misc_feature: MA Experiment 20000117 PARAMETER Experiment Name: At_100uM_ABA_Mutants_cDNA_P Parameter: Plant Line Value: Columbia
  misc_feature: MA Experiment 20000117 PARAMETER Experiment Name: At_100uM_ABA_Mutants_cDNA_P Parameter: Timepoint (hr) Value: 6
  misc_feature: MA Experiment 20000117 PARAMETER Experiment Name: At_100uM_ABA_Mutants_cDNA_P Parameter: Tissue Value: Aerial
  misc_feature: MA Experiment 20000117 PARAMETER Experiment Name: At_100uM_ABA_Mutants_cDNA_P Parameter: Treatment Value: 100uM ABA vs. No Treatment
  misc_feature: MA Experiment ID: 20000144 Result: Down-regulated in Transcription
  misc_feature: MA Experiment 20000144 PARAMETER Experiment Name: At_42deg_Heat_cDNA_P Parameter: Temperature (deg C) Value: 42 vs. 22
  misc_feature: MA Experiment 20000144 PARAMETER Experiment Name: At_42deg_Heat_cDNA_P Parameter: Timepoint (hr) Value: 1
  misc_feature: MA Experiment 20000144 PARAMETER Experiment Name: At_42deg_Heat_cDNA_P Parameter: Tissue Value: Aerial
  misc_feature: MA Experiment ID: 20000171 Result: Down-regulated in Transcription
  misc_feature: MA Experiment 20000171 PARAMETER Experiment Name: At_42deg_Heat_P Parameter: Age (day) Value: 14
  misc_feature: MA Experiment 20000171 PARAMETER Experiment Name: At_42deg_Heat_P Parameter: Organism Value: A. thaliana
  misc_feature: MA Experiment 20000171 PARAMETER Experiment Name: At_42deg_Heat_P Parameter: Plant Line Value: WS
  misc_feature: MA Experiment 20000171 PARAMETER Experiment Name: At_42deg_Heat_P Parameter: Temperature (deg C) Value: 42 vs. 22
  misc_feature: MA Experiment 20000171 PARAMETER Experiment Name: At_42deg_Heat_P Parameter: Timepoint (hr) Value: 1
  misc_feature: MA Experiment 20000171 PARAMETER Experiment Name: At_42deg_Heat_P Parameter: Tissue Value: Aerial
  misc_feature: MA Experiment ID: 20000173 Result: Down-regulated in Transcription
  misc_feature: MA Experiment 20000173 PARAMETER Experiment Name: At_42deg_Heat_P Parameter: Age (day) Value: 14
  misc_feature: MA Experiment 20000173 PARAMETER Experiment Name: At_42deg_Heat_P Parameter: Organism Value: A. thaliana
  misc_feature: MA Experiment 20000173 PARAMETER Experiment Name: At_42deg_Heat_P Parameter: Plant Line Value: WS
  misc_feature: MA Experiment 20000173 PARAMETER Experiment Name: At_42deg_Heat_P Parameter: Temperature (deg C) Value: 42 vs. 22
  misc_feature: MA Experiment 20000173 PARAMETER Experiment Name: At_42deg_Heat_P Parameter: Timepoint (hr) Value: 6
  misc_feature: MA Experiment 20000173 PARAMETER Experiment Name: At_42deg_Heat_P Parameter: Tissue Value: Aerial
  misc_feature: MA Experiment ID: 20000179 Result: Up-regulated in Transcription
  misc_feature: MA Experiment 20000179 PARAMETER Experiment Name: At_Germinating_Seeds_P Parameter: Age (hr) Value: 6 vs. 0
  misc_feature: MA Experiment 20000179 PARAMETER Experiment Name: At_Germinating_Seeds_P Parameter: Tissue Value: Germinating Seeds
  misc_feature: MA Experiment ID: 20000180 Result: Up-regulated in Transcription
  misc_feature: MA Experiment 20000180 PARAMETER Experiment Name: At_Germinating_Seeds_P Parameter: Age (hr) Value: 24 vs. 0
  misc_feature: MA Experiment 20000180 PARAMETER Experiment Name: At_Germinating_Seeds_P Parameter: Tissue Value: Germinating Seeds
  misc_feature: MA Experiment ID: 20000213 Result: Up-regulated in Transcription
  misc_feature: MA Experiment 20000213 PARAMETER Experiment Name: At_4deg_Cold_P Parameter: Timepoint (hr) Value: 2
  misc_feature: MA Experiment ID: 20000224 Result: Down-regulated in Transcription
agcaaaccgaagtgggaacgaaaccccatgctccaagtccaattaaataacatatgtccacagaaatgttttcaaaattcgaataagccacagcaacgtgtcttgttcatatatccactataacccaaagctgcttcaatggtcggatatggacacgtgtcagttaatcagaccatctccaagaaaaaatatcccaaatctttcttccctattcagtcccccaatcaacaatcctcttcacatttctattttctcctccgaggtcgtctctcgaccaaaccacaaaaaccagaacaaaaataactaaaaaacaatcagatctgagatcgaacaaaacaacatgaacacgttaatcccatcggagaaaagatggatcatcaccggcgttttactagccggtttagttggcggtgctttgcttttcacaagcttcatacgagccgctgacgaaacgctcttcctctgttccacagcaagcgccaaaagcagagcggtggctgcggcagctgattacgaagcgactccgattcagcttcaagcgatcgtccactacgcgacatctaacgttgtcccacaacagaatcttgctgagatctcgatctctttcaacatcttgaaaaagctagctccggctaactttctcgtgttcggtctcggtcgtgactcgctcatgtgggcttctttaaatccacgtggcaaaaccttgttcttggaagaagatcttgaatggtttcagaaagtgaccaaagactctcctttcttacgtgcgcatcacgtgcgttacaggacgcagcttcaacaagccgattcgcttctacgttcgtacaaaacggagcctaagtgttttccggcgaaatcttatctccggggaaacgagaagtgtaagctagctctcacgggactgcccgatgagttctacgatacagagtgggatctgctgatggtcgatgctcctaaaggttacttcgcagaagctccgggaagaatggcggcgattttctcggcggctgttatggctaggaaccggaagaaaccgggagttacgcacgtgttcttgcacgatgttaatcggagggtggagaagacttttgccgaggagtttttatgccggaagtatagagtcaacgccgccgggaggttatggcattttgctattcctccggcggctgcgaacgctacgattgactctggtgattataggttttgctaagattgcgacacgatttatcttcttatttcctcttttgcccttttattttacttttttgaggaattttattacagcattgggttcacttactatctgatttagtgccgacagttttggatctgcatctcgtgtttcgttatttttagttacaggctttcc

SEQ ID NO: 21458 - protein, 289 aa, Arabidopsis thaliana
  peptide (1)..(289): Ceres Seq. ID no. 13491212
  misc_feature (42)..(289): Pfam Name: Protein of unknown function (DUF579) Pfam Description: Protein of unknown function (DUF579)
  misc_feature (42)..(289): Pfam Name: Protein of unknown function (DUF579) Pfam Description: Protein of unknown function (DUF579)
  misc_feature (42)..(289): Pfam Name: Protein of unknown function (DUF579) Pfam Description: Protein of unknown function (DUF579)
  misc_feature (43)..(289): Homolog of NCBI NO: 18397819 NR Description: expressed protein [Arabidopsis thaliana]
  misc_feature (1)..(278): Homolog of NCBI NO: 15234881 NR Description: expressed protein [Arabidopsis thaliana]
  misc_feature (48)..(289): Homolog of NCBI NO: 25402555 NR Description: hypothetical protein [imported] - Arabidopsis
  misc_feature (62)..(279): Homolog of NCBI NO: 18398986 NR Description: expressed protein [Arabidopsis thaliana]
  misc_feature (16)..(289): Homolog of NCBI NO: 15217566 NR Description: hypothetical protein [Arabidopsis thaliana]
  misc_feature (43)..(289): Homolog of NCBI NO: 18397819 NR Description: expressed protein [Arabidopsis thaliana]
  misc_feature (48)..(289): Homolog of NCBI NO: 25402555 NR Description: hypothetical protein [imported] - Arabidopsis
  misc_feature (16)..(289): Homolog of NCBI NO: 15217566 NR Description: hypothetical protein [Arabidopsis thaliana]
  misc_feature (62)..(279): Homolog of NCBI NO: 18398986 NR Description: expressed protein [Arabidopsis thaliana]
  misc_feature (48)..(289): Homolog of NCBI NO: 25402555 NR Description: hypothetical protein [imported] - Arabidopsis
  misc_feature (1)..(278): Homolog of NCBI NO: 15234881 NR Description: expressed protein [Arabidopsis thaliana]
  misc_feature (43)..(289): Homolog of NCBI NO: 18397819 NR Description: expressed protein [Arabidopsis thaliana]
  misc_feature (1)..(289): Homolog of NCBI NO: 18396558 NR Description: expressed protein [Arabidopsis thaliana]
  misc_feature (1)..(289): Homolog of NCBI NO: 21537399 NR Description: unknown [Arabidopsis thaliana]
  misc_feature (8)..(289): Homolog of NCBI NO: 15220402 NR Description: expressed protein [Arabidopsis thaliana]
  misc_feature (29)..(289): Homolog of NCBI NO: 18409879 NR Description: expressed protein [Arabidopsis thaliana]
  misc_feature (29)..(289): Homolog of NCBI NO: 25354648 NR Description: hypothetical protein F14O23.3 [imported] -
  misc_feature (1)..(289): Homolog of NCBI NO: 18396558 NR Description: expressed protein [Arabidopsis thaliana]
  misc_feature (1)..(289): Homolog of NCBI NO: 21537399 NR Description: unknown [Arabidopsis thaliana]
  misc_feature (8)..(289): Homolog of NCBI NO: 15220402 NR Description: expressed protein [Arabidopsis thaliana]
  misc_feature (29)..(289): Homolog of NCBI NO: 18409879 NR Description: expressed protein [Arabidopsis thaliana]
  misc_feature (29)..(289): Homolog of NCBI NO: 25354648 NR Description: hypothetical protein F14O23.3 [imported] -
  misc_feature (16)..(289): Homolog of NCBI NO: 15217566 NR Description: hypothetical protein [Arabidopsis thaliana]
  misc_feature (62)..(279): Homolog of NCBI NO: 18398986 NR Description: expressed protein [Arabidopsis thaliana]
  misc_feature (1)..(278): Homolog of NCBI NO: 15234881 NR Description: expressed protein [Arabidopsis thaliana]
  misc_feature (29)..(289): Homolog of NCBI NO: 25354648 NR Description: hypothetical protein F14O23.3 [imported] -
  misc_feature (29)..(289): Homolog of NCBI NO: 18409879 NR Description: expressed protein [Arabidopsis thaliana]
  misc_feature (8)..(289): Homolog of NCBI NO: 15220402 NR Description: expressed protein [Arabidopsis thaliana]
  misc_feature (1)..(289): Homolog of NCBI NO: 21537399 NR Description: unknown [Arabidopsis thaliana]
  misc_feature (1)..(289): Homolog of NCBI NO: 18396558 NR Description: expressed protein [Arabidopsis thaliana]
MNTLIPSEKRWIITGVLLAGLVGGALLFTSFIRAADETLFLCSTASAKSRAVAAAADYEATPIQLQAIVHYATSNVVPQQNLAEISISFNILKKLAPANFLVFGLGRDSLMWASLNPRGKTLFLEEDLEWFQKVTKDSPFLRAHHVRYRTQLQQADSLLRSYKTEPKCFPAKSYLRGNEKCKLALTGLPDEFYDTEWDLLMVDAPKGYFAEAPGRMAAIFSAAVMARNRKKPGVTHVFLHDVNRRVEKTFAEEFLCRKYRVNAAGRLWHFAIPPAAANATIDSGDYRFC

SEQ ID NO: 21459 - protein, 179 aa, Arabidopsis thaliana
  peptide (1)..(179): Ceres Seq. ID no. 13491213
  misc_feature (1)..(179): Pfam Name: Protein of unknown function (DUF579) Pfam Description: Protein of unknown function (DUF579)
  misc_feature (1)..(179): Pfam Name: Protein of unknown function (DUF579) Pfam Description: Protein of unknown function (DUF579)
  misc_feature (1)..(179): Pfam Name: Protein of unknown function (DUF579) Pfam Description: Protein of unknown function (DUF579)
  misc_feature (1)..(179): Homolog of NCBI NO: 18397819 NR Description: expressed protein [Arabidopsis thaliana]
  misc_feature (1)..(168): Homolog of NCBI NO: 15234881 NR Description: expressed protein [Arabidopsis thaliana]
  misc_feature (1)..(179): Homolog of NCBI NO: 25402555 NR Description: hypothetical protein [imported] - Arabidopsis
  misc_feature (1)..(169): Homolog of NCBI NO: 18398986 NR Description: expressed protein [Arabidopsis thaliana]
  misc_feature (1)..(179): Homolog of NCBI NO: 15217566 NR Description: hypothetical protein [Arabidopsis thaliana]
  misc_feature (1)..(168): Homolog of NCBI NO: 15234881 NR Description: expressed protein [Arabidopsis thaliana]
  misc_feature (1)..(169): Homolog of NCBI NO: 18398986 NR Description: expressed protein [Arabidopsis thaliana]
  misc_feature (1)..(179): Homolog of NCBI NO: 25402555 NR Description: hypothetical protein [imported] - Arabidopsis
  misc_feature (1)..(168): Homolog of NCBI NO: 15234881 NR Description: expressed protein [Arabidopsis thaliana]
  misc_feature (1)..(179): Homolog of NCBI NO: 18397819 NR Description: expressed protein [Arabidopsis thaliana]
  misc_feature (1)..(179): Homolog of NCBI NO: 18396558 NR Description: expressed protein [Arabidopsis thaliana]
  misc_feature (1)..(179): Homolog of NCBI NO: 21537399 NR Description: unknown [Arabidopsis thaliana]
  misc_feature (1)..(179): Homolog of NCBI NO: 15220402 NR Description: expressed protein [Arabidopsis thaliana]
  misc_feature (1)..(179): Homolog of NCBI NO: 18409879 NR Description: expressed protein [Arabidopsis thaliana]
  misc_feature (1)..(179): Homolog of NCBI NO: 25354648 NR Description: hypothetical protein F14O23.3 [imported] -
  misc_feature (1)..(179): Homolog of NCBI NO: 15217566 NR Description: hypothetical protein [Arabidopsis thaliana]
  misc_feature (1)..(179): Homolog of NCBI NO: 18396558 NR Description: expressed protein [Arabidopsis thaliana]
  misc_feature (1)..(179): Homolog of NCBI NO: 21537399 NR Description: unknown [Arabidopsis thaliana]
  misc_feature (1)..(179): Homolog of NCBI NO: 15220402 NR Description: expressed protein [Arabidopsis thaliana]
  misc_feature (1)..(179): Homolog of NCBI NO: 18409879 NR Description: expressed protein [Arabidopsis thaliana]
  misc_feature (1)..(179): Homolog of NCBI NO: 25354648 NR Description: hypothetical protein F14O23.3 [imported] -
  misc_feature (1)..(179): Homolog of NCBI NO: 15217566 NR Description: hypothetical protein [Arabidopsis thaliana]
  misc_feature (1)..(169): Homolog of NCBI NO: 18398986 NR Description: expressed protein [Arabidopsis thaliana]
  misc_feature (1)..(179): Homolog of NCBI NO: 25402555 NR Description: hypothetical protein [imported] - Arabidopsis
  misc_feature (1)..(179): Homolog of NCBI NO: 18397819 NR Description: expressed protein [Arabidopsis thaliana]
  misc_feature (1)..(179): Homolog of NCBI NO: 25354648 NR Description: hypothetical protein F14O23.3 [imported] -
  misc_feature (1)..(179): Homolog of NCBI NO: 18409879 NR Description: expressed protein [Arabidopsis thaliana]
  misc_feature (1)..(179): Homolog of NCBI NO: 15220402 NR Description: expressed protein [Arabidopsis thaliana]
  misc_feature (1)..(179): Homolog of NCBI NO: 21537399 NR Description: unknown [Arabidopsis thaliana]
  misc_feature (1)..(179): Homolog of NCBI NO: 18396558 NR Description: expressed protein [Arabidopsis thaliana]
MWASLNPRGKTLFLEEDLEWFQKVTKDSPFLRAHHVRYRTQLQQADSLLRSYKTEPKCFPAKSYLRGNEKCKLALTGLPDEFYDTEWDLLMVDAPKGYFAEAPGRMAAIFSAAVMARNRKKPGVTHVFLHDVNRRVEKTFAEEFLCRKYRVNAAGRLWHFAIPPAAANATIDSGDYRFC

SEQ ID NO: 21460 - DNA, 1211 bp, Arabidopsis thaliana
  misc_feature (1)..(1211): Ceres Seq. ID no. 12339150
  misc_feature: MA Experiment ID: 108561 Result: Up-regulated in Transcription
  misc_feature: MA Experiment 108561 PARAMETER Experiment Name: At_100uM_ABA_cDNA_P Parameter: Timepoint (hr) Value: 6
  misc_feature: MA Experiment 108561 PARAMETER Experiment Name: At_100uM_ABA_cDNA_P Parameter: Tissue Value: Aerial
  misc_feature: MA Experiment 108561 PARAMETER Experiment Name: At_100uM_ABA_cDNA_P Parameter: Treatment Value: 100uM ABA vs. No Treatment
  misc_feature: MA Experiment ID: 108572 Result: Up-regulated in Transcription
  misc_feature: MA Experiment 108572 PARAMETER Experiment Name: At_Drought_cDNA_P Parameter: Timepoint (hr) Value: 1
  misc_feature: MA Experiment 108572 PARAMETER Experiment Name: At_Drought_cDNA_P Parameter: Tissue Value: Aerial
  misc_feature: MA Experiment 108572 PARAMETER Experiment Name: At_Drought_cDNA_P Parameter: Treatment Value: Drought vs. No Drought
  misc_feature: MA Experiment ID: 20000166 Result: Up-regulated in Transcription
  misc_feature: MA Experiment 20000166 PARAMETER Experiment Name: At_100uM_ABA_P Parameter: Age (day) Value: 14
  misc_feature: MA Experiment 20000166 PARAMETER Experiment Name: At_100uM_ABA_P Parameter: Organism Value: A. thaliana
  misc_feature: MA Experiment 20000166 PARAMETER Experiment Name: At_100uM_ABA_P Parameter: Plant Line Value: WS
  misc_feature: MA Experiment 20000166 PARAMETER Experiment Name: At_100uM_ABA_P Parameter: Timepoint (hr) Value: 1
  misc_feature: MA Experiment 20000166 PARAMETER Experiment Name: At_100uM_ABA_P Parameter: Tissue Value: Aerial
  misc_feature: MA Experiment 20000166 PARAMETER Experiment Name: At_100uM_ABA_P Parameter: Treatment Value: 100uM ABA vs. No Treatment
  misc_feature: MA Experiment ID: 20000169 Result: Up-regulated in Transcription
  misc_feature: MA Experiment 20000169 PARAMETER Experiment Name: At_100uM_ABA_P Parameter: Age (day) Value: 14
  misc_feature: MA Experiment 20000169 PARAMETER Experiment Name: At_100uM_ABA_P Parameter: Organism Value: A. thaliana
  misc_feature: MA Experiment 20000169 PARAMETER Experiment Name: At_100uM_ABA_P Parameter: Plant Line Value: WS
  misc_feature: MA Experiment 20000169 PARAMETER Experiment Name: At_100uM_ABA_P Parameter: Timepoint (hr) Value: 6
  misc_feature: MA Experiment 20000169 PARAMETER Experiment Name: At_100uM_ABA_P Parameter: Tissue Value: Aerial
  misc_feature: MA Experiment 20000169 PARAMETER Experiment Name: At_100uM_ABA_P Parameter: Treatment Value: 100uM ABA vs. No Treatment
  misc_feature: MA Experiment ID: 20000171 Result: Down-regulated in Transcription
  misc_feature: MA Experiment 20000171 PARAMETER Experiment Name: At_42deg_Heat_P Parameter: Age (day) Value: 14
  misc_feature: MA Experiment 20000171 PARAMETER Experiment Name: At_42deg_Heat_P Parameter: Organism Value: A. thaliana
  misc_feature: MA Experiment 20000171 PARAMETER Experiment Name: At_42deg_Heat_P Parameter: Plant Line Value: WS
  misc_feature: MA Experiment 20000171 PARAMETER Experiment Name: At_42deg_Heat_P Parameter: Temperature (deg C) Value: 42 vs. 22
  misc_feature: MA Experiment 20000171 PARAMETER Experiment Name: At_42deg_Heat_P Parameter: Timepoint (hr) Value: 1
  misc_feature: MA Experiment 20000171 PARAMETER Experiment Name: At_42deg_Heat_P Parameter: Tissue Value: Aerial
  misc_feature: MA Experiment ID: 20000173 Result: Down-regulated in Transcription
  misc_feature: MA Experiment 20000173 PARAMETER Experiment Name: At_42deg_Heat_P Parameter: Age (day) Value: 14
  misc_feature: MA Experiment 20000173 PARAMETER Experiment Name: At_42deg_Heat_P Parameter: Organism Value: A. thaliana
  misc_feature: MA Experiment 20000173 PARAMETER Experiment Name: At_42deg_Heat_P Parameter: Plant Line Value: WS
  misc_feature: MA Experiment 20000173 PARAMETER Experiment Name: At_42deg_Heat_P Parameter: Temperature (deg C) Value: 42 vs. 22
  misc_feature: MA Experiment 20000173 PARAMETER Experiment Name: At_42deg_Heat_P Parameter: Timepoint (hr) Value: 6
  misc_feature: MA Experiment 20000173 PARAMETER Experiment Name: At_42deg_Heat_P Parameter: Tissue Value: Aerial
  misc_feature: MA Experiment ID: 20000184 Result: Down-regulated in Transcription
  misc_feature: MA Experiment 20000184 PARAMETER Experiment Name: At_Shoots__P Parameter: Age (day) Value: 7
  misc_feature: MA Experiment 20000184 PARAMETER Experiment Name: At_Shoots__P Parameter: Tissue Value: Shoots vs. Whole Plant
  misc_feature: MA Experiment ID: 20000185 Result: Down-regulated in Transcription
  misc_feature: MA Experiment 20000185 PARAMETER Experiment Name: At_Roots__P Parameter: Age (day) Value: 7 vs. 21
  misc_feature: MA Experiment 20000185 PARAMETER Experiment Name: At_Roots__P Parameter: Organism Value: A. thaliana
  misc_feature: MA Experiment 20000185 PARAMETER Experiment Name: At_Roots__P Parameter: Tissue Value: Roots vs. Whole Plant
  misc_feature: MA Experiment ID: 20000234 Result: Up-regulated in Transcription
  misc_feature: MA Experiment 20000234 PARAMETER Experiment Name: At_Siliques_P Parameter: Age (day) Value: 21
  misc_feature: MA Experiment 20000234 PARAMETER Experiment Name: At_Siliques_P Parameter: Organism Value: A. thaliana
  misc_feature: MA Experiment 20000234 PARAMETER Experiment Name: At_Siliques_P Parameter: Plant Line Value: WS
  misc_feature: MA Experiment 20000234 PARAMETER Experiment Name: At_Siliques_P Parameter: Tissue Value: Less Than 5mm Siliques vs. Whole Plant
  misc_feature: MA Experiment ID: 20000235 Result: Up-regulated in Transcription
  misc_feature: MA Experiment 20000235 PARAMETER Experiment Name: At_Siliques_P Parameter: Age (day) Value: 21
  misc_feature: MA Experiment 20000235 PARAMETER Experiment Name: At_Siliques_P Parameter: Organism Value: A. thaliana
  misc_feature: MA Experiment 20000235 PARAMETER Experiment Name: At_Siliques_P Parameter: Plant Line Value: WS
  misc_feature: MA Experiment 20000235 PARAMETER Experiment Name: At_Siliques_P Parameter: Tissue Value: 5-10mm Siliques vs. Whole Plant
  misc_feature: MA Experiment ID: 20000267 Result: Up-regulated in Transcription
  misc_feature: MA Experiment 20000267 PARAMETER Experiment Name: At_Drought_P Parameter: Age (day) Value: 7
  misc_feature: MA Experiment 20000267 PARAMETER Experiment Name: At_Drought_P Parameter: Organism Value: A. thaliana
  misc_feature: MA Experiment 20000267 PARAMETER Experiment Name: At_Drought_P Parameter: Plant Line Value: WS
  misc_feature: MA Experiment 20000267 PARAMETER Experiment Name: At_Drought_P Parameter: Timepoint (hr) Value: 6
  misc_feature: MA Experiment 20000267 PARAMETER Experiment Name: At_Drought_P Parameter: Tissue Value: Whole Plant
  misc_feature: MA Experiment 20000267 PARAMETER Experiment Name: At_Drought_P Parameter: Treatment Value: Drought vs. No Drought
  misc_feature: MA Experiment ID: 20000437 Result: Up-regulated in Transcription
  misc_feature: MA Experiment 20000437 PARAMETER Experiment Name: At_Drought_P Parameter: Age (day) Value: 8
  misc_feature: MA Experiment 20000437 PARAMETER Experiment Name: At_Drought_P Parameter: Organism Value: A. thaliana
  misc_feature: MA Experiment 20000437 PARAMETER Experiment Name: At_Drought_P Parameter: Plant Line Value: WS
  misc_feature: MA Experiment 20000437 PARAMETER Experiment Name: At_Drought_P Parameter: Timepoint (hr) Value: 24
  misc_feature: MA Experiment 20000437 PARAMETER Experiment Name: At_Drought_P Parameter: Tissue Value: Whole Plant
  misc_feature: MA Experiment 20000437 PARAMETER Experiment Name: At_Drought_P Parameter: Treatment Value: Drought vs. No Drought
  misc_feature: MA Experiment ID: 20000438 Result: Down-regulated in Transcription
  misc_feature: MA Experiment 20000438 PARAMETER Experiment Name: At_Shoots__P Parameter: Age (day) Value: 14
  misc_feature: MA Experiment 20000438 PARAMETER Experiment Name: At_Shoots__P Parameter: Tissue Value: Shoots vs. Whole Plant
  misc_feature: MA Experiment ID: 20000441 Result: Down-regulated in Transcription
  misc_feature: MA Experiment 20000441 PARAMETER Experiment Name: At_1uM_BR-BRZ__P Parameter: Tissue Value: Shoot Apices
  misc_feature: MA Experiment 20000441 PARAMETER Experiment Name: At_1uM_BR-BRZ__P Parameter: Treatment Value: 1uM BR vs. No Treatment
  misc_feature: MA Experiment ID: 20000453 Result: Up-regulated in Transcription
  misc_feature: MA Experiment 20000453 PARAMETER Experiment Name: At_100uM_ABA_P Parameter: Age (day) Value: 15
  misc_feature: MA Experiment 20000453 PARAMETER Experiment Name: At_100uM_ABA_P Parameter: Organism Value: A. thaliana
  misc_feature: MA Experiment 20000453 PARAMETER Experiment Name: At_100uM_ABA_P Parameter: Plant Line Value: WS
  misc_feature: MA Experiment 20000453 PARAMETER Experiment Name: At_100uM_ABA_P Parameter: Timepoint (hr) Value: 24
  misc_feature: MA Experiment 20000453 PARAMETER Experiment Name: At_100uM_ABA_P Parameter: Tissue Value: Aerial
  misc_feature: MA Experiment 20000453 PARAMETER Experiment Name: At_100uM_ABA_P Parameter: Treatment Value: 100uM ABA vs. No Treatment
  misc_feature: MA Experiment ID: 20000455 Result: Up-regulated in Transcription
  misc_feature: MA Experiment 20000455 PARAMETER Experiment Name: At_100uM_ABA_P Parameter: Age (day) Value: 16
  misc_feature: MA Experiment 20000455 PARAMETER Experiment Name: At_100uM_ABA_P Parameter: Organism Value: A. thaliana
  misc_feature: MA Experiment 20000455 PARAMETER Experiment Name: At_100uM_ABA_P Parameter: Plant Line Value: WS
  misc_feature: MA Experiment 20000455 PARAMETER Experiment Name: At_100uM_ABA_P Parameter: Timepoint (hr) Value: 48
  misc_feature: MA Experiment 20000455 PARAMETER Experiment Name: At_100uM_ABA_P Parameter: Tissue Value: Aerial
  misc_feature: MA Experiment 20000455 PARAMETER Experiment Name: At_100uM_ABA_P Parameter: Treatment Value: 100uM ABA vs. No Treatment
  misc_feature: MA Experiment ID: 20000794 Result: Down-regulated in Transcription
  misc_feature: MA Experiment 20000794 PARAMETER Experiment Name: At_Petals_P Parameter: Age (day) Value: 23-25 days
  misc_feature: MA Experiment 20000794 PARAMETER Experiment Name: At_Petals_P Parameter: Plant Line Value: WS
  misc_feature: MA Experiment 20000794 PARAMETER Experiment Name: At_Petals_P Parameter: Tissue Value: Petals vs. Whole plant
  misc_feature: MA Experiment ID: 20001248 Result: Down-regulated in Transcription
  misc_feature: MA Experiment 20001248 PARAMETER Experiment Name: At_Far-red-induction_P Parameter: Age (day) Value: 7
  misc_feature: MA Experiment 20001248 PARAMETER Experiment Name: At_Far-red-induction_P Parameter: Light Value: Far-red vs. White
  misc_feature: MA Experiment 20001248 PARAMETER Experiment Name: At_Far-red-induction_P Parameter: Organism Value: A. thaliana
  misc_feature: MA Experiment 20001248 PARAMETER Experiment Name: At_Far-red-induction_P Parameter: Plant Line Value: Columbia
  misc_feature: MA Experiment 20001248 PARAMETER Experiment Name: At_Far-red-induction_P Parameter: Timepoint (hr) Value: 4
  misc_feature: MA Experiment 20001248 PARAMETER Experiment Name: At_Far-red-induction_P Parameter: Tissue Value: Whole Plant
  misc_feature: MA Experiment ID: 20001451 Result: Down-regulated in Transcription
  misc_feature: MA Experiment 20001451 PARAMETER Experiment Name: At_Far-red-induction_P Parameter: Age (day) Value: 7
  misc_feature: MA Experiment 20001451 PARAMETER Experiment Name: At_Far-red-induction_P Parameter: Light Value: Far-red vs. White
  misc_feature: MA Experiment 20001451 PARAMETER Experiment Name: At_Far-red-induction_P Parameter: Organism Value: A. thaliana
  misc_feature: MA Experiment 20001451 PARAMETER Experiment Name: At_Far-red-induction_P Parameter: Plant Line Value: Columbia
  misc_feature: MA Experiment 20001451 PARAMETER Experiment Name: At_Far-red-induction_P Parameter: Timepoint (hr) Value: 24
  misc_feature: MA Experiment 20001451 PARAMETER Experiment Name: At_Far-red-induction_P Parameter: Tissue Value: Whole Plant
  misc_feature: MA Experiment ID: 20001560 Result: Up-regulated in Transcription
  misc_feature: MA Experiment 20001560 PARAMETER Experiment Name: At_Drought_Soil_Dry_P Parameter: Age (day) Value: 28
  misc_feature: MA Experiment 20001560 PARAMETER Experiment Name: At_Drought_Soil_Dry_P Parameter: Organism Value: A. thaliana
  misc_feature: MA Experiment 20001560 PARAMETER Experiment Name: At_Drought_Soil_Dry_P Parameter: Plant Line Value: WS
  misc_feature: MA Experiment 20001560 PARAMETER Experiment Name: At_Drought_Soil_Dry_P Parameter: Post Timepoint (hr) Value: None
  misc_feature: MA Experiment 20001560 PARAMETER Experiment Name: At_Drought_Soil_Dry_P Parameter: Post-Treatment Value: None
  misc_feature: MA Experiment 20001560 PARAMETER Experiment Name: At_Drought_Soil_Dry_P Parameter: Timepoint (day) Value: 14
  misc_feature: MA Experiment 20001560 PARAMETER Experiment Name: At_Drought_Soil_Dry_P Parameter: Treatment Value: Drought vs. No Drought
  misc_feature: MA Experiment ID: 20001773 Result: Up-regulated in Transcription
  misc_feature: MA Experiment 20001773 PARAMETER Experiment Name: At_Far-red-enriched-adult_P Parameter: Age (day) Value: 30
  misc_feature: MA Experiment 20001773 PARAMETER Experiment Name: At_Far-red-enriched-adult_P Parameter: Light Value: Far-red enriched vs. White
  misc_feature: MA Experiment 20001773 PARAMETER Experiment Name: At_Far-red-enriched-adult_P Parameter: Organism Value: A. thaliana
  misc_feature: MA Experiment 20001773 PARAMETER Experiment Name: At_Far-red-enriched-adult_P Parameter: Plant Line Value: Columbia
  misc_feature: MA Experiment 20001773 PARAMETER Experiment Name: At_Far-red-enriched-adult_P Parameter: Timepoint (hr) Value: 48
  misc_feature: MA Experiment 20001773 PARAMETER Experiment Name: At_Far-red-enriched-adult_P Parameter: Tissue Value: Aerial
  misc_feature: MA Experiment ID: 20001906 Result: Down-regulated in Transcription
  misc_feature: MA Experiment 20001906 PARAMETER Experiment Name: At_Drought_Reproduction_P Parameter: Age (day) Value: 35
  misc_feature: MA Experiment 20001906 PARAMETER Experiment Name: At_Drought_Reproduction_P Parameter: Organism Value: A. thaliana
  misc_feature: MA Experiment 20001906 PARAMETER Experiment Name: At_Drought_Reproduction_P Parameter: Plant Line Value: WS
  misc_feature: MA Experiment 20001906 PARAMETER Experiment Name: At_Drought_Reproduction_P Parameter: Timepoint (day) Value: 5
  misc_feature: MA Experiment 20001906 PARAMETER Experiment Name: At_Drought_Reproduction_P Parameter: Tissue Value: Siliques
  misc_feature: MA Experiment 20001906 PARAMETER Experiment Name: At_Drought_Reproduction_P Parameter: Treatment Value: Drought vs. No Drought
  misc_feature: MA Experiment ID: 20001908 Result: Down-regulated in Transcription
  misc_feature: MA Experiment 20001908 PARAMETER Experiment Name: At_Drought_Reproduction_P Parameter: Age (day) Value: 40
  misc_feature: MA Experiment 20001908 PARAMETER Experiment Name: At_Drought_Reproduction_P Parameter: Organism Value: A. thaliana
  misc_feature: MA Experiment 20001908 PARAMETER Experiment Name: At_Drought_Reproduction_P Parameter: Plant Line Value: WS
  misc_feature: MA Experiment 20001908 PARAMETER Experiment Name: At_Drought_Reproduction_P Parameter: Timepoint (day) Value: 10
  misc_feature: MA Experiment 20001908 PARAMETER Experiment Name: At_Drought_Reproduction_P Parameter: Tissue Value: Siliques
  misc_feature: MA Experiment 20001908 PARAMETER Experiment Name: At_Drought_Reproduction_P Parameter: Treatment Value: Drought vs. No Drought
  misc_feature: MA Experiment ID: 20001911 Result: Down-regulated in Transcription
  misc_feature: MA Experiment 20001911 PARAMETER Experiment Name: At_Drought_Reproduction_P Parameter: Age (day) Value: 40
  misc_feature: MA Experiment 20001911 PARAMETER Experiment Name: At_Drought_Reproduction_P Parameter: Organism Value: A. thaliana
  misc_feature: MA Experiment 20001911 PARAMETER Experiment Name: At_Drought_Reproduction_P Parameter: Plant Line Value: WS
  misc_feature: MA Experiment 20001911 PARAMETER Experiment Name: At_Drought_Reproduction_P Parameter: Timepoint (day) Value: 10
  misc_feature: MA Experiment 20001911 PARAMETER Experiment Name: At_Drought_Reproduction_P Parameter: Tissue Value: Flowers
  misc_feature: MA Experiment 20001911 PARAMETER Experiment Name: At_Drought_Reproduction_P Parameter: Treatment Value: Drought vs. No Drought
aaaagcaacatgaaagacaattcaagctggtcttgttcttgttcttggtcttcgtggaaaatatgtttgttgtctgttctctttctcaccgagacgatcaccgccgtgaagcctgccgccaaaattgattattccggctgtaatcgctttcggagactccatcgtcgacacaggaatgaacaacaatgtcaaaaccgtggttaagtgtgattttcttccttatggtatcaatttccaaagcggagttgccacggggagattctgcgatggacgagtccctgccgatttgctagccgaagaactgggaataaaatcaattgtaccagcatacctagatccgaatctaaaatcgaaagatcttttaaccggtgtatcgtttgcgtccggaggttctggttatgatcctataacaccgaaacttgtggcagtaatatcattagaagatcaattgagttatttcgaggagtacatagagaaagtgaagaatatagttggggaagcaagaaaagacttcatagtagccaacagcttattcttattggtcgcaggcagcgacgacatagccaatacatactatactctacgtgcaagacctgaatacgacgtcgattcatacactactcttatgtctgactctgcctcagaatttgtgactaaactatatggatatggagtgagaagagtagctgtgtttggtgcaccaccaattgggtgtgtaccatcacagagaacgttaggaggaggtatcttgagagattgtgctgataattacaacgaagcagcaaaactttttaattcaaagctctccccaaaattggattcgttgcgtaaaaccctaccgggcatcaaaccgatctacattaatatctatgatcctctttttgacatcatccagaatcctgcaaattatgggtttgaagtgtctaataaaggatgctgtggaacaggagccatagaagttgctgtgttgtgcaataaaatcacatcttctgtatgtcccgacgtgtctactcatgtgttttgggacagttatcatcctacagagaaaacttacaaagtattagtctcactgttgattaacaaatttgttaatcagttcgtctgaattaaaaactattttcacggcataatgattgattatattttatctcatcttgtttgtattatttgataattgtattcgatttaaataaaattaatattttcttgtt

SEQ ID NO: 21461 - protein, 309 aa, Arabidopsis thaliana
  peptide (1)..(309): Ceres Seq. ID no. 12339151
  misc_feature (1)..(296): Pfam Name: GDSL-like Lipase/Acylhydrolase Pfam Description: GDSL-like Lipase/Acylhydrolase
  misc_feature (1)..(297): Homolog of NCBI NO: 8778807 NR Description: T4O12.12 [Arabidopsis thaliana]
  misc_feature (1)..(308): Homolog of NCBI NO: 21592372 NR Description: anter-specific proline-rich protein APG
  misc_feature (1)..(305): Homolog of NCBI NO: 18410956 NR Description: family II extracellular lipase 2 (EXL2)
  misc_feature (1)..(305): Homolog of NCBI NO: 8778807 NR Description: T4O12.12 [Arabidopsis thaliana]
  misc_feature (1)..(308): Homolog of NCBI NO: 18394825 NR Description: anter-specific proline-rich protein APG
  misc_feature (1)..(308): Homolog of NCBI NO: 18410954 NR Description: family II extracellular lipase 1 (EXL1)
  misc_feature (1)..(308): Homolog of NCBI NO: 28393626 NR Description: putative family II extracellular lipase 1 (EXL1)
  misc_feature (1)..(306): Homolog of NCBI NO: 25404994 NR Description: protein T4O12.13 [imported] - Arabidopsis
  misc_feature (1)..(309): Homolog of NCBI NO: 26449364 NR Description: putative family II lipase EXL3 [Arabidopsis
  misc_feature (1)..(309): Homolog of NCBI NO: 15222901 NR Description: family II extracellular lipase 3 (EXL3)
MNNNVKTVVKCDFLPYGINFQSGVATGRFCDGRVPADLLAEELGIKSIVPAYLDPNLKSKDLLTGVSFASGGSGYDPITPKLVAVISLEDQLSYFEEYIEKVKNIVGEARKDFIVANSLFLLVAGSDDIANTYYTLRARPEYDVDSYTTLMSDSASEFVTKLYGYGVRRVAVFGAPPIGCVPSQRTLGGGILRDCADNYNEAAKLFNSKLSPKLDSLRKTLPGIKPIYINIYDPLFDIIQNPANYGFEVSNKGCCGTGAIEVAVLCNKITSSVCPDVSTHVFWDSYHPTEKTYKVLVSLLINKFVNQFV

SEQ ID NO: 21462 - protein, 159 aa, Arabidopsis thaliana
  peptide (1)..(159): Ceres Seq. ID no. 12339153
  misc_feature (1)..(146): Pfam Name: GDSL-like Lipase/Acylhydrolase Pfam Description: GDSL-like Lipase/Acylhydrolase
  misc_feature (1)..(147): Homolog of NCBI NO: 8778807 NR Description: T4O12.12 [Arabidopsis thaliana]
  misc_feature (1)..(158): Homolog of NCBI NO: 21592372 NR Description: anter-specific proline-rich protein APG
  misc_feature (1)..(155): Homolog of NCBI NO: 18410956 NR Description: family II extracellular lipase 2 (EXL2)
  misc_feature (1)..(155): Homolog of NCBI NO: 8778807 NR Description: T4O12.12 [Arabidopsis thaliana]
  misc_feature (1)..(158): Homolog of NCBI NO: 18394825 NR Description: anter-specific proline-rich protein APG
  misc_feature (1)..(158): Homolog of NCBI NO: 18410954 NR Description: family II extracellular lipase 1 (EXL1)
  misc_feature (1)..(158): Homolog of NCBI NO: 28393626 NR Description: putative family II extracellular lipase 1 (EXL1)
  misc_feature (1)..(156): Homolog of NCBI NO: 25404994 NR Description: protein T4O12.13 [imported] - Arabidopsis
  misc_feature (1)..(159): Homolog of NCBI NO: 26449364 NR Description: putative family II lipase EXL3 [Arabidopsis
  misc_feature (1)..(159): Homolog of NCBI NO: 15222901 NR Description: family II extracellular lipase 3 (EXL3)
MSDSASEFVTKLYGYGVRRVAVFGAPPIGCVPSQRTLGGGILRDCADNYNEAAKLFNSKLSPKLDSLRKTLPGIKPIYINIYDPLFDIIQNPANYGFEVSNKGCCGTGAIEVAVLCNKITSSVCPDVSTHVFWDSYHPTEKTYKVLVSLLINKFVNQFV

SEQ ID NO: 21463 - DNA, 1529 bp, Arabidopsis thaliana
  misc_feature (1)..(1529): Ceres Seq. ID no. 13591513
  misc_feature: MA Experiment ID: 108595 Result: Down-regulated in Transcription
  misc_feature: MA Experiment 108595 PARAMETER Experiment Name: At_Ler-pi_Ovule_cDNA_P Parameter: Plant Line Value: null
  misc_feature: MA Experiment ID: 20000087 Result: Down-regulated in Transcription
  misc_feature: MA Experiment 20000087 PARAMETER Experiment Name: At_100uM_ABA_Mutants_cDNA_P Parameter: Plant Line Value: WS
  misc_feature: MA Experiment 20000087 PARAMETER Experiment Name: At_100uM_ABA_Mutants_cDNA_P Parameter: Timepoint (hr) Value: 6
  misc_feature: MA Experiment 20000087 PARAMETER Experiment Name: At_100uM_ABA_Mutants_cDNA_P Parameter: Tissue Value: Aerial
  misc_feature: MA Experiment 20000087 PARAMETER Experiment Name: At_100uM_ABA_Mutants_cDNA_P Parameter: Treatment Value: 100uM ABA vs. No Treatment
  misc_feature: MA Experiment ID: 20000224 Result: Down-regulated in Transcription
gaacaatctctcatctttagcatagttgtgttatcttcttcttcatcacaatttttctacggtcagagattcaaaagagttctttctctctatcttattctccgatcatcatgatgcagcagccaccacccggaggtatccttccacatcacgctcctcctccttctgcgcaacaacagtacggttaccaacaaccttacgggattgctggagctgctccaccaccaccacagatgtggaatcctcaagcggcggcgccgccatcagttcagcctacgaccgctgacgagatccggactctttggatcggggacttacagtattggatggatgagaatttcctctacggttgctttgctcataccggagagatggtttctgctaaagtgattcgtaacaagcaaaccggtcaagttgaaggatacggtttcattgaattcgcatctcatgctgctgctgaaagagttctacaaacattcaacaacgctcctatcccgagctttcctgatcagctctttagactgaactgggcatcattgagttcaggagataaacgagacgattcaccggactacacgatatttgtcggtgatctggctgctgatgttacggattatatcttacttgagacgttcagagcctcttatccgtcagtgaagggtgcaaaggttgttattgacagagtcactggacgtacaaaaggatatgggtttgttaggttttctgatgaaagtgaacagatccgtgctatgacggagatgaatggcgttccttgttctactagacctatgagaattggtcccgctgctagcaagaaaggtgtaactggtcaaagagattcataccagagctctgctgcaggggtaacaactgataatgatccaaataacacaactgtttttgttggtggattagatgcatctgtcacggatgatcatctgaagaatgtctttagccaatatggtgagattgtgcatgtgaaaatacccgctggaaagcgctgtggattcgttcagttttccgagaagagctgtgcagaggaagctcttagaatgctgaatggagtgcaattaggcggaacaaccgtcaggctctcatggggccgaagtccttcgaacaaacagtcgggggatccgagccagttttactacggtgggtatggacaaggacaggagcagtatgggtacacgatgcctcaagaccctaatgcatattacggaggctactctggtggaggatacagcggtggttaccagcagacaccacaggcaggacagcaaccaccacaacagccaccacagcagcaacaagtcgggtttagctactaaccccgagagtattgcttgagttaatgtcactctgcttgttgtttgcgtactttgttatgaacttgtttctgcgtgccttgttatgaatattttcccaaacacagtttatttgtctttgcttttctctaggtgtgtgttgagtttttaactcttaataatgtttctgcgatgcttctgtttttaatgttttcatcacctttt

SEQ ID NO: 21464 - protein, 405 aa, Arabidopsis thaliana
  peptide (1)..(405): Ceres Seq. ID no. 13591514
  misc_feature (64)..(135): Pfam Name: RNA recognition motif. (a.k.a. RRM, RBD, or RNP domain) Pfam Description: RNA recognition motif. (a.k.a. RRM, RBD, or RNP
  misc_feature (64)..(135): Pfam Name: RNA recognition motif. (a.k.a. RRM, RBD, or RNP domain) Pfam Description: RNA recognition motif. (a.k.a. RRM, RBD, or RNP
  misc_feature (1)..(398): Homolog of NCBI NO: 34901884 NR Description: putative RNA Binding Protein 45
  misc_feature (21)..(394): Homolog of NCBI NO: 18416906 NR Description: RNA binding protein 45 (RBP45), putative
  misc_feature (21)..(403): Homolog of NCBI NO: 7485342 NR Description: hypothetical protein F10M23.340 - Arabidopsis
  misc_feature (1)..(394): Homolog of NCBI NO: 34896988 NR Description: putative RNA binding protein [Oryza sativa]
  misc_feature (5)..(394): Homolog of NCBI NO: 39545835 NR Description: OSJNBb0060E08.6 [Oryza sativa (japonica
  misc_feature (1)..(398): Homolog of NCBI NO: 34901884 NR Description: putative RNA Binding Protein 45
  misc_feature (21)..(403): Homolog of NCBI NO: 7485342 NR Description: hypothetical protein F10M23.340 - Arabidopsis
  misc_feature (5)..(394): Homolog of NCBI NO: 39545835 NR Description: OSJNBb0060E08.6 [Oryza sativa (japonica
  misc_feature (1)..(405): Homolog of NCBI NO: 15221071 NR Description: RNA binding protein 45 (RBP45), putative
  misc_feature (2)..(405): Homolog of NCBI NO: 21592583 NR Description: putative DNA binding protein [Arabidopsis
  misc_feature (1)..(306): Homolog of NCBI NO: 30682335 NR Description: RNA binding protein 45 (RBP45), putative
  misc_feature (3)..(386): Homolog of NCBI NO: 9663767 NR Description: RNA Binding Protein 45 [Nicotiana plumbaginifolia]
  misc_feature (1)..(394): Homolog of NCBI NO: 40253807 NR Description: putative RNA Binding Protein 45
  misc_feature (1)..(394): Homolog of NCBI NO: 34896988 NR Description: putative RNA binding protein [Oryza sativa]
  misc_feature (21)..(394): Homolog of NCBI NO: 18416906 NR Description: RNA binding protein 45 (RBP45), putative
  misc_feature (1)..(394): Homolog of NCBI NO: 40253807 NR Description: putative RNA Binding Protein 45
  misc_feature (3)..(386): Homolog of NCBI NO: 9663767 NR Description: RNA Binding Protein 45 [Nicotiana plumbaginifolia]
  misc_feature (1)..(306): Homolog of NCBI NO: 30682335 NR Description: RNA binding protein 45 (RBP45), putative
  misc_feature (2)..(405): Homolog of NCBI NO: 21592583 NR Description: putative DNA binding protein [Arabidopsis
  misc_feature (1)..(405): Homolog of NCBI NO: 15221071 NR Description: RNA binding protein 45 (RBP45), putative
MMQQPPPGGILPHHAPPPSAQQQYGYQQPYGIAGAAPPPPQMWNPQAAAPPSVQPTTADEIRTLWIGDLQYWMDENFLYGCFAHTGEMVSAKVIRNKQTGQVEGYGFIEFASHAAAERVLQTFNNAPIPSFPDQLFRLNWASLSSGDKRDDSPDYTIFVGDLAADVTDYILLETFRASYPSVKGAKVVIDRVTGRTKGYGFVRFSDESEQIRAMTEMNGVPCSTRPMRIGPAASKKGVTGQRDSYQSSAAGVTTDNDPNNTTVFVGGLDASVTDDHLKNVFSQYGEIVHVKIPAGKRCGFVQFSEKSCAEEALRMLNGVQLGGTTVRLSWGRSPSNKQSGDPSQFYYGGYGQGQEQYGYTMPQDPNAYYGGYSGGGYSGGYQQTPQAGQQPPQQPPQQQQVGFSY

SEQ ID NO: 21465 - protein, 404 aa, Arabidopsis thaliana
  peptide (1)..(404): Ceres Seq. ID no. 13591515
  misc_feature (63)..(134): Pfam Name: RNA recognition motif. (a.k.a. RRM, RBD, or RNP domain) Pfam Description: RNA recognition motif. (a.k.a. RRM, RBD, or RNP
  misc_feature (63)..(134): Pfam Name: RNA recognition motif. (a.k.a. RRM, RBD, or RNP domain) Pfam Description: RNA recognition motif. (a.k.a. RRM, RBD, or RNP
  misc_feature (1)..(397): Homolog of NCBI NO: 34901884 NR Description: putative RNA Binding Protein 45
  misc_feature (20)..(393): Homolog of NCBI NO: 18416906 NR Description: RNA binding protein 45 (RBP45), putative
  misc_feature (20)..(402): Homolog of NCBI NO: 7485342 NR Description: hypothetical protein F10M23.340 - Arabidopsis
  misc_feature (1)..(393): Homolog of NCBI NO: 34896988 NR Description: putative RNA binding protein [Oryza sativa]
  misc_feature (4)..(393): Homolog of NCBI NO: 39545835 NR Description: OSJNBb0060E08.6 [Oryza sativa (japonica
  misc_feature (1)..(397): Homolog of NCBI NO: 34901884 NR Description: putative RNA Binding Protein 45
  misc_feature (20)..(402): Homolog of NCBI NO: 7485342 NR Description: hypothetical protein F10M23.340 - Arabidopsis
  misc_feature (4)..(393): Homolog of NCBI NO: 39545835 NR Description: OSJNBb0060E08.6 [Oryza sativa (japonica
  misc_feature (1)..(404): Homolog of NCBI NO: 15221071 NR Description: RNA binding protein 45 (RBP45), putative
  misc_feature (1)..(404): Homolog of NCBI NO: 21592583 NR Description: putative DNA binding protein [Arabidopsis
  misc_feature (1)..(305): Homolog of NCBI NO: 30682335 NR Description: RNA binding protein 45 (RBP45), putative
  misc_feature (2)..(385): Homolog of NCBI NO: 9663767 NR Description: RNA Binding Protein 45 [Nicotiana plumbaginifolia]
  misc_feature (1)..(393): Homolog of NCBI NO: 40253807 NR Description: putative RNA Binding Protein 45
  misc_feature (1)..(393): Homolog of NCBI NO: 34896988 NR Description: putative RNA binding protein [Oryza sativa]
  misc_feature (20)..(393): Homolog of NCBI NO: 18416906 NR Description: RNA binding protein 45 (RBP45), putative
  misc_feature (1)..(393): Homolog of NCBI NO: 40253807 NR Description: putative RNA Binding Protein 45
  misc_feature (2)..(385): Homolog of NCBI NO: 9663767 NR Description: RNA Binding Protein 45 [Nicotiana plumbaginifolia]
  misc_feature (1)..(305): Homolog of NCBI NO: 30682335 NR Description: RNA binding protein 45 (RBP45), putative
  misc_feature (1)..(404): Homolog of NCBI NO: 21592583 NR Description: putative DNA binding protein [Arabidopsis
  misc_feature (1)..(404): Homolog of NCBI NO: 15221071 NR Description: RNA binding protein 45 (RBP45), putative
MQQPPPGGILPHHAPPPSAQQQYGYQQPYGIAGAAPPPPQMWNPQAAAPPSVQPTTADEIRTLWIGDLQYWMDENFLYGCFAHTGEMVSAKVIRNKQTGQVEGYGFIEFASHAAAERVLQTFNNAPIPSFPDQLFRLNWASLSSGDKRDDSPDYTIFVGDLAADVTDYILLETFRASYPSVKGAKVVIDRVTGRTKGYGFVRFSDESEQIRAMTEMNGVPCSTRPMRIGPAASKKGVTGQRDSYQSSAAGVTTDNDPNNTTVFVGGLDASVTDDHLKNVFSQYGEIVHVKIPAGKRCGFVQFSEKSCAEEALRMLNGVQLGGTTVRLSWGRSPSNKQSGDPSQFYYGGYGQGQEQYGYTMPQDPNAYYGGYSGGGYSGGYQQTPQAGQQPPQQPPQQQQVGFSY

SEQ ID NO: 21466 - protein, 364 aa, Arabidopsis thaliana
  peptide (1)..(364): Ceres Seq. ID no. 13591516
  misc_feature (23)..(94): Pfam Name: RNA recognition motif. (a.k.a. RRM, RBD, or RNP domain) Pfam Description: RNA recognition motif. (a.k.a. RRM, RBD, or RNP
  misc_feature (23)..(94): Pfam Name: RNA recognition motif. (a.k.a. RRM, RBD, or RNP domain) Pfam Description: RNA recognition motif. (a.k.a. RRM, RBD, or RNP
  misc_feature (1)..(357): Homolog of NCBI NO: 34901884 NR Description: putative RNA Binding Protein 45
  misc_feature (1)..(353): Homolog of NCBI NO: 18416906 NR Description: RNA binding protein 45 (RBP45), putative
  misc_feature (1)..(362): Homolog of NCBI NO: 7485342 NR Description: hypothetical protein F10M23.340 - Arabidopsis
  misc_feature (1)..(353): Homolog of NCBI NO: 34896988 NR Description: putative RNA binding protein [Oryza sativa]
  misc_feature (1)..(353): Homolog of NCBI NO: 39545835 NR Description: OSJNBb0060E08.6 [Oryza sativa (japonica
  misc_feature (1)..(357): Homolog of NCBI NO: 34901884 NR Description: putative RNA Binding Protein 45
  misc_feature (1)..(362): Homolog of NCBI NO: 7485342 NR Description: hypothetical protein F10M23.340 - Arabidopsis
  misc_feature (1)..(353): Homolog of NCBI NO: 39545835 NR Description: OSJNBb0060E08.6 [Oryza sativa (japonica
  misc_feature (1)..(364): Homolog of NCBI NO: 15221071 NR Description: RNA binding protein 45 (RBP45), putative
  misc_feature (1)..(364): Homolog of NCBI NO: 21592583 NR Description: putative DNA binding protein [Arabidopsis
  misc_feature (1)..(265): Homolog of NCBI NO: 30682335 NR Description: RNA binding protein 45 (RBP45), putative
  misc_feature (1)..(345): Homolog of NCBI NO: 9663767 NR Description: RNA Binding Protein 45 [Nicotiana plumbaginifolia]
  misc_feature (1)..(353): Homolog of NCBI NO: 40253807 NR Description: putative RNA Binding Protein 45
  misc_feature (1)..(353): Homolog of NCBI NO: 34896988 NR Description: putative RNA binding protein [Oryza sativa]
  misc_feature (1)..(353): Homolog of NCBI NO: 18416906 NR Description: RNA binding protein 45 (RBP45), putative
  misc_feature (1)..(353): Homolog of NCBI NO: 40253807 NR Description: putative RNA Binding Protein 45
  misc_feature (1)..(345): Homolog of NCBI NO: 9663767 NR Description: RNA Binding Protein 45 [Nicotiana plumbaginifolia]
  misc_feature (1)..(265): Homolog of NCBI NO: 30682335 NR Description: RNA binding protein 45 (RBP45), putative
  misc_feature (1)..(364): Homolog of NCBI NO: 21592583 NR Description: putative DNA binding protein [Arabidopsis
  misc_feature (1)..(364): Homolog of NCBI NO: 15221071 NR Description: RNA binding protein 45 (RBP45), putative
MWNPQAAAPPSVQPTTADEIRTLWIGDLQYWMDENFLYGCFAHTGEMVSAKVIRNKQTGQVEGYGFIEFASHAAAERVLQTFNNAPIPSFPDQLFRLNWASLSSGDKRDDSPDYTIFVGDLAADVTDYILLETFRASYPSVKGAKVVIDRVTGRTKGYGFVRFSDESEQIRAMTEMNGVPCSTRPMRIGPAASKKGVTGQRDSYQSSAAGVTTDNDPNNTTVFVGGLDASVTDDHLKNVFSQYGEIVHVKIPAGKRCGFVQFSEKSCAEEALRMLNGVQLGGTTVRLSWGRSPSNKQSGDPSQFYYGGYGQGQEQYGYTMPQDPNAYYGGYSGGGYSGGYQQTPQAGQQPPQQPPQQQQVGFSY

SEQ ID NO: 21467 - DNA, 917 bp, Arabidopsis thaliana
  misc_feature (1)..(917): Ceres Seq. ID no. 12334109
  misc_feature: MA Experiment ID: 108434 Result: Up-regulated in Transcription
  misc_feature: MA Experiment 108434 PARAMETER Experiment Name: At_Root_Tips_cDNA_P Parameter: Tissue Value: Root Tips
  misc_feature: MA Experiment ID: 108435 Result: Down-regulated in Transcription
  misc_feature: MA Experiment 108435 PARAMETER Experiment Name: At_stm_Mutants_cDNA_P Parameter: Plant Line Value: wt Landsburg vs stm
  misc_feature: MA Experiment 108435 PARAMETER Experiment Name: At_stm_Mutants_cDNA_P Parameter: Tissue Value: Shoot Apical Meristem Region
  misc_feature: MA Experiment ID: 108461 Result: Up-regulated in Transcription
  misc_feature: MA Experiment 108461 PARAMETER Experiment Name: At_Germinating_Seeds_cDNA_P Parameter: Age (day) Value: 1 vs. 0
  misc_feature: MA Experiment 108461 PARAMETER Experiment Name: At_Germinating_Seeds_cDNA_P Parameter: Tissue Value: Germinating Seeds
  misc_feature: MA Experiment ID: 108573 Result: Down-regulated in Transcription
  misc_feature: MA Experiment 108573 PARAMETER Experiment Name: At_Drought_cDNA_P Parameter: Timepoint (hr) Value: 6
  misc_feature: MA Experiment 108573 PARAMETER Experiment Name: At_Drought_cDNA_P Parameter: Tissue Value: Aerial
  misc_feature: MA Experiment 108573 PARAMETER Experiment Name: At_Drought_cDNA_P Parameter: Treatment Value: Drought vs. No Drought
  misc_feature: MA Experiment ID: 108595 Result: Down-regulated in Transcription
  misc_feature: MA Experiment 108595 PARAMETER Experiment Name: At_Ler-pi_Ovule_cDNA_P Parameter: Plant Line Value: null
  misc_feature: MA Experiment ID: 20000071 Result: Down-regulated in Transcription
  misc_feature: MA Experiment 20000071 PARAMETER Experiment Name: At_100uM_ABA_Mutants_cDNA_P Parameter: Plant Line Value: CS8104
  misc_feature: MA Experiment 20000071 PARAMETER Experiment Name: At_100uM_ABA_Mutants_cDNA_P Parameter: Timepoint (hr) Value: 6
  misc_feature: MA Experiment 20000071 PARAMETER Experiment Name: At_100uM_ABA_Mutants_cDNA_P Parameter: Tissue Value: Aerial
  misc_feature: MA Experiment 20000071 PARAMETER Experiment Name: At_100uM_ABA_Mutants_cDNA_P Parameter: Treatment Value: 100uM ABA vs. No Treatment
  misc_feature: MA Experiment ID: 20000117 Result: Down-regulated in Transcription
  misc_feature: MA Experiment 20000117 PARAMETER Experiment Name: At_100uM_ABA_Mutants_cDNA_P Parameter: Plant Line Value: Columbia
  misc_feature: MA Experiment 20000117 PARAMETER Experiment Name: At_100uM_ABA_Mutants_cDNA_P Parameter: Timepoint (hr) Value: 6
  misc_feature: MA Experiment 20000117 PARAMETER Experiment Name: At_100uM_ABA_Mutants_cDNA_P Parameter: Tissue Value: Aerial
  misc_feature: MA Experiment 20000117 PARAMETER Experiment Name: At_100uM_ABA_Mutants_cDNA_P Parameter: Treatment Value: 100uM ABA vs. No Treatment
  misc_feature: MA Experiment ID: 20000185 Result: Down-regulated in Transcription
  misc_feature: MA Experiment 20000185 PARAMETER Experiment Name: At_Roots__P Parameter: Age (day) Value: 7 vs. 21
  misc_feature: MA Experiment 20000185 PARAMETER Experiment Name: At_Roots__P Parameter: Organism Value: A. thaliana
  misc_feature: MA Experiment 20000185 PARAMETER Experiment Name: At_Roots__P Parameter: Tissue Value: Roots vs. Whole Plant
  misc_feature: MA Experiment ID: 20000439 Result: Down-regulated in Transcription
  misc_feature: MA Experiment 20000439 PARAMETER Experiment Name: At_Roots__P Parameter: Age (day) Value: 14 vs. 21
  misc_feature: MA Experiment 20000439 PARAMETER Experiment Name: At_Roots__P Parameter: Organism Value: A. thaliana
  misc_feature: MA Experiment 20000439 PARAMETER Experiment Name: At_Roots__P Parameter: Tissue Value: Roots vs. Whole Plant
  misc_feature: MA Experiment ID: 20000794 Result: Down-regulated in Transcription
  misc_feature: MA Experiment 20000794 PARAMETER Experiment Name: At_Petals_P Parameter: Age (day) Value: 23-25 days
  misc_feature: MA Experiment 20000794 PARAMETER Experiment Name: At_Petals_P Parameter: Plant Line Value: WS
  misc_feature: MA Experiment 20000794 PARAMETER Experiment Name: At_Petals_P Parameter: Tissue Value: Petals vs. Whole plant
  misc_feature: MA Experiment ID: 20001451 Result: Down-regulated in Transcription
  misc_feature: MA Experiment 20001451 PARAMETER Experiment Name: At_Far-red-induction_P Parameter: Age (day) Value: 7
  misc_feature: MA Experiment 20001451 PARAMETER Experiment Name: At_Far-red-induction_P Parameter: Light Value: Far-red vs. White
  misc_feature: MA Experiment 20001451 PARAMETER Experiment Name: At_Far-red-induction_P Parameter: Organism Value: A. thaliana
  misc_feature: MA Experiment 20001451 PARAMETER Experiment Name: At_Far-red-induction_P Parameter: Plant Line Value: Columbia
  misc_feature: MA Experiment 20001451 PARAMETER Experiment Name: At_Far-red-induction_P Parameter: Timepoint (hr) Value: 24
  misc_feature: MA Experiment 20001451 PARAMETER Experiment Name: At_Far-red-induction_P Parameter: Tissue Value: Whole Plant
  misc_feature: MA Experiment ID: 20001560 Result: Up-regulated in Transcription
  misc_feature: MA Experiment 20001560 PARAMETER Experiment Name: At_Drought_Soil_Dry_P Parameter: Age (day) Value: 28
  misc_feature: MA Experiment 20001560 PARAMETER Experiment Name: At_Drought_Soil_Dry_P Parameter: Organism Value: A. thaliana
  misc_feature: MA Experiment 20001560 PARAMETER Experiment Name: At_Drought_Soil_Dry_P Parameter: Plant Line Value: WS
  misc_feature: MA Experiment 20001560 PARAMETER Experiment Name: At_Drought_Soil_Dry_P Parameter: Post Timepoint (hr) Value: None
  misc_feature: MA Experiment 20001560 PARAMETER Experiment Name: At_Drought_Soil_Dry_P Parameter: Post-Treatment Value: None
  misc_feature: MA Experiment 20001560 PARAMETER Experiment Name: At_Drought_Soil_Dry_P Parameter: Timepoint (day) Value: 14
  misc_feature: MA Experiment 20001560 PARAMETER Experiment Name: At_Drought_Soil_Dry_P Parameter: Treatment Value: Drought vs. No Drought
  misc_feature: MA Experiment ID: 20001906 Result: Down-regulated in Transcription
  misc_feature: MA Experiment 20001906 PARAMETER Experiment Name: At_Drought_Reproduction_P Parameter: Age (day) Value: 35
  misc_feature: MA Experiment 20001906 PARAMETER Experiment Name: At_Drought_Reproduction_P Parameter: Organism Value: A. thaliana
  misc_feature: MA Experiment 20001906 PARAMETER Experiment Name: At_Drought_Reproduction_P Parameter: Plant Line Value: WS
  misc_feature: MA Experiment 20001906 PARAMETER Experiment Name: At_Drought_Reproduction_P Parameter: Timepoint (day) Value: 5
  misc_feature: MA Experiment 20001906 PARAMETER Experiment Name: At_Drought_Reproduction_P Parameter: Tissue Value: Siliques
  misc_feature: MA Experiment 20001906 PARAMETER Experiment Name: At_Drought_Reproduction_P Parameter: Treatment Value: Drought vs. No Drought
  misc_feature: MA Experiment ID: 20001908 Result: Down-regulated in Transcription
  misc_feature: MA Experiment 20001908 PARAMETER Experiment Name: At_Drought_Reproduction_P Parameter: Age (day) Value: 40
  misc_feature: MA Experiment 20001908 PARAMETER Experiment Name: At_Drought_Reproduction_P Parameter: Organism Value: A. thaliana
  misc_feature: MA Experiment 20001908 PARAMETER Experiment Name: At_Drought_Reproduction_P Parameter: Plant Line Value: WS
  misc_feature: MA Experiment 20001908 PARAMETER Experiment Name: At_Drought_Reproduction_P Parameter: Timepoint (day) Value: 10
  misc_feature: MA Experiment 20001908 PARAMETER Experiment Name: At_Drought_Reproduction_P Parameter: Tissue Value: Siliques
  misc_feature: MA Experiment 20001908 PARAMETER Experiment Name: At_Drought_Reproduction_P Parameter: Treatment Value: Drought vs. No Drought
  misc_feature: MA Experiment ID: 20001911 Result: Down-regulated in Transcription
  misc_feature: MA Experiment 20001911 PARAMETER Experiment Name: At_Drought_Reproduction_P Parameter: Age (day) Value: 40
  misc_feature: MA Experiment 20001911 PARAMETER Experiment Name: At_Drought_Reproduction_P Parameter: Organism Value: A. thaliana
  misc_feature: MA Experiment 20001911 PARAMETER Experiment Name: At_Drought_Reproduction_P Parameter: Plant Line Value: WS
  misc_feature: MA Experiment 20001911 PARAMETER Experiment Name: At_Drought_Reproduction_P Parameter: Timepoint (day) Value: 10
  misc_feature: MA Experiment 20001911 PARAMETER Experiment Name: At_Drought_Reproduction_P Parameter: Tissue Value: Flowers
  misc_feature: MA Experiment 20001911 PARAMETER Experiment Name: At_Drought_Reproduction_P Parameter: Treatment Value: Drought vs. No Drought
aggctcttctttactctggtttcgagtttgggttgtgcaaacatggcgacgagctctcatcttcttcctcaggcattgcatatgataccgagaaccccttctttctcgtcgaagaatttaggggtttcttcaattctaccacgagcatcatcagtgaactcaagactatcagtttctagggtttttctcaatcattcgagctccaattttggtttcgccatcgattccaagaagagaaaagagtttatcgctaaagctgaagagagtactgaaggtgaaactgaggctgttgtggagaatgctgttgaaactgaagcggaaggagaaggagaagccactgttgcggcggaggaagctaaacctccgtggaagacgagagtcaagctcggagatatcatggggctactgaacaagaaagctattgaggttgcagagactgtaagaccggttcctggacttaggactggggatattgtagaaatcaaactggaagttcctgagaacaaacgtaggctatctatctacaaaggtattgtgatgtctagacaaaatgcaggcatccacactactatccgtatccggaggattattgcaggcattggtgttgaaatcgtctttcccatatactctcccaacataaaggagataaaagtggtaagtcacaggaaagtgagaagagcaagactttactatctgagggacaaacttcctcgtctctcaacttttaaatgatcaccaaacccaacaccagtcttgtcttgtgttgtcttcaatctccaaaggtagctagctactctcttttctcttgtaataattgtttgtttgtttcgtcttttggatttcatttcttttcatgtaatttacagtaacagtaatttaagaaaagtaaatcaatgttgattgttttgatcttgagc

SEQ ID NO: 21468 - protein, 243 aa, Arabidopsis thaliana
  peptide (1)..(243): Ceres Seq. ID no. 12334110
  misc_feature (139)..(243): Pfam Name: Ribosomal protein L19 Pfam Description: Ribosomal protein L19
  misc_feature (18)..(239): Homolog of NCBI NO: 18395422 NR Description: expressed protein
  misc_feature (18)..(239): Homolog of NCBI NO: 15234249 NR Description: putative protein
  misc_feature (14)..(239): Homolog of NCBI NO: 15239778 NR Description: putative protein
  misc_feature (52)..(170): Homolog of NCBI NO: 7485084 NR Description: hypothetical protein - Arabidopsis thaliana
  misc_feature (13)..(243): Homolog of NCBI NO: 14140122 NR Description: putative plastid ribosomal protein L19 precursor
  misc_feature (18)..(243): Homolog of NCBI NO: 7582403 NR Description: plastid ribosomal protein L19 precursor [Spinacia
  misc_feature (15)..(243): Homolog of NCBI NO: 18414915 NR Description: putative protein
  misc_feature (15)..(243): Homolog of NCBI NO: 21592584 NR Description: contains similarity to plastid ribosomal protein
  misc_feature (15)..(243): Homolog of NCBI NO: 18422764 NR Description: putative protein
  misc_feature (20)..(243): Homolog of NCBI NO: 8809601 NR Description: contains similarity to plastid ribosomal protein
RLFFTLVSSLGCANMATSSHLLPQALHMIPRTPSFSSKNLGVSSILPRASSVNSRLSVSRVFLNHSSSNFGFAIDSKKRKEFIAKAEESTEGETEAVVENAVETEAEGEGEATVAAEEAKPPWKTRVKLGDIMGLLNKKAIEVAETVRPVPGLRTGDIVEIKLEVPENKRRLSIYKGIVMSRQNAGIHTTIRIRRIIAGIGVEIVFPIYSPNIKEIKVVSHRKVRRARLYYLRDKLPRLSTFK

SEQ ID NO: 21469 - protein, 229 aa, Arabidopsis thaliana
  peptide (1)..(229): Ceres Seq. ID no. 12334111
  misc_feature (125)..(229): Pfam Name: Ribosomal protein L19 Pfam Description: Ribosomal protein L19
  misc_feature (4)..(225): Homolog of NCBI NO: 15234249 NR Description: putative protein
  misc_feature (1)..(225): Homolog of NCBI NO: 15239778 NR Description: putative protein
  misc_feature (38)..(156): Homolog of NCBI NO: 7485084 NR Description: hypothetical protein - Arabidopsis thaliana
  misc_feature (1)..(229): Homolog of NCBI NO: 14140122 NR Description: putative plastid ribosomal protein L19 precursor
  misc_feature (4)..(229): Homolog of NCBI NO: 7582403 NR Description: plastid ribosomal protein L19 precursor [Spinacia
  misc_feature (4)..(225): Homolog of NCBI NO: 18395422 NR Description: expressed protein
  misc_feature (1)..(229): Homolog of NCBI NO: 18414915 NR Description: putative protein
  misc_feature (1)..(229): Homolog of NCBI NO: 21592584 NR Description: contains similarity to plastid ribosomal protein
  misc_feature (1)..(229): Homolog of NCBI NO: 18422764 NR Description: putative protein
  misc_feature (6)..(229): Homolog of NCBI NO: 8809601 NR Description: contains similarity to plastid ribosomal protein
MATSSHLLPQALHMIPRTPSFSSKNLGVSSILPRASSVNSRLSVSRVFLNHSSSNFGFAIDSKKRKEFIAKAEESTEGETEAVVENAVETEAEGEGEATVAAEEAKPPWKTRVKLGDIMGLLNKKAIEVAETVRPVPGLRTGDIVEIKLEVPENKRRLSIYKGIVMSRQNAGIHTTIRIRRIIAGIGVEIVFPIYSPNIKEIKVVSHRKVRRARLYYLRDKLPRLSTFK

SEQ ID NO: 21470 - protein, 216 aa, Arabidopsis thaliana
  peptide (1)..(216): Ceres Seq. ID no. 12334112
  misc_feature (112)..(216): Pfam Name: Ribosomal protein L19 Pfam Description: Ribosomal protein L19
  misc_feature (1)..(212): Homolog of NCBI NO: 18395422 NR Description: expressed protein
  misc_feature (1)..(212): Homolog of NCBI NO: 15234249 NR Description: putative protein
  misc_feature (1)..(212): Homolog of NCBI NO: 15239778 NR Description: putative protein
  misc_feature (25)..(143): Homolog of NCBI NO: 7485084 NR Description: hypothetical protein - Arabidopsis thaliana
  misc_feature (1)..(216): Homolog of NCBI NO: 14140122 NR Description: putative plastid ribosomal protein L19 precursor
  misc_feature (1)..(216): Homolog of NCBI NO: 7582403 NR Description: plastid ribosomal protein L19 precursor [Spinacia
  misc_feature (1)..(216): Homolog of NCBI NO: 18414915 NR Description: putative protein
  misc_feature (1)..(216): Homolog of NCBI NO: 21592584 NR Description: contains similarity to plastid ribosomal protein
  misc_feature (1)..(216): Homolog of NCBI NO: 18422764 NR Description: putative protein
  misc_feature (1)..(216): Homolog of NCBI NO: 8809601 NR Description: contains similarity to plastid ribosomal protein
MIPRTPSFSSKNLGVSSILPRASSVNSRLSVSRVFLNHSSSNFGFAIDSKKRKEFIAKAEESTEGETEAVVENAVETEAEGEGEATVAAEEAKPPWKTRVKLGDIMGLLNKKAIEVAETVRPVPGLRTGDIVEIKLEVPENKRRLSIYKGIVMSRQNAGIHTTIRIRRIIAGIGVEIVFPIYSPNIKEIKVVSHRKVRRARLYYLRDKLPRLSTFK

SEQ ID NO: 21471 - DNA, 758 bp, Arabidopsis thaliana
  misc_feature (1)..(758): Ceres Seq. ID no. 12385795
  misc_feature: MA Experiment ID: 108474 Result: Down-regulated in Transcription
  misc_feature: MA Experiment 108474 PARAMETER Experiment Name: At_Drought_Flowers_cDNA_P Parameter: Timepoint (hr) Value: null
  misc_feature: MA Experiment 108474 PARAMETER Experiment Name: At_Drought_Flowers_cDNA_P Parameter: Treatment Value: Drought vs. No Drought
  misc_feature: MA Experiment ID: 108501 Result: Down-regulated in Transcription
  misc_feature: MA Experiment 108501 PARAMETER Experiment Name: At_ap2_floral_buds_cDNA_P Parameter: Plant Line Value: ap2 (Ler.)
  misc_feature: MA Experiment 108501 PARAMETER Experiment Name: At_ap2_floral_buds_cDNA_P Parameter: Tissue Value: Closed Flower
  misc_feature: MA Experiment ID: 108594 Result: Up-regulated in Transcription
  misc_feature: MA Experiment 108594 PARAMETER Experiment Name: At_Ler-rhl_Root_cDNA_P Parameter: Plant Line Value: null
  misc_feature: MA Experiment ID: 108595 Result: Up-regulated in Transcription
  misc_feature: MA Experiment 108595 PARAMETER Experiment Name: At_Ler-pi_Ovule_cDNA_P Parameter: Plant Line Value: null
  misc_feature: MA Experiment ID: 20000265 Result: Up-regulated in Transcription
  misc_feature: MA Experiment 20000265 PARAMETER Experiment Name: At_Open_Flower_P Parameter: Age (day) Value: 21
  misc_feature: MA Experiment 20000265 PARAMETER Experiment Name: At_Open_Flower_P Parameter: Plant Line Value: WS
  misc_feature: MA Experiment 20000265 PARAMETER Experiment Name: At_Open_Flower_P Parameter: Tissue Value: Closed Flower vs. Whole Plant
  misc_feature: MA Experiment ID: 20000286 Result: Up-regulated in Transcription
  misc_feature: MA Experiment 20000286 PARAMETER Experiment Name: At_Open_Flower_P Parameter: Age (day) Value: 21
  misc_feature: MA Experiment 20000286 PARAMETER Experiment Name: At_Open_Flower_P Parameter: Plant Line Value: WS
  misc_feature: MA Experiment 20000286 PARAMETER Experiment Name: At_Open_Flower_P Parameter: Tissue Value: Half Open vs. Whole Plant
  misc_feature: MA Experiment ID: 20000438 Result: Down-regulated in Transcription
  misc_feature: MA Experiment 20000438 PARAMETER Experiment Name: At_Shoots__P Parameter: Age (day) Value: 14
  misc_feature: MA Experiment 20000438 PARAMETER Experiment Name: At_Shoots__P Parameter: Tissue Value: Shoots vs. Whole Plant
  misc_feature: MA Experiment ID: 20001755 Result: Down-regulated in Transcription
  misc_feature: MA Experiment 20001755 PARAMETER Experiment Name: At_50mM_NH4NO3_L-to-H_P Parameter: Timepoint (hr) Value: 2
  misc_feature: MA Experiment 20001755 PARAMETER Experiment Name: At_50mM_NH4NO3_L-to-H_P Parameter: Tissue Value: Leaf
  misc_feature: MA Experiment 20001755 PARAMETER Experiment Name: At_50mM_NH4NO3_L-to-H_P Parameter: Treatment Value: 50mM NH4NO3 vs 100mM Mannitol
acatcttcacaaccaactaaagatagaaagaacataatacaaagagatatttaacgttttgaaatggaggctgttagattcgccgtcgccgtcgttcttgtattttgctacgttacgtcgtctaatgctcagatgacttcaccaccgagcggcggtgcaggaggagacgcacactcactgccgtgtattcagaaactgatgccgtgtcagccgtatcttcacttggcgactccgccgccggcgacgtgttgcatgccgttgaatgagatcgtagccaaagacgccacgtgtctctgcgctgtctttaacaacgttgatatgctcaaatcgcttaacctcactaaagaaaacgctctcgatctccccaaggcttgtggcgccaaagctgacgtgtcactatgcaaaaccagcgccggtactaattcgtcttcaacaccgccggcaaccccgaaaactcctccggcatcttccaccagtaccggaacaggaagcggatcaaccggaaatgcagctccttcgacggccaagccaacaagctcagccccggccatcaacttcggtggacttagctttgcatcggctgtcgtggcaacactcttcttctgatgatctactatatttatttcacgtctttatcagctaggttttcatttgttggaaattaatcagaccatgttcggtaacgtttttatttcaactaaaggttataactgatctatatgtactatgaaatccaaataatagtactaataacttcc

SEQ ID NO: 21472 - protein, 180 aa, Arabidopsis thaliana
  peptide (1)..(180): Ceres Seq. ID no. 12385796
  misc_feature (41)..(113): Pfam Name: Protease inhibitor/seed storage/LTP family Pfam Description: Protease inhibitor/seed storage/LTP family
  misc_feature (41)..(145): Homolog of NCBI NO: 30696757 NR Description: protease inhibitor/seed storage/lipid transfer
  misc_feature (41)..(145): Homolog of NCBI NO: 15221585 NR Description: unknown protein; protein id: At1g62790.1
  misc_feature (7)..(179): Homolog of NCBI NO: 25553588 NR Description: OJ1656_E11.14 [Oryza sativa (japonica
  misc_feature (35)..(165): Homolog of NCBI NO: 7484433 NR Description: lipid transfer protein - Norway spruce
  misc_feature (34)..(130): Homolog of NCBI NO: 25406275 NR Description: hypothetical protein F6D5.6 [imported] -
  misc_feature (34)..(130): Homolog of NCBI NO: 15219496 NR Description: hypothetical protein; protein id: At1g73550.1
  misc_feature (1)..(117): Homolog of NCBI NO: 25406276 NR Description: probable lipid transfer protein F6D5.5
  misc_feature (1)..(138): Homolog of NCBI NO: 21593596 NR Description: lipid transfer protein, putative [Arabidopsis
  misc_feature (1)..(138): Homolog of NCBI NO: 18410388 NR Description: lipid transfer protein, putative
  misc_feature (1)..(180): Homolog of NCBI NO: 15221052 NR Description: lipid transfer protein, putative
MEAVRFAVAVVLVFCYVTSSNAQMTSPPSGGAGGDAHSLPCIQKLMPCQPYLHLATPPPATCCMPLNEIVAKDATCLCAVFNNVDMLKSLNLTKENALDLPKACGAKADVSLCKTSAGTNSSSTPPATPKTPPASSTSTGTGSGSTGNAAPSTAKPTSSAPAINFGGLSFASAVVATLFF

SEQ ID NO: 21473 - protein, 157 aa, Arabidopsis thaliana
  peptide (1)..(157): Ceres Seq. ID no. 12385797
  misc_feature (18)..(90): Pfam Name: Protease inhibitor/seed storage/LTP family Pfam Description: Protease inhibitor/seed storage/LTP family
  misc_feature (18)..(122): Homolog of NCBI NO: 30696757 NR Description: protease inhibitor/seed storage/lipid transfer
  misc_feature (18)..(122): Homolog of NCBI NO: 15221585 NR Description: unknown protein; protein id: At1g62790.1
  misc_feature (1)..(156): Homolog of NCBI NO: 25553588 NR Description: OJ1656_E11.14 [Oryza sativa (japonica
  misc_feature (12)..(142): Homolog of NCBI NO: 7484433 NR Description: lipid transfer protein - Norway spruce
  misc_feature (11)..(107): Homolog of NCBI NO: 25406275 NR Description: hypothetical protein F6D5.6 [imported] -
  misc_feature (11)..(107): Homolog of NCBI NO: 15219496 NR Description: hypothetical protein; protein id: At1g73550.1
  misc_feature (1)..(94): Homolog of NCBI NO: 25406276 NR Description: probable lipid transfer protein F6D5.5
  misc_feature (1)..(115): Homolog of NCBI NO: 21593596 NR Description: lipid transfer protein, putative [Arabidopsis
  misc_feature (1)..(115): Homolog of NCBI NO: 18410388 NR Description: lipid transfer protein, putative
  misc_feature (1)..(157): Homolog of NCBI NO: 15221052 NR Description: lipid transfer protein, putative
MTSPPSGGAGGDAHSLPCIQKLMPCQPYLHLATPPPATCCMPLNEIVAKDATCLCAVFNNVDMLKSLNLTKENALDLPKACGAKADVSLCKTSAGTNSSSTPPATPKTPPASSTSTGTGSGSTGNAAPSTAKPTSSAPAINFGGLSFASAVVATLFF

SEQ ID NO: 21474 - protein, 135 aa, Arabidopsis thaliana
  peptide (1)..(135): Ceres Seq. ID no. 12385798
  misc_feature (1)..(68): Pfam Name: Protease inhibitor/seed storage/LTP family Pfam Description: Protease inhibitor/seed storage/LTP family
  misc_feature (1)..(100): Homolog of NCBI NO: 30696757 NR Description: protease inhibitor/seed storage/lipid transfer
  misc_feature (1)..(100): Homolog of NCBI NO: 15221585 NR Description: unknown protein; protein id: At1g62790.1
  misc_feature (1)..(134): Homolog of NCBI NO: 25553588 NR Description: OJ1656_E11.14 [Oryza sativa (japonica
  misc_feature (1)..(120): Homolog of NCBI NO: 7484433 NR Description: lipid transfer protein - Norway spruce
  misc_feature (1)..(85): Homolog of NCBI NO: 25406275 NR Description: hypothetical protein F6D5.6 [imported] -
  misc_feature (1)..(85): Homolog of NCBI NO: 15219496 NR Description: hypothetical protein; protein id: At1g73550.1
  misc_feature (1)..(72): Homolog of NCBI NO: 25406276 NR Description: probable lipid transfer protein F6D5.5
  misc_feature (1)..(93): Homolog of NCBI NO: 21593596 NR Description: lipid transfer protein, putative [Arabidopsis
  misc_feature (1)..(93): Homolog of NCBI NO: 18410388 NR Description: lipid transfer protein, putative
  misc_feature (1)..(135): Homolog of NCBI NO: 15221052 NR Description: lipid transfer protein, putative
MPCQPYLHLATPPPATCCMPLNEIVAKDATCLCAVFNNVDMLKSLNLTKENALDLPKACGAKADVSLCKTSAGTNSSSTPPATPKTPPASSTSTGTGSGSTGNAAPSTAKPTSSAPAINFGGLSFASAVVATLFF

SEQ ID NO: 21475 - DNA, 1152 bp, Arabidopsis thaliana
  misc_feature (1)..(1152): Ceres Seq. ID no. 12385429
  misc_feature: MA Experiment ID: 20000180 Result: Up-regulated in Transcription
  misc_feature: MA Experiment 20000180 PARAMETER Experiment Name: At_Germinating_Seeds_P Parameter: Age (hr) Value: 24 vs. 0
  misc_feature: MA Experiment 20000180 PARAMETER Experiment Name: At_Germinating_Seeds_P Parameter: Tissue Value: Germinating Seeds
  misc_feature: MA Experiment ID: 20000185 Result: Down-regulated in Transcription
  misc_feature: MA Experiment 20000185 PARAMETER Experiment Name: At_Roots__P Parameter: Age (day) Value: 7 vs. 21
  misc_feature: MA Experiment 20000185 PARAMETER Experiment Name: At_Roots__P Parameter: Organism Value: A. thaliana
  misc_feature: MA Experiment 20000185 PARAMETER Experiment Name: At_Roots__P Parameter: Tissue Value: Roots vs. Whole Plant
  misc_feature: MA Experiment ID: 20000234 Result: Up-regulated in Transcription
  misc_feature: MA Experiment 20000234 PARAMETER Experiment Name: At_Siliques_P Parameter: Age (day) Value: 21
  misc_feature: MA Experiment 20000234 PARAMETER Experiment Name: At_Siliques_P Parameter: Organism Value: A. thaliana
  misc_feature: MA Experiment 20000234 PARAMETER Experiment Name: At_Siliques_P Parameter: Plant Line Value: WS
  misc_feature: MA Experiment 20000234 PARAMETER Experiment Name: At_Siliques_P Parameter: Tissue Value: Less Than 5mm Siliques vs. Whole Plant
  misc_feature: MA Experiment ID: 20000265 Result: Up-regulated in Transcription
  misc_feature: MA Experiment 20000265 PARAMETER Experiment Name: At_Open_Flower_P Parameter: Age (day) Value: 21
  misc_feature: MA Experiment 20000265 PARAMETER Experiment Name: At_Open_Flower_P Parameter: Plant Line Value: WS
  misc_feature: MA Experiment 20000265 PARAMETER Experiment Name: At_Open_Flower_P Parameter: Tissue Value: Closed Flower vs. Whole Plant
  misc_feature: MA Experiment ID: 20000286 Result: Up-regulated in Transcription
  misc_feature: MA Experiment 20000286 PARAMETER Experiment Name: At_Open_Flower_P Parameter: Age (day) Value: 21
  misc_feature: MA Experiment 20000286 PARAMETER Experiment Name: At_Open_Flower_P Parameter: Plant Line Value: WS
  misc_feature: MA Experiment 20000286 PARAMETER Experiment Name: At_Open_Flower_P Parameter: Tissue Value: Half Open vs. Whole Plant
  misc_feature: MA Experiment ID: 20000437 Result: Down-regulated in Transcription
  misc_feature: MA Experiment 20000437 PARAMETER Experiment Name: At_Drought_P Parameter: Age (day) Value: 8
  misc_feature: MA Experiment 20000437 PARAMETER Experiment Name: At_Drought_P Parameter: Organism Value: A. thaliana
  misc_feature: MA Experiment 20000437 PARAMETER Experiment Name: At_Drought_P Parameter: Plant Line Value: WS
  misc_feature: MA Experiment 20000437 PARAMETER Experiment Name: At_Drought_P Parameter: Timepoint (hr) Value: 24
  misc_feature: MA Experiment 20000437 PARAMETER Experiment Name: At_Drought_P Parameter: Tissue Value: Whole Plant
  misc_feature: MA Experiment 20000437 PARAMETER Experiment Name: At_Drought_P Parameter: Treatment Value: Drought vs. No Drought
  misc_feature: MA Experiment ID: 20000439 Result: Down-regulated in Transcription
  misc_feature: MA Experiment 20000439 PARAMETER Experiment Name: At_Roots__P Parameter: Age (day) Value: 14 vs. 21
  misc_feature: MA Experiment 20000439 PARAMETER Experiment Name: At_Roots__P Parameter: Organism Value: A. thaliana
  misc_feature: MA Experiment 20000439 PARAMETER Experiment Name: At_Roots__P Parameter: Tissue Value: Roots vs. Whole Plant
  misc_feature: MA Experiment ID: 20000495 Result: Up-regulated in Transcription
  misc_feature: MA Experiment 20000495 PARAMETER Experiment Name: At_Guard_Cells_P Parameter: Harvest Date Value: 8/2/2002
  misc_feature: MA Experiment 20000495 PARAMETER Experiment Name: At_Guard_Cells_P Parameter: Organism Value: A. thaliana
  misc_feature: MA Experiment 20000495 PARAMETER Experiment Name: At_Guard_Cells_P Parameter: Tissue Value: Guard Cells vs. Leaves
  misc_feature: MA Experiment ID: 20001248 Result: Down-regulated in Transcription
  misc_feature: MA Experiment 20001248 PARAMETER Experiment Name: At_Far-red-induction_P Parameter: Age (day) Value: 7
  misc_feature: MA Experiment 20001248 PARAMETER Experiment Name: At_Far-red-induction_P Parameter: Light Value: Far-red vs. White
  misc_feature: MA Experiment 20001248 PARAMETER Experiment Name: At_Far-red-induction_P Parameter: Organism Value: A. thaliana
  misc_feature: MA Experiment 20001248 PARAMETER Experiment Name: At_Far-red-induction_P Parameter: Plant Line Value: Columbia
  misc_feature: MA Experiment 20001248 PARAMETER Experiment Name: At_Far-red-induction_P Parameter: Timepoint (hr) Value: 4
  misc_feature: MA Experiment 20001248 PARAMETER Experiment Name: At_Far-red-induction_P Parameter: Tissue Value: Whole Plant
  misc_feature: MA Experiment ID: 20001555 Result: Down-regulated in Transcription
  misc_feature: MA Experiment 20001555 PARAMETER Experiment Name: At_Drought_Soil_Dry_P Parameter: Age (day) Value: 24
  misc_feature: MA Experiment 20001555 PARAMETER Experiment Name: At_Drought_Soil_Dry_P Parameter: Organism Value: A. thaliana
  misc_feature: MA Experiment 20001555 PARAMETER Experiment Name: At_Drought_Soil_Dry_P Parameter: Plant Line Value: WS
  misc_feature: MA Experiment 20001555 PARAMETER Experiment Name: At_Drought_Soil_Dry_P Parameter: Post Timepoint (hr) Value: None
  misc_feature: MA Experiment 20001555 PARAMETER Experiment Name: At_Drought_Soil_Dry_P Parameter: Post-Treatment Value: None
  misc_feature: MA Experiment 20001555 PARAMETER Experiment Name: At_Drought_Soil_Dry_P Parameter: Timepoint (day) Value: 10
  misc_feature: MA Experiment 20001555 PARAMETER Experiment Name: At_Drought_Soil_Dry_P Parameter: Treatment Value: Drought vs. No Drought
acacatcttaaaaagtaaaaacacattcatctatccaacaaaaaaaaaaaaaaaaaggagaaatggaaggaatcgatcatagaatggtgagtgtcaatggcataactatgcacattgccgagaaaggtcccaaagaaggacctgtggtgcttctcctccatggattccctgatctctggtacacgtggcgtcaccagattagtgggttatcatctctaggttaccgcgctgtagctccagacctccgaggctacggagactctgattcgccagagtctttctccgagtacacgtgtcttaacgtcgttggggacctcgtagctcttctggacagtgttgctggaaatcaagagaaggtgtttctggtcggtcatgattggggagccattatcggatggtttctctgtttgtttcgacctgaaaagattaacggctttgtgtgtttgagtgtgccgtatagatcaagaaaccctaaagtcaagcccgttcaagggttcaaggctgtatttggagatgattactacatttgtagatttcaggaaccggggaagattgaaggagagattgcaagtgcagatccaagaatatttctgaggaacctcttcacagggaggacactcggtccgccgattttacctaaggataatccctttggggaaaaacctaaccctaatagcgaaaacattgaattgcctgaatggttttctaagaaagatctcgatttctatgtctccaaattcgagaaggcaggatttaccggtggattgaactactacagagccatggatctgaattgggagctcactgcaccatggaccggagctaagattcaagttccagtgaagttcatgacaggtgacttcgacatggtttacaccacaccagggatgaaagagtacattcacggtggtggatttgctgcagatgttccaactcttcaagagatagtggtgattgaagatgctggtcacttcgttaaccaagagaaacctcaagaggtcactgctcacatcaatgacttcttcaccaagcttcgggacaacaacaaaagcttttagagttctcgtttggttctattatgttggctctcaaaacaagttggttcttgcatgtgttgtttcgacaagattttgaataagacttggcattatg

SEQ ID NO: 21476 - protein, 331 aa, Arabidopsis thaliana
  peptide (1)..(331): Ceres Seq. ID no. 12385430
  misc_feature (54)..(319): Pfam Name: alpha/beta hydrolase fold Pfam Description: alpha/beta hydrolase fold
  misc_feature (1)..(331): Homolog of NCBI NO: 15230018 NR Description: putative epoxide hydrolase
MEGIDHRMVSVNGITMHIAEKGPKEGPVVLLLHGFPDLWYTWRHQISGLSSLGYRAVAPDLRGYGDSDSPESFSEYTCLNVVGDLVALLDSVAGNQEKVFLVGHDWGAIIGWFLCLFRPEKINGFVCLSVPYRSRNPKVKPVQGFKAVFGDDYYICRFQEPGKIEGEIASADPRIFLRNLFTGRTLGPPILPKDNPFGEKPNPNSENIELPEWFSKKDLDFYVSKFEKAGFTGGLNYYRAMDLNWELTAPWTGAKIQVPVKFMTGDFDMVYTTPGMKEYIHGGGFAADVPTLQEIVVIEDAGHFVNQEKPQEVTAHINDFFTKLRDNNKSF

SEQ ID NO: 21477 - protein, 324 aa, Arabidopsis thaliana
  peptide (1)..(324): Ceres Seq. ID no. 12385431
  misc_feature (47)..(312): Pfam Name: alpha/beta hydrolase fold Pfam Description: alpha/beta hydrolase fold
  misc_feature (1)..(324): Homolog of NCBI NO: 15230018 NR Description: putative epoxide hydrolase
MVSVNGITMHIAEKGPKEGPVVLLLHGFPDLWYTWRHQISGLSSLGYRAVAPDLRGYGDSDSPESFSEYTCLNVVGDLVALLDSVAGNQEKVFLVGHDWGAIIGWFLCLFRPEKINGFVCLSVPYRSRNPKVKPVQGFKAVFGDDYYICRFQEPGKIEGEIASADPRIFLRNLFTGRTLGPPILPKDNPFGEKPNPNSENIELPEWFSKKDLDFYVSKFEKAGFTGGLNYYRAMDLNWELTAPWTGAKIQVPVKFMTGDFDMVYTTPGMKEYIHGGGFAADVPTLQEIVVIEDAGHFVNQEKPQEVTAHINDFFTKLRDNNKSF

SEQ ID NO: 21478 - protein, 316 aa, Arabidopsis thaliana
  peptide (1)..(316): Ceres Seq. ID no. 12385432
  misc_feature (39)..(304): Pfam Name: alpha/beta hydrolase fold Pfam Description: alpha/beta hydrolase fold
  misc_feature (1)..(316): Homolog of NCBI NO: 15230018 NR Description: putative epoxide hydrolase
MHIAEKGPKEGPVVLLLHGFPDLWYTWRHQISGLSSLGYRAVAPDLRGYGDSDSPESFSEYTCLNVVGDLVALLDSVAGNQEKVFLVGHDWGAIIGWFLCLFRPEKINGFVCLSVPYRSRNPKVKPVQGFKAVFGDDYYICRFQEPGKIEGEIASADPRIFLRNLFTGRTLGPPILPKDNPFGEKPNPNSENIELPEWFSKKDLDFYVSKFEKAGFTGGLNYYRAMDLNWELTAPWTGAKIQVPVKFMTGDFDMVYTTPGMKEYIHGGGFAADVPTLQEIVVIEDAGHFVNQEKPQEVTAHINDFFTKLRDNNKSF

SEQ ID NO: 21479 - DNA, 1295 bp, Arabidopsis thaliana
  misc_feature (1)..(1295): Ceres Seq. ID no. 13622035
  misc_feature: MA Experiment ID: 108434 Result: Up-regulated in Transcription
  misc_feature: MA Experiment 108434 PARAMETER Experiment Name: At_Root_Tips_cDNA_P Parameter: Tissue Value: Root Tips
  misc_feature: MA Experiment ID: 108573 Result: Up-regulated in Transcription
  misc_feature: MA Experiment 108573 PARAMETER Experiment Name: At_Drought_cDNA_P Parameter: Timepoint (hr) Value: 6
  misc_feature: MA Experiment 108573 PARAMETER Experiment Name: At_Drought_cDNA_P Parameter: Tissue Value: Aerial
  misc_feature: MA Experiment 108573 PARAMETER Experiment Name: At_Drought_cDNA_P Parameter: Treatment Value: Drought vs. No Drought
  misc_feature: MA Experiment ID: 108594 Result: Down-regulated in Transcription
  misc_feature: MA Experiment 108594 PARAMETER Experiment Name: At_Ler-rhl_Root_cDNA_P Parameter: Plant Line Value: null
  misc_feature: MA Experiment ID: 108595 Result: Down-regulated in Transcription
  misc_feature: MA Experiment 108595 PARAMETER Experiment Name: At_Ler-pi_Ovule_cDNA_P Parameter: Plant Line Value: null
  misc_feature: MA Experiment ID: 20000087 Result: Down-regulated in Transcription
  misc_feature: MA Experiment 20000087 PARAMETER Experiment Name: At_100uM_ABA_Mutants_cDNA_P Parameter: Plant Line Value: WS
  misc_feature: MA Experiment 20000087 PARAMETER Experiment Name: At_100uM_ABA_Mutants_cDNA_P Parameter: Timepoint (hr) Value: 6
  misc_feature: MA Experiment 20000087 PARAMETER Experiment Name: At_100uM_ABA_Mutants_cDNA_P Parameter: Tissue Value: Aerial
  misc_feature: MA Experiment 20000087 PARAMETER Experiment Name: At_100uM_ABA_Mutants_cDNA_P Parameter: Treatment Value: 100uM ABA vs. No Treatment
  misc_feature: MA Experiment ID: 20000224 Result: Down-regulated in Transcription
atccggagacatccattttctctggtagctgtttacttcttcttcttcttcttcctcctcctctgttcgtcaatcgccgatctcgttgcttcattttccttgagatcgattggtacaagtgttcatccaatggttggaggaggagttatccggcagcttcttagaaggaaacttcattcccaatcagtcgcaactccggtattgtcatggttgtcttcgaagaaagcgaatgaagatgctgggtctgctggtttaagagcatttgctctcatgggtgctggtattaccggattattgagtttttctactgttgcatctgctgatgaggctgaacatggtctggagtgtcctaactacccttggccacatgagggcattctcagctcatatgaccatgcttcgatccgtcgtggtcaccaagtttatcagcaagtttgtgcgtcttgccattcgatgtctctgatctcataccgagacttggtgggtgttgcctacacagaggaagaggcgaaggccatggcagctgaaatcgaggttgttgatggaccaaatgatgagtgtgagatgttcacccgacctggtaaactcagtgatcggcttcctgaaccatacttaaatgaatcggctgctaggttcgccaatggaggagcgtatccaccggatctaagtcttgtaactaaggcacgtcacaatggccaaaattatgtctttgctctgttgactggttatcgtgatcctcctgctggaatttcgatcagagaggggctacactacaatccttatttccctggtggagcaatcgctatgccaaaaatgctcaacgatgaagctgtggaatatgaagatggaactcctgcaacagaagcacagatgggtaaagatgttgtatccttcttgtcctgggcagctgaaccagagatggaagagaggaaattgatggggttcaaatggatattcttactgtctttggctctgcttcaagctgcgtattacaggagactgaaatggtcagtactcaaatcccgtaagcttgttctcgacgttgttaactaatcccgtgaagatcaccttttctctgggtaataatcattaatcttgaaagggataaatggtgaatcccactttttgtctcaaaagacatgtttctttgtttattgtttagaaagtctaatgaggcaaagaagtaaagcttttttaacctcaagtcacacatgattttgagattatattatttctttttggtttgttgtctcctaaaccggactcggtttgtcttaataaaaatgtggttttac

SEQ ID NO: 21480 - protein, 350 aa, Arabidopsis thaliana
  peptide (1)..(350): Ceres Seq. ID no. 13622036
  misc_feature (115)..(340): Pfam Name: Cytochrome C1 family Pfam Description: Cytochrome C1 family
  misc_feature (91)..(350): Homolog of NCBI NO: 82264 NR Description: ubiquinol-cytochrome-c reductase (EC 1.10.2.2)
  misc_feature (80)..(350): Homolog of NCBI NO: 117765 NR Description: Cytochrome c1, heme protein, mitochondrial
  misc_feature (44)..(350): Homolog of NCBI NO: 34907202 NR Description: putative cytochrome c1 precursor
  misc_feature (80)..(350): Homolog of NCBI NO: 7547401 NR Description: cytochrome c1 precursor [Solanum tuberosum]
  misc_feature (80)..(350): Homolog of NCBI NO: 82263 NR Description: ubiquinol-cytochrome-c reductase (EC 1.10.2.2)
  misc_feature (44)..(350): Homolog of NCBI NO: 15809956 NR Description: AT3g27240/K17E12_6 [Arabidopsis thaliana]
  misc_feature (44)..(350): Homolog of NCBI NO: 21593678 NR Description: cytochrome c, putative [Arabidopsis thaliana]
  misc_feature (44)..(350): Homolog of NCBI NO: 15232125 NR Description: cytochrome c -related [Arabidopsis thaliana]
  misc_feature (44)..(350): Homolog of NCBI NO: 15237497 NR Description: cytochrome c1 precursor [Arabidopsis thaliana]
  misc_feature (44)..(350): Homolog of NCBI NO: 15215624 NR Description: AT5g40810/MHK7_4 [Arabidopsis thaliana]
IRRHPFSLVAVYFFFFFFLLLCSSIADLVASFSLRSIGTSVHPMVGGGVIRQLLRRKLHSQSVATPVLSWLSSKKANEDAGSAGLRAFALMGAGITGLLSFSTVASADEAEHGLECPNYPWPHEGILSSYDHASIRRGHQVYQQVCASCHSMSLISYRDLVGVAYTEEEAKAMAAEIEVVDGPNDECEMFTRPGKLSDRLPEPYLNESAARFANGGAYPPDLSLVTKARHNGQNYVFALLTGYRDPPAGISIREGLHYNPYFPGGAIAMPKMLNDEAVEYEDGTPATEAQMGKDVVSFLSWAAEPEMEERKLMGFKWIFLLSLALLQAAYYRRLKWSVLKSRKLVLDVVN

SEQ ID NO: 21481 - protein, 307 aa, Arabidopsis thaliana
  peptide (1)..(307): Ceres Seq. ID no. 13622037
  misc_feature (72)..(297): Pfam Name: Cytochrome C1 family Pfam Description: Cytochrome C1 family
  misc_feature (48)..(307): Homolog of NCBI NO: 82264 NR Description: ubiquinol-cytochrome-c reductase (EC 1.10.2.2)
  misc_feature (37)..(307): Homolog of NCBI NO: 117765 NR Description: Cytochrome c1, heme protein, mitochondrial
  misc_feature (1)..(307): Homolog of NCBI NO: 34907202 NR Description: putative cytochrome c1 precursor
  misc_feature (37)..(307): Homolog of NCBI NO: 7547401 NR Description: cytochrome c1 precursor [Solanum tuberosum]
  misc_feature (37)..(307): Homolog of NCBI NO: 82263 NR Description: ubiquinol-cytochrome-c reductase (EC 1.10.2.2)
  misc_feature (1)..(307): Homolog of NCBI NO: 15809956 NR Description: AT3g27240/K17E12_6 [Arabidopsis thaliana]
  misc_feature (1)..(307): Homolog of NCBI NO: 21593678 NR Description: cytochrome c, putative [Arabidopsis thaliana]
  misc_feature (1)..(307): Homolog of NCBI NO: 15232125 NR Description: cytochrome c -related [Arabidopsis thaliana]
  misc_feature (1)..(307): Homolog of NCBI NO: 15237497 NR Description: cytochrome c1 precursor [Arabidopsis thaliana]
  misc_feature (1)..(307): Homolog of NCBI NO: 15215624 NR Description: AT5g40810/MHK7_4 [Arabidopsis thaliana]
MVGGGVIRQLLRRKLHSQSVATPVLSWLSSKKANEDAGSAGLRAFALMGAGITGLLSFSTVASADEAEHGLECPNYPWPHEGILSSYDHASIRRGHQVYQQVCASCHSMSLISYRDLVGVAYTEEEAKAMAAEIEVVDGPNDECEMFTRPGKLSDRLPEPYLNESAARFANGGAYPPDLSLVTKARHNGQNYVFALLTGYRDPPAGISIREGLHYNPYFPGGAIAMPKMLNDEAVEYEDGTPATEAQMGKDVVSFLSWAAEPEMEERKLMGFKWIFLLSLALLQAAYYRRLKWSVLKSRKLVLDVVN

SEQ ID NO: 21482 - protein, 260 aa, Arabidopsis thaliana
  peptide (1)..(260): Ceres Seq. ID no. 13622038
  misc_feature (25)..(250): Pfam Name: Cytochrome C1 family Pfam Description: Cytochrome C1 family
  misc_feature (1)..(260): Homolog of NCBI NO: 82264 NR Description: ubiquinol-cytochrome-c reductase (EC 1.10.2.2)
  misc_feature (1)..(260): Homolog of NCBI NO: 117765 NR Description: Cytochrome c1, heme protein, mitochondrial
  misc_feature (1)..(260): Homolog of NCBI NO: 34907202 NR Description: putative cytochrome c1 precursor
  misc_feature (1)..(260): Homolog of NCBI NO: 7547401 NR Description: cytochrome c1 precursor [Solanum tuberosum]
  misc_feature (1)..(260): Homolog of NCBI NO: 82263 NR Description: ubiquinol-cytochrome-c reductase (EC 1.10.2.2)
  misc_feature (1)..(260): Homolog of NCBI NO: 15809956 NR Description: AT3g27240/K17E12_6 [Arabidopsis thaliana]
  misc_feature (1)..(260): Homolog of NCBI NO: 21593678 NR Description: cytochrome c, putative [Arabidopsis thaliana]
  misc_feature (1)..(260): Homolog of NCBI NO: 15232125 NR Description: cytochrome c -related [Arabidopsis thaliana]
  misc_feature (1)..(260): Homolog of NCBI NO: 15237497 NR Description: cytochrome c1 precursor [Arabidopsis thaliana]
  misc_feature (1)..(260): Homolog of NCBI NO: 15215624 NR Description: AT5g40810/MHK7_4 [Arabidopsis thaliana]
MGAGITGLLSFSTVASADEAEHGLECPNYPWPHEGILSSYDHASIRRGHQVYQQVCASCHSMSLISYRDLVGVAYTEEEAKAMAAEIEVVDGPNDECEMFTRPGKLSDRLPEPYLNESAARFANGGAYPPDLSLVTKARHNGQNYVFALLTGYRDPPAGISIREGLHYNPYFPGGAIAMPKMLNDEAVEYEDGTPATEAQMGKDVVSFLSWAAEPEMEERKLMGFKWIFLLSLALLQAAYYRRLKWSVLKSRKLVLDVVN

SEQ ID NO: 21483 - DNA, 1006 bp, Arabidopsis thaliana
  misc_feature (1)..(1006): Ceres Seq. ID no. 12328667
  misc_feature: MA Experiment ID: 108434 Result: Up-regulated in Transcription
  misc_feature: MA Experiment 108434 PARAMETER Experiment Name: At_Root_Tips_cDNA_P Parameter: Tissue Value: Root Tips
  misc_feature: MA Experiment ID: 108595 Result: Down-regulated in Transcription
  misc_feature: MA Experiment 108595 PARAMETER Experiment Name: At_Ler-pi_Ovule_cDNA_P Parameter: Plant Line Value: null
  misc_feature: MA Experiment ID: 20000069 Result: Down-regulated in Transcription
  misc_feature: MA Experiment 20000069 PARAMETER Experiment Name: At_100uM_ABA_Mutants_cDNA_P Parameter: Plant Line Value: CS23
  misc_feature: MA Experiment 20000069 PARAMETER Experiment Name: At_100uM_ABA_Mutants_cDNA_P Parameter: Timepoint (hr) Value: 6
  misc_feature: MA Experiment 20000069 PARAMETER Experiment Name: At_100uM_ABA_Mutants_cDNA_P Parameter: Tissue Value: Aerial
  misc_feature: MA Experiment 20000069 PARAMETER Experiment Name: At_100uM_ABA_Mutants_cDNA_P Parameter: Treatment Value: 100uM ABA vs. No Treatment
  misc_feature: MA Experiment ID: 20000070 Result: Down-regulated in Transcription
  misc_feature: MA Experiment 20000070 PARAMETER Experiment Name: At_100uM_ABA_Mutants_cDNA_P Parameter: Plant Line Value: CS24
  misc_feature: MA Experiment 20000070 PARAMETER Experiment Name: At_100uM_ABA_Mutants_cDNA_P Parameter: Timepoint (hr) Value: 6
  misc_feature: MA Experiment 20000070 PARAMETER Experiment Name: At_100uM_ABA_Mutants_cDNA_P Parameter: Tissue Value: Aerial
  misc_feature: MA Experiment 20000070 PARAMETER Experiment Name: At_100uM_ABA_Mutants_cDNA_P Parameter: Treatment Value: 100uM ABA vs. No Treatment
  misc_feature: MA Experiment ID: 20000071 Result: Down-regulated in Transcription
  misc_feature: MA Experiment 20000071 PARAMETER Experiment Name: At_100uM_ABA_Mutants_cDNA_P Parameter: Plant Line Value: CS8104
  misc_feature: MA Experiment 20000071 PARAMETER Experiment Name: At_100uM_ABA_Mutants_cDNA_P Parameter: Timepoint (hr) Value: 6
  misc_feature: MA Experiment 20000071 PARAMETER Experiment Name: At_100uM_ABA_Mutants_cDNA_P Parameter: Tissue Value: Aerial
  misc_feature: MA Experiment 20000071 PARAMETER Experiment Name: At_100uM_ABA_Mutants_cDNA_P Parameter: Treatment Value: 100uM ABA vs. No Treatment
  misc_feature: MA Experiment ID: 20000072 Result: Down-regulated in Transcription
  misc_feature: MA Experiment 20000072 PARAMETER Experiment Name: At_100uM_ABA_Mutants_cDNA_P Parameter: Plant Line Value: CS8105
  misc_feature: MA Experiment 20000072 PARAMETER Experiment Name: At_100uM_ABA_Mutants_cDNA_P Parameter: Timepoint (hr) Value: 6
  misc_feature: MA Experiment 20000072 PARAMETER Experiment Name: At_100uM_ABA_Mutants_cDNA_P Parameter: Tissue Value: Aerial
  misc_feature: MA Experiment 20000072 PARAMETER Experiment Name: At_100uM_ABA_Mutants_cDNA_P Parameter: Treatment Value: 100uM ABA vs. No Treatment
  misc_feature: MA Experiment ID: 20000086 Result: Down-regulated in Transcription
  misc_feature: MA Experiment 20000086 PARAMETER Experiment Name: At_100uM_ABA_Mutants_cDNA_P Parameter: Plant Line Value: CS22
  misc_feature: MA Experiment 20000086 PARAMETER Experiment Name: At_100uM_ABA_Mutants_cDNA_P Parameter: Timepoint (hr) Value: 6
  misc_feature: MA Experiment 20000086 PARAMETER Experiment Name: At_100uM_ABA_Mutants_cDNA_P Parameter: Tissue Value: Aerial
  misc_feature: MA Experiment 20000086 PARAMETER Experiment Name: At_100uM_ABA_Mutants_cDNA_P Parameter: Treatment Value: 100uM ABA vs. No Treatment
  misc_feature: MA Experiment ID: 20000087 Result: Down-regulated in Transcription
  misc_feature: MA Experiment 20000087 PARAMETER Experiment Name: At_100uM_ABA_Mutants_cDNA_P Parameter: Plant Line Value: WS
  misc_feature: MA Experiment 20000087 PARAMETER Experiment Name: At_100uM_ABA_Mutants_cDNA_P Parameter: Timepoint (hr) Value: 6
  misc_feature: MA Experiment 20000087 PARAMETER Experiment Name: At_100uM_ABA_Mutants_cDNA_P Parameter: Tissue Value: Aerial
  misc_feature: MA Experiment 20000087 PARAMETER Experiment Name: At_100uM_ABA_Mutants_cDNA_P Parameter: Treatment Value: 100uM ABA vs. No Treatment
  misc_feature: MA Experiment ID: 20000088 Result: Down-regulated in Transcription
  misc_feature: MA Experiment 20000088 PARAMETER Experiment Name: At_100uM_ABA_Mutants_cDNA_P Parameter: Plant Line Value: Landsberg
  misc_feature: MA Experiment 20000088 PARAMETER Experiment Name: At_100uM_ABA_Mutants_cDNA_P Parameter: Timepoint (hr) Value: 6
  misc_feature: MA Experiment 20000088 PARAMETER Experiment Name: At_100uM_ABA_Mutants_cDNA_P Parameter: Tissue Value: Aerial
  misc_feature: MA Experiment 20000088 PARAMETER Experiment Name: At_100uM_ABA_Mutants_cDNA_P Parameter: Treatment Value: 100uM ABA vs. No Treatment
  misc_feature: MA Experiment ID: 20000117 Result: Down-regulated in Transcription
  misc_feature: MA Experiment 20000117 PARAMETER Experiment Name: At_100uM_ABA_Mutants_cDNA_P Parameter: Plant Line Value: Columbia
  misc_feature: MA Experiment 20000117 PARAMETER Experiment Name: At_100uM_ABA_Mutants_cDNA_P Parameter: Timepoint (hr) Value: 6
  misc_feature: MA Experiment 20000117 PARAMETER Experiment Name: At_100uM_ABA_Mutants_cDNA_P Parameter: Tissue Value: Aerial
  misc_feature: MA Experiment 20000117 PARAMETER Experiment Name: At_100uM_ABA_Mutants_cDNA_P Parameter: Treatment Value: 100uM ABA vs. No Treatment
  misc_feature: MA Experiment ID: 20000437 Result: Down-regulated in Transcription
  misc_feature: MA Experiment 20000437 PARAMETER Experiment Name: At_Drought_P Parameter: Age (day) Value: 8
  misc_feature: MA Experiment 20000437 PARAMETER Experiment Name: At_Drought_P Parameter: Organism Value: A. thaliana
  misc_feature: MA Experiment 20000437 PARAMETER Experiment Name: At_Drought_P Parameter: Plant Line Value: WS
  misc_feature: MA Experiment 20000437 PARAMETER Experiment Name: At_Drought_P Parameter: Timepoint (hr) Value: 24
  misc_feature: MA Experiment 20000437 PARAMETER Experiment Name: At_Drought_P Parameter: Tissue Value: Whole Plant
  misc_feature: MA Experiment 20000437 PARAMETER Experiment Name: At_Drought_P Parameter: Treatment Value: Drought vs. No Drought
  misc_feature: MA Experiment ID: 20000439 Result: Down-regulated in Transcription
  misc_feature: MA Experiment 20000439 PARAMETER Experiment Name: At_Roots__P Parameter: Age (day) Value: 14 vs. 21
  misc_feature: MA Experiment 20000439 PARAMETER Experiment Name: At_Roots__P Parameter: Organism Value: A. thaliana
  misc_feature: MA Experiment 20000439 PARAMETER Experiment Name: At_Roots__P Parameter: Tissue Value: Roots vs. Whole Plant
  misc_feature: MA Experiment ID: 20000794 Result: Down-regulated in Transcription
  misc_feature: MA Experiment 20000794 PARAMETER Experiment Name: At_Petals_P Parameter: Age (day) Value: 23-25 days
  misc_feature: MA Experiment 20000794 PARAMETER Experiment Name: At_Petals_P Parameter: Plant Line Value: WS
  misc_feature: MA Experiment 20000794 PARAMETER Experiment Name: At_Petals_P Parameter: Tissue Value: Petals vs. Whole plant
  misc_feature: MA Experiment ID: 20001451 Result: Down-regulated in Transcription
  misc_feature: MA Experiment 20001451 PARAMETER Experiment Name: At_Far-red-induction_P Parameter: Age (day) Value: 7
  misc_feature: MA Experiment 20001451 PARAMETER Experiment Name: At_Far-red-induction_P Parameter: Light Value: Far-red vs. White
  misc_feature: MA Experiment 20001451 PARAMETER Experiment Name: At_Far-red-induction_P Parameter: Organism Value: A. thaliana
  misc_feature: MA Experiment 20001451 PARAMETER Experiment Name: At_Far-red-induction_P Parameter: Plant Line Value: Columbia
  misc_feature: MA Experiment 20001451 PARAMETER Experiment Name: At_Far-red-induction_P Parameter: Timepoint (hr) Value: 24
  misc_feature: MA Experiment 20001451 PARAMETER Experiment Name: At_Far-red-induction_P Parameter: Tissue Value: Whole Plant
  misc_feature: MA Experiment ID: 20001557 Result: Down-regulated in Transcription
  misc_feature: MA Experiment 20001557 PARAMETER Experiment Name: At_Drought_Soil_Dry_P Parameter: Age (day) Value: 27
  misc_feature: MA Experiment 20001557 PARAMETER Experiment Name: At_Drought_Soil_Dry_P Parameter: Organism Value: A. thaliana
  misc_feature: MA Experiment 20001557 PARAMETER Experiment Name: At_Drought_Soil_Dry_P Parameter: Plant Line Value: WS
  misc_feature: MA Experiment 20001557 PARAMETER Experiment Name: At_Drought_Soil_Dry_P Parameter: Post Timepoint (hr) Value: 3
  misc_feature: MA Experiment 20001557 PARAMETER Experiment Name: At_Drought_Soil_Dry_P Parameter: Post-Treatment Value: Re-Water vs. No Drought
  misc_feature: MA Experiment 20001557 PARAMETER Experiment Name: At_Drought_Soil_Dry_P Parameter: Timepoint (day) Value: 13
  misc_feature: MA Experiment 20001557 PARAMETER Experiment Name: At_Drought_Soil_Dry_P Parameter: Treatment Value: Drought vs. No Drought
  misc_feature: MA Experiment ID: 20001757 Result: Up-regulated in Transcription
  misc_feature: MA Experiment 20001757 PARAMETER Experiment Name: At_50mM_NH4NO3_L-to-H_P Parameter: Timepoint (hr) Value: 6
  misc_feature: MA Experiment 20001757 PARAMETER Experiment Name: At_50mM_NH4NO3_L-to-H_P Parameter: Tissue Value: Leaf
  misc_feature: MA Experiment 20001757 PARAMETER Experiment Name: At_50mM_NH4NO3_L-to-H_P Parameter: Treatment Value: 50mM NH4NO3 vs 100mM Mannitol
  misc_feature: MA Experiment ID: 20001904 Result: Down-regulated in Transcription
  misc_feature: MA Experiment 20001904 PARAMETER Experiment Name: At_Drought_Reproduction_P Parameter: Age (day) Value: 37
  misc_feature: MA Experiment 20001904 PARAMETER Experiment Name: At_Drought_Reproduction_P Parameter: Organism Value: A. thaliana
  misc_feature: MA Experiment 20001904 PARAMETER Experiment Name: At_Drought_Reproduction_P Parameter: Plant Line Value: WS
  misc_feature: MA Experiment 20001904 PARAMETER Experiment Name: At_Drought_Reproduction_P Parameter: Timepoint (day) Value: 7
  misc_feature: MA Experiment 20001904 PARAMETER Experiment Name: At_Drought_Reproduction_P Parameter: Tissue Value: Rosettes
  misc_feature: MA Experiment 20001904 PARAMETER Experiment Name: At_Drought_Reproduction_P Parameter: Treatment Value: Drought vs. No Drought
  misc_feature: MA Experiment ID: 20001905 Result: Down-regulated in Transcription
  misc_feature: MA Experiment 20001905 PARAMETER Experiment Name: At_Drought_Reproduction_P Parameter: Age (day) Value: 40
  misc_feature: MA Experiment 20001905 PARAMETER Experiment Name: At_Drought_Reproduction_P Parameter: Organism Value: A. thaliana
  misc_feature: MA Experiment 20001905 PARAMETER Experiment Name: At_Drought_Reproduction_P Parameter: Plant Line Value: WS
  misc_feature: MA Experiment 20001905 PARAMETER Experiment Name: At_Drought_Reproduction_P Parameter: Timepoint (day) Value: 10
  misc_feature: MA Experiment 20001905 PARAMETER Experiment Name: At_Drought_Reproduction_P Parameter: Tissue Value: Rosettes
  misc_feature: MA Experiment 20001905 PARAMETER Experiment Name: At_Drought_Reproduction_P Parameter: Treatment Value: Drought vs. No Drought
  misc_feature: MA Experiment ID: 20001906 Result: Down-regulated in Transcription
  misc_feature: MA Experiment 20001906 PARAMETER Experiment Name: At_Drought_Reproduction_P Parameter: Age (day) Value: 35
  misc_feature: MA Experiment 20001906 PARAMETER Experiment Name: At_Drought_Reproduction_P Parameter: Organism Value: A. thaliana
  misc_feature: MA Experiment 20001906 PARAMETER Experiment Name: At_Drought_Reproduction_P Parameter: Plant Line Value: WS
  misc_feature: MA Experiment 20001906 PARAMETER Experiment Name: At_Drought_Reproduction_P Parameter: Timepoint (day) Value: 5
  misc_feature: MA Experiment 20001906 PARAMETER Experiment Name: At_Drought_Reproduction_P Parameter: Tissue Value: Siliques
  misc_feature: MA Experiment 20001906 PARAMETER Experiment Name: At_Drought_Reproduction_P Parameter: Treatment Value: Drought vs. No Drought
  misc_feature: MA Experiment ID: 20001908 Result: Down-regulated in Transcription
  misc_feature: MA Experiment 20001908 PARAMETER Experiment Name: At_Drought_Reproduction_P Parameter: Age (day) Value: 40
  misc_feature: MA Experiment 20001908 PARAMETER Experiment Name: At_Drought_Reproduction_P Parameter: Organism Value: A. thaliana
  misc_feature: MA Experiment 20001908 PARAMETER Experiment Name: At_Drought_Reproduction_P Parameter: Plant Line Value: WS
  misc_feature: MA Experiment 20001908 PARAMETER Experiment Name: At_Drought_Reproduction_P Parameter: Timepoint (day) Value: 10
  misc_feature: MA Experiment 20001908 PARAMETER Experiment Name: At_Drought_Reproduction_P Parameter: Tissue Value: Siliques
  misc_feature: MA Experiment 20001908 PARAMETER Experiment Name: At_Drought_Reproduction_P Parameter: Treatment Value: Drought vs. No Drought
  misc_feature: MA Experiment ID: 20001911 Result: Down-regulated in Transcription
  misc_feature: MA Experiment 20001911 PARAMETER Experiment Name: At_Drought_Reproduction_P Parameter: Age (day) Value: 40
  misc_feature: MA Experiment 20001911 PARAMETER Experiment Name: At_Drought_Reproduction_P Parameter: Organism Value: A. thaliana
  misc_feature: MA Experiment 20001911 PARAMETER Experiment Name: At_Drought_Reproduction_P Parameter: Plant Line Value: WS
  misc_feature: MA Experiment 20001911 PARAMETER Experiment Name: At_Drought_Reproduction_P Parameter: Timepoint (day) Value: 10
  misc_feature: MA Experiment 20001911 PARAMETER Experiment Name: At_Drought_Reproduction_P Parameter: Tissue Value: Flowers
  misc_feature: MA Experiment 20001911 PARAMETER Experiment Name: At_Drought_Reproduction_P Parameter: Treatment Value: Drought vs. No Drought
gtgattgacagatagataagagtgtttggtagctcagactcagagagtcacaaagtgtgtgtagcagcaatggcgtctgttgcttcttcaactactctcatctcttctccctcttctagggtttttccagcaaagtcttcactttcctctccatctgtttctttccttcgaaccctttcttctccttccgcatctgcttctctccgctccggatttgctcgacgctcttccctcagctccacttctcgtcggagctttgctgtcaaagcccaggccgatgatcttccactggttggaaacaaggcgcctgattttgaggcagaggctgtgtttgatcaagagttcatcaaggttaagctctctgattacattggaaagaagtatgtgattctctttttctacccattggactttactttcgtctgcccaacagagattactgccttcagtgaccggcattcagaatttgagaagttgaacaccgaagtattaggtgtttctgtcgatagtgtgttctctcaccttgcatgggtccaaacagacaggaaatctggagggcttggtgatctgaactatccccttatttcagatgtcactaaatcaatctcaaagtcgttcggagtgctcatccatgatcagggaatagcactgagaggacttttcataatcgacaaggaaggagtgatccaacattccaccatcaacaatcttggtattggccgaagcgttgatgagacaatgagaaccctccaggcattacagtacatccaggaaaacccggatgaagtctgcccagcaggatggaagccgggtgagaagtcaatgaaacccgacccaaaactcagcaaagagtacttctcagctatttagaaactctactatgatagcaaaaaggtacaatctttgttatatgtgagcagagttttttttcttgtacgctaaaacaatcctttgtttgattctcactttgtccccaaaattataataaaaaactttttccgttaag

SEQ ID NO: 21484 - protein, 266 aa, Arabidopsis thaliana
  peptide (1)..(266): Ceres Seq. ID no. 12328668
  misc_feature (75)..(226): Pfam Name: AhpC/TSA family Pfam Description: AhpC/TSA family
  misc_feature (1)..(266): Homolog of NCBI NO: 18415155 NR Description: 2-cys peroxiredoxin-like protein
  misc_feature (1)..(266): Homolog of NCBI NO: 1498198 NR Description: 2-Cys peroxiredoxin bas1 [Arabidopsis thaliana]
  misc_feature (1)..(266): Homolog of NCBI NO: 7242491 NR Description: 2-Cys peroxiredoxin [Arabidopsis thaliana]
  misc_feature (1)..(266): Homolog of NCBI NO: 9758409 NR Description: 2-cys peroxiredoxin-like protein [Arabidopsis
  misc_feature (1)..(266): Homolog of NCBI NO: 11119229 NR Description: 2-Cys peroxiredoxin [Brassica napus]
  misc_feature (1)..(266): Homolog of NCBI NO: 13265490 NR Description: AT5g06290 [Arabidopsis thaliana]
  misc_feature (1)..(266): Homolog of NCBI NO: 21553667 NR Description: 2-cys peroxiredoxin-like protein [Arabidopsis
  misc_feature (1)..(266): Homolog of NCBI NO: 3121825 NR Description: 2-cys peroxiredoxin BAS1, chloroplast precursor
  misc_feature (1)..(266): Homolog of NCBI NO: 21592588 NR Description: putative 2-cys peroxiredoxin BAS1 precursor
  misc_feature (1)..(266): Homolog of NCBI NO: 15229806 NR Description: putative 2-cys peroxiredoxin BAS1 precursor
MASVASSTTLISSPSSRVFPAKSSLSSPSVSFLRTLSSPSASASLRSGFARRSSLSSTSRRSFAVKAQADDLPLVGNKAPDFEAEAVFDQEFIKVKLSDYIGKKYVILFFYPLDFTFVCPTEITAFSDRHSEFEKLNTEVLGVSVDSVFSHLAWVQTDRKSGGLGDLNYPLISDVTKSISKSFGVLIHDQGIALRGLFIIDKEGVIQHSTINNLGIGRSVDETMRTLQALQYIQENPDEVCPAGWKPGEKSMKPDPKLSKEYFSAI

SEQ ID NO: 21485 - DNA, 1164 bp, Arabidopsis thaliana
  misc_feature (1)..(1164): Ceres Seq. ID no. 12325990
  misc_feature: MA Experiment ID: 108464 Result: Down-regulated in Transcription
  misc_feature: MA Experiment 108464 PARAMETER Experiment Name: At_Germinating_Seeds_cDNA_P Parameter: Age (day) Value: 4 vs. 0
  misc_feature: MA Experiment 108464 PARAMETER Experiment Name: At_Germinating_Seeds_cDNA_P Parameter: Tissue Value: Germinating Seeds
  misc_feature: MA Experiment ID: 108573 Result: Up-regulated in Transcription
  misc_feature: MA Experiment 108573 PARAMETER Experiment Name: At_Drought_cDNA_P Parameter: Timepoint (hr) Value: 6
  misc_feature: MA Experiment 108573 PARAMETER Experiment Name: At_Drought_cDNA_P Parameter: Tissue Value: Aerial
  misc_feature: MA Experiment 108573 PARAMETER Experiment Name: At_Drought_cDNA_P Parameter: Treatment Value: Drought vs. No Drought
  misc_feature: MA Experiment ID: 20000234 Result: Up-regulated in Transcription
  misc_feature: MA Experiment 20000234 PARAMETER Experiment Name: At_Siliques_P Parameter: Age (day) Value: 21
  misc_feature: MA Experiment 20000234 PARAMETER Experiment Name: At_Siliques_P Parameter: Organism Value: A. thaliana
  misc_feature: MA Experiment 20000234 PARAMETER Experiment Name: At_Siliques_P Parameter: Plant Line Value: WS
  misc_feature: MA Experiment 20000234 PARAMETER Experiment Name: At_Siliques_P Parameter: Tissue Value: Less Than 5mm Siliques vs. Whole Plant
  misc_feature: MA Experiment ID: 20000235 Result: Up-regulated in Transcription
  misc_feature: MA Experiment 20000235 PARAMETER Experiment Name: At_Siliques_P Parameter: Age (day) Value: 21
  misc_feature: MA Experiment 20000235 PARAMETER Experiment Name: At_Siliques_P Parameter: Organism Value: A. thaliana
  misc_feature: MA Experiment 20000235 PARAMETER Experiment Name: At_Siliques_P Parameter: Plant Line Value: WS
  misc_feature: MA Experiment 20000235 PARAMETER Experiment Name: At_Siliques_P Parameter: Tissue Value: 5-10mm Siliques vs. Whole Plant
  misc_feature: MA Experiment ID: 20000437 Result: Up-regulated in Transcription
  misc_feature: MA Experiment 20000437 PARAMETER Experiment Name: At_Drought_P Parameter: Age (day) Value: 8
  misc_feature: MA Experiment 20000437 PARAMETER Experiment Name: At_Drought_P Parameter: Organism Value: A. thaliana
  misc_feature: MA Experiment 20000437 PARAMETER Experiment Name: At_Drought_P Parameter: Plant Line Value: WS
  misc_feature: MA Experiment 20000437 PARAMETER Experiment Name: At_Drought_P Parameter: Timepoint (hr) Value: 24
  misc_feature: MA Experiment 20000437 PARAMETER Experiment Name: At_Drought_P Parameter: Tissue Value: Whole Plant
  misc_feature: MA Experiment 20000437 PARAMETER Experiment Name: At_Drought_P Parameter: Treatment Value: Drought vs. No Drought
  misc_feature: MA Experiment ID: 20001555 Result: Up-regulated in Transcription
  misc_feature: MA Experiment 20001555 PARAMETER Experiment Name: At_Drought_Soil_Dry_P Parameter: Age (day) Value: 24
  misc_feature: MA Experiment 20001555 PARAMETER Experiment Name: At_Drought_Soil_Dry_P Parameter: Organism Value: A. thaliana
  misc_feature: MA Experiment 20001555 PARAMETER Experiment Name: At_Drought_Soil_Dry_P Parameter: Plant Line Value: WS
  misc_feature: MA Experiment 20001555 PARAMETER Experiment Name: At_Drought_Soil_Dry_P Parameter: Post Timepoint (hr) Value: None
  misc_feature: MA Experiment 20001555 PARAMETER Experiment Name: At_Drought_Soil_Dry_P Parameter: Post-Treatment Value: None
  misc_feature: MA Experiment 20001555 PARAMETER Experiment Name: At_Drought_Soil_Dry_P Parameter: Timepoint (day) Value: 10
  misc_feature: MA Experiment 20001555 PARAMETER Experiment Name: At_Drought_Soil_Dry_P Parameter: Treatment Value: Drought vs. No Drought
  misc_feature: MA Experiment ID: 20001556 Result: Up-regulated in Transcription
  misc_feature: MA Experiment 20001556 PARAMETER Experiment Name: At_Drought_Soil_Dry_P Parameter: Age (day) Value: 26
  misc_feature: MA Experiment 20001556 PARAMETER Experiment Name: At_Drought_Soil_Dry_P Parameter: Organism Value: A. thaliana
  misc_feature: MA Experiment 20001556 PARAMETER Experiment Name: At_Drought_Soil_Dry_P Parameter: Plant Line Value: WS
  misc_feature: MA Experiment 20001556 PARAMETER Experiment Name: At_Drought_Soil_Dry_P Parameter: Post Timepoint (hr) Value: None
  misc_feature: MA Experiment 20001556 PARAMETER Experiment Name: At_Drought_Soil_Dry_P Parameter: Post-Treatment Value: None
  misc_feature: MA Experiment 20001556 PARAMETER Experiment Name: At_Drought_Soil_Dry_P Parameter: Timepoint (day) Value: 12
  misc_feature: MA Experiment 20001556 PARAMETER Experiment Name: At_Drought_Soil_Dry_P Parameter: Treatment Value: Drought vs. No Drought
gaaacttagagagacagagagagagaaagctcaaattcaatcatcaatgttaacggacgagagagaagtagtctgtgtcaccggcgccagtggctgcatcggctcgtggctggtccatcagctcctcctccgcggctactccgtccacgccaccgtgaaaaacctccaggatgagaaagagacgaaacatctagaaggtctcgaaggtgcagccacacgcctccatctattcgagatggatctcctacaatacgacaccgtttccgccgccatcaatggttgctccggcgtattccacctcgcatcaccttgtatcgtcgatgaagtccaagatccccagaagcaactacttgacccggcggttaaaggaaccataaatgttctgacggcggcaaaagaagccagtgttaagagagttgttgtgacgtcttcgatatcggcgattactccaagtcccaactggcctgctgataagatcaagaatgaggaatgttgggctgctgaagactactgcaggcaaaatggattgtggtatccactgtcgaagacgcttgctgagaaggcagcttgggaatttgcagaggagaaaggattggatgtggttgtggtgaatccaggcactgtcatggggcctgtgattcctccgtctcttaacgctagcatgcacatgcttctacgccttcttcaggggtgcacggagacatacgagaacttctttatggggtctgtgcatttcaaggatgtggctttagctcatattcttgtatacgaggatccatattcgaaaggaaggcacttgtgcgttgaggctatctctcactacggtgattttgtagccaaagttgctgagctctatcccaattacaatgtccccaagttaccgagagagactcaaccgggtttacttcgagataagaatgcatcaaagaagctcatagatttggggttaaagttcatttccatggaggaaatcatcaaggaaggtgtggagagtcttaaaagcaaaggatttatctcttaatacctacctctgtaactctgtttgattgagcaattaacacaatctctaggcagcagaaacatttcatatgatatacgattttgcacttttgtaataaataagctggcctatggtatggtatgaacatccaattaatatttatt

SEQ ID NO: 21486 - protein, 339 aa, Arabidopsis thaliana
  peptide (1)..(339): Ceres Seq. ID no. 12325991
  misc_feature (21)..(210): Pfam Name: 3-beta hydroxysteroid dehydrogenase/isomerase family Pfam Description: 3-beta hydroxysteroid dehydrogenase/isomerase
  misc_feature (16)..(338): Homolog of NCBI NO: 25140434 NR Description: cinnamoyl CoA reductase [Solanum tuberosum]
  misc_feature (2)..(338): Homolog of NCBI NO: 25405464 NR Description: hypothetical protein F5D21.12 [imported] -
  misc_feature (16)..(338): Homolog of NCBI NO: 30694964 NR Description: cinnamyl-alcohol dehydrogenase (CAD), putative
  misc_feature (14)..(338): Homolog of NCBI NO: 31414896 NR Description: cinnamoyl CoA reductase [Fragaria x ananassa]
  misc_feature (18)..(339): Homolog of NCBI NO: 17978649 NR Description: cinnamoyl-CoA reductase [Pinus taeda]
  misc_feature (4)..(339): Homolog of NCBI NO: 34913420 NR Description: putative cinnamyl-alcohol dehydrogenase
  misc_feature (23)..(338): Homolog of NCBI NO: 34907928 NR Description: putative cinnamoyl CoA reductase
  misc_feature (21)..(338): Homolog of NCBI NO: 15226955 NR Description: putative cinnamoyl-CoA reductase; protein id:
  misc_feature (20)..(339): Homolog of NCBI NO: 28876000 NR Description: putative cinnamoyl-CoA reductase
  misc_feature (16)..(339): Homolog of NCBI NO: 15237678 NR Description: cinnamoyl-CoA reductase - like protein
KLRETEREKAQIQSSMLTDEREVVCVTGASGCIGSWLVHQLLLRGYSVHATVKNLQDEKETKHLEGLEGAATRLHLFEMDLLQYDTVSAAINGCSGVFHLASPCIVDEVQDPQKQLLDPAVKGTINVLTAAKEASVKRVVVTSSISAITPSPNWPADKIKNEECWAAEDYCRQNGLWYPLSKTLAEKAAWEFAEEKGLDVVVVNPGTVMGPVIPPSLNASMHMLLRLLQGCTETYENFFMGSVHFKDVALAHILVYEDPYSKGRHLCVEAISHYGDFVAKVAELYPNYNVPKLPRETQPGLLRDKNASKKLIDLGLKFISMEEIIKEGVESLKSKGFIS

SEQ ID NO: 21487 - protein, 324 aa, Arabidopsis thaliana
  peptide (1)..(324): Ceres Seq. ID no. 12325992
  misc_feature (6)..(195): Pfam Name: 3-beta hydroxysteroid dehydrogenase/isomerase family Pfam Description: 3-beta hydroxysteroid dehydrogenase/isomerase
  misc_feature (1)..(323): Homolog of NCBI NO: 25140434 NR Description: cinnamoyl CoA reductase [Solanum tuberosum]
  misc_feature (1)..(323): Homolog of NCBI NO: 25405464 NR Description: hypothetical protein F5D21.12 [imported] -
  misc_feature (1)..(323): Homolog of NCBI NO: 30694964 NR Description: cinnamyl-alcohol dehydrogenase (CAD), putative
  misc_feature (1)..(323): Homolog of NCBI NO: 31414896 NR Description: cinnamoyl CoA reductase [Fragaria x ananassa]
  misc_feature (3)..(324): Homolog of NCBI NO: 17978649 NR Description: cinnamoyl-CoA reductase [Pinus taeda]
  misc_feature (1)..(324): Homolog of NCBI NO: 34913420 NR Description: putative cinnamyl-alcohol dehydrogenase
  misc_feature (8)..(323): Homolog of NCBI NO: 34907928 NR Description: putative cinnamoyl CoA reductase
  misc_feature (6)..(323): Homolog of NCBI NO: 15226955 NR Description: putative cinnamoyl-CoA reductase; protein id:
  misc_feature (5)..(324): Homolog of NCBI NO: 28876000 NR Description: putative cinnamoyl-CoA reductase
  misc_feature (1)..(324): Homolog of NCBI NO: 15237678 NR Description: cinnamoyl-CoA reductase - like protein
MLTDEREVVCVTGASGCIGSWLVHQLLLRGYSVHATVKNLQDEKETKHLEGLEGAATRLHLFEMDLLQYDTVSAAINGCSGVFHLASPCIVDEVQDPQKQLLDPAVKGTINVLTAAKEASVKRVVVTSSISAITPSPNWPADKIKNEECWAAEDYCRQNGLWYPLSKTLAEKAAWEFAEEKGLDVVVVNPGTVMGPVIPPSLNASMHMLLRLLQGCTETYENFFMGSVHFKDVALAHILVYEDPYSKGRHLCVEAISHYGDFVAKVAELYPNYNVPKLPRETQPGLLRDKNASKKLIDLGLKFISMEEIIKEGVESLKSKGFIS

SEQ ID NO: 21488 - protein, 261 aa, Arabidopsis thaliana
  peptide (1)..(261): Ceres Seq. ID no. 12325993
  misc_feature (1)..(132): Pfam Name: 3-beta hydroxysteroid dehydrogenase/isomerase family Pfam Description: 3-beta hydroxysteroid dehydrogenase/isomerase
  misc_feature (1)..(260): Homolog of NCBI NO: 25140434 NR Description: cinnamoyl CoA reductase [Solanum tuberosum]
  misc_feature (1)..(260): Homolog of NCBI NO: 25405464 NR Description: hypothetical protein F5D21.12 [imported] -
  misc_feature (1)..(260): Homolog of NCBI NO: 30694964 NR Description: cinnamyl-alcohol dehydrogenase (CAD), putative
  misc_feature (1)..(260): Homolog of NCBI NO: 31414896 NR Description: cinnamoyl CoA reductase [Fragaria x ananassa]
  misc_feature (1)..(261): Homolog of NCBI NO: 17978649 NR Description: cinnamoyl-CoA reductase [Pinus taeda]
  misc_feature (1)..(261): Homolog of NCBI NO: 34913420 NR Description: putative cinnamyl-alcohol dehydrogenase
  misc_feature (1)..(260): Homolog of NCBI NO: 34907928 NR Description: putative cinnamoyl CoA reductase
  misc_feature (1)..(260): Homolog of NCBI NO: 15226955 NR Description: putative cinnamoyl-CoA reductase; protein id:
  misc_feature (1)..(261): Homolog of NCBI NO: 28876000 NR Description: putative cinnamoyl-CoA reductase
  misc_feature (1)..(261): Homolog of NCBI NO: 15237678 NR Description: cinnamoyl-CoA reductase - like protein
MDLLQYDTVSAAINGCSGVFHLASPCIVDEVQDPQKQLLDPAVKGTINVLTAAKEASVKRVVVTSSISAITPSPNWPADKIKNEECWAAEDYCRQNGLWYPLSKTLAEKAAWEFAEEKGLDVVVVNPGTVMGPVIPPSLNASMHMLLRLLQGCTETYENFFMGSVHFKDVALAHILVYEDPYSKGRHLCVEAISHYGDFVAKVAELYPNYNVPKLPRETQPGLLRDKNASKKLIDLGLKFISMEEIIKEGVESLKSKGFIS

SEQ ID NO: 21489 - DNA, 1257 bp, Arabidopsis thaliana
  misc_feature (1)..(1257): Ceres Seq. ID no. 13490456
  misc_feature: MA Experiment ID: 108435 Result: Down-regulated in Transcription
  misc_feature: MA Experiment 108435 PARAMETER Experiment Name: At_stm_Mutants_cDNA_P Parameter: Plant Line Value: wt Landsburg vs stm
  misc_feature: MA Experiment 108435 PARAMETER Experiment Name: At_stm_Mutants_cDNA_P Parameter: Tissue Value: Shoot Apical Meristem Region
  misc_feature: MA Experiment ID: 108462 Result: Up-regulated in Transcription
  misc_feature: MA Experiment 108462 PARAMETER Experiment Name: At_Germinating_Seeds_cDNA_P Parameter: Age (day) Value: 2 vs. 0
  misc_feature: MA Experiment 108462 PARAMETER Experiment Name: At_Germinating_Seeds_cDNA_P Parameter: Tissue Value: Germinating Seeds
  misc_feature: MA Experiment ID: 108463 Result: Up-regulated in Transcription
  misc_feature: MA Experiment 108463 PARAMETER Experiment Name: At_Germinating_Seeds_cDNA_P Parameter: Age (day) Value: 3 vs. 0
  misc_feature: MA Experiment 108463 PARAMETER Experiment Name: At_Germinating_Seeds_cDNA_P Parameter: Tissue Value: Germinating Seeds
  misc_feature: MA Experiment ID: 108464 Result: Up-regulated in Transcription
  misc_feature: MA Experiment 108464 PARAMETER Experiment Name: At_Germinating_Seeds_cDNA_P Parameter: Age (day) Value: 4 vs. 0
  misc_feature: MA Experiment 108464 PARAMETER Experiment Name: At_Germinating_Seeds_cDNA_P Parameter: Tissue Value: Germinating Seeds
  misc_feature: MA Experiment ID: 108501 Result: Down-regulated in Transcription
  misc_feature: MA Experiment 108501 PARAMETER Experiment Name: At_ap2_floral_buds_cDNA_P Parameter: Plant Line Value: ap2 (Ler.)
  misc_feature: MA Experiment 108501 PARAMETER Experiment Name: At_ap2_floral_buds_cDNA_P Parameter: Tissue Value: Closed Flower
  misc_feature: MA Experiment ID: 108573 Result: Up-regulated in Transcription
  misc_feature: MA Experiment 108573 PARAMETER Experiment Name: At_Drought_cDNA_P Parameter: Timepoint (hr) Value: 6
  misc_feature: MA Experiment 108573 PARAMETER Experiment Name: At_Drought_cDNA_P Parameter: Tissue Value: Aerial
  misc_feature: MA Experiment 108573 PARAMETER Experiment Name: At_Drought_cDNA_P Parameter: Treatment Value: Drought vs. No Drought
  misc_feature: MA Experiment ID: 108595 Result: Down-regulated in Transcription
  misc_feature: MA Experiment 108595 PARAMETER Experiment Name: At_Ler-pi_Ovule_cDNA_P Parameter: Plant Line Value: null
  misc_feature: MA Experiment ID: 20000089 Result: Down-regulated in Transcription
  misc_feature: MA Experiment ID: 20000265 Result: Up-regulated in Transcription
  misc_feature: MA Experiment 20000265 PARAMETER Experiment Name: At_Open_Flower_P Parameter: Age (day) Value: 21
  misc_feature: MA Experiment 20000265 PARAMETER Experiment Name: At_Open_Flower_P Parameter: Plant Line Value: WS
  misc_feature: MA Experiment 20000265 PARAMETER Experiment Name: At_Open_Flower_P Parameter: Tissue Value: Closed Flower vs. Whole Plant
  misc_feature: MA Experiment ID: 20000438 Result: Up-regulated in Transcription
  misc_feature: MA Experiment 20000438 PARAMETER Experiment Name: At_Shoots__P Parameter: Age (day) Value: 14
  misc_feature: MA Experiment 20000438 PARAMETER Experiment Name: At_Shoots__P Parameter: Tissue Value: Shoots vs. Whole Plant
  misc_feature: MA Experiment ID: 20000527 Result: Up-regulated in Transcription
  misc_feature: MA Experiment 20000527 PARAMETER Experiment Name: At_10percent_PEG_P Parameter: Age (day) Value: 20
  misc_feature: MA Experiment 20000527 PARAMETER Experiment Name: At_10percent_PEG_P Parameter: Organism Value: A. thaliana
  misc_feature: MA Experiment 20000527 PARAMETER Experiment Name: At_10percent_PEG_P Parameter: Plant Line Value: WS
  misc_feature: MA Experiment 20000527 PARAMETER Experiment Name: At_10percent_PEG_P Parameter: Timepoint (day) Value: 20
  misc_feature: MA Experiment 20000527 PARAMETER Experiment Name: At_10percent_PEG_P Parameter: Tissue Value: Whole Plant
  misc_feature: MA Experiment 20000527 PARAMETER Experiment Name: At_10percent_PEG_P Parameter: Treatment Value: 10percent PEG vs. No Treatment
  misc_feature: MA Experiment ID: 20001557 Result: Down-regulated in Transcription
  misc_feature: MA Experiment 20001557 PARAMETER Experiment Name: At_Drought_Soil_Dry_P Parameter: Age (day) Value: 27
  misc_feature: MA Experiment 20001557 PARAMETER Experiment Name: At_Drought_Soil_Dry_P Parameter: Organism Value: A. thaliana
  misc_feature: MA Experiment 20001557 PARAMETER Experiment Name: At_Drought_Soil_Dry_P Parameter: Plant Line Value: WS
  misc_feature: MA Experiment 20001557 PARAMETER Experiment Name: At_Drought_Soil_Dry_P Parameter: Post Timepoint (hr) Value: 3
  misc_feature: MA Experiment 20001557 PARAMETER Experiment Name: At_Drought_Soil_Dry_P Parameter: Post-Treatment Value: Re-Water vs. No Drought
  misc_feature: MA Experiment 20001557 PARAMETER Experiment Name: At_Drought_Soil_Dry_P Parameter: Timepoint (day) Value: 13
  misc_feature: MA Experiment 20001557 PARAMETER Experiment Name: At_Drought_Soil_Dry_P Parameter: Treatment Value: Drought vs. No Drought
  misc_feature: MA Experiment ID: 20001558 Result: Down-regulated in Transcription
  misc_feature: MA Experiment 20001558 PARAMETER Experiment Name: At_Drought_Soil_Dry_P Parameter: Age (day) Value: 27
  misc_feature: MA Experiment 20001558 PARAMETER Experiment Name: At_Drought_Soil_Dry_P Parameter: Organism Value: A. thaliana
  misc_feature: MA Experiment 20001558 PARAMETER Experiment Name: At_Drought_Soil_Dry_P Parameter: Plant Line Value: WS
  misc_feature: MA Experiment 20001558 PARAMETER Experiment Name: At_Drought_Soil_Dry_P Parameter: Post Timepoint (hr) Value: 6
  misc_feature: MA Experiment 20001558 PARAMETER Experiment Name: At_Drought_Soil_Dry_P Parameter: Post-Treatment Value: Re-Water vs. No Drought
  misc_feature: MA Experiment 20001558 PARAMETER Experiment Name: At_Drought_Soil_Dry_P Parameter: Timepoint (day) Value: 13
  misc_feature: MA Experiment 20001558 PARAMETER Experiment Name: At_Drought_Soil_Dry_P Parameter: Treatment Value: Drought vs. No Drought
  misc_feature: MA Experiment ID: 20001560 Result: Down-regulated in Transcription
  misc_feature: MA Experiment 20001560 PARAMETER Experiment Name: At_Drought_Soil_Dry_P Parameter: Age (day) Value: 28
  misc_feature: MA Experiment 20001560 PARAMETER Experiment Name: At_Drought_Soil_Dry_P Parameter: Organism Value: A. thaliana
  misc_feature: MA Experiment 20001560 PARAMETER Experiment Name: At_Drought_Soil_Dry_P Parameter: Plant Line Value: WS
  misc_feature: MA Experiment 20001560 PARAMETER Experiment Name: At_Drought_Soil_Dry_P Parameter: Post Timepoint (hr) Value: None
  misc_feature: MA Experiment 20001560 PARAMETER Experiment Name: At_Drought_Soil_Dry_P Parameter: Post-Treatment Value: None
  misc_feature: MA Experiment 20001560 PARAMETER Experiment Name: At_Drought_Soil_Dry_P Parameter: Timepoint (day) Value: 14
  misc_feature: MA Experiment 20001560 PARAMETER Experiment Name: At_Drought_Soil_Dry_P Parameter: Treatment Value: Drought vs. No Drought
gtgatttctttctttgcctttaataaagcttcgtgctcaataggctgccacggaggcgagcctgaaaaatgccgatgacggttgtttccggtcgattctcaacggcgttgctccctacttgcttttccttgtcgcggttgcattccgtcaagtacgccgctcaaagacgggttgttttcgtttccagatcagctcacgcctcttcagcctccgtctccgttgagacaaattcgaattcgaatgtggattttgttatcgagaagaaggataagaacagaggagagaagaagattctagcttgtcccatctgttataactccttagcatggattagtcaacctaatggattaatagaatctgctgcctctggtattcaagtacaatgcaatacatgtaaaaggagttactcgggtaatgagacgcatcttgatttggctgttgctagtggaagcaagagatacagtgaaccgatgcctctttccactgagttatttaggactccactggtctcgtttctctatgagaggggttggcgtcagaatttcatatggggaggttttccaggaccagagaaagagtttgaaatggctaaggcctatctgaagcctgttttgggaggcaatatcattgatgctagttgtggaagtgggatgttctcgaggttattcactagaagtgatctattttctctggttattgctctagattactcagagaatatgctgcgacaatgctatgaactcttaaataaagaagaaaactttcccaacaaagagaaacttgttctagtccgagctgacattgctagactccctttcctttcgggttcagttgacgctgtccatgctggtgctgctctgcattgctggccttcaccatcctcagccgttgctgagataagccgtgttcttagacctggaggagtatttgtggccaccacatttatctatgacggtccattcagttttatccccttcttgaagaatcttcgtcaggaaataatgagatattcaggttctcacattttcctaaatgaacgtgagcttgaagatatctgcaaagcctgtggtctcgttaacttcactcgtgttagaaacgggccatttataatgctatctgcaacaaaacccagctaagctcaccctctttaaagtatatatacttttctgtaaaaaattggtataaagttataaacattataacaacttgagttccatacagtatacctaatttgtaaagctttttgcaaatgttcct

SEQ ID NO: 21490 - protein, 355 aa, Arabidopsis thaliana
  peptide (1)..(355): Ceres Seq. ID no. 13490457
  misc_feature (177)..(301): Homolog of NCBI NO: 15897405 NR Description: Conserved hypothetical protein [Sulfolobus
  misc_feature (183)..(292): Homolog of NCBI NO: 23048342 NR Description: hypothetical protein [Methanosarcina barkeri]
  misc_feature (168)..(285): Homolog of NCBI NO: 15643087 NR Description: ubiquinone/menaquinone biosynthesis-related
  misc_feature (178)..(346): Homolog of NCBI NO: 15896660 NR Description: S-adenosylmethionine-dependent methyltransferase
  misc_feature (183)..(295): Homolog of NCBI NO: 20093135 NR Description: menaquinone biosynthesis methyltransferase
  misc_feature (46)..(275): Homolog of NCBI NO: 7487623 NR Description: hypothetical protein At2g41040 [imported] -
  misc_feature (46)..(354): Homolog of NCBI NO: 30688506 NR Description: expressed protein [Arabidopsis thaliana]
  misc_feature (237)..(355): Homolog of NCBI NO: 25406543 NR Description: hypothetical protein T11I11.8 [imported] -
  misc_feature (1)..(208): Homolog of NCBI NO: 25406543 NR Description: hypothetical protein T11I11.8 [imported] -
  misc_feature (1)..(355): Homolog of NCBI NO: 18411840 NR Description: expressed protein [Arabidopsis thaliana]
MPMTVVSGRFSTALLPTCFSLSRLHSVKYAAQRRVVFVSRSAHASSASVSVETNSNSNVDFVIEKKDKNRGEKKILACPICYNSLAWISQPNGLIESAASGIQVQCNTCKRSYSGNETHLDLAVASGSKRYSEPMPLSTELFRTPLVSFLYERGWRQNFIWGGFPGPEKEFEMAKAYLKPVLGGNIIDASCGSGMFSRLFTRSDLFSLVIALDYSENMLRQCYELLNKEENFPNKEKLVLVRADIARLPFLSGSVDAVHAGAALHCWPSPSSAVAEISRVLRPGGVFVATTFIYDGPFSFIPFLKNLRQEIMRYSGSHIFLNERELEDICKACGLVNFTRVRNGPFIMLSATKPS

SEQ ID NO: 21491 - protein, 353 aa, Arabidopsis thaliana
  peptide (1)..(353): Ceres Seq. ID no. 13490458
  misc_feature (175)..(299): Homolog of NCBI NO: 15897405 NR Description: Conserved hypothetical protein [Sulfolobus
  misc_feature (181)..(290): Homolog of NCBI NO: 23048342 NR Description: hypothetical protein [Methanosarcina barkeri]
  misc_feature (166)..(283): Homolog of NCBI NO: 15643087 NR Description: ubiquinone/menaquinone biosynthesis-related
  misc_feature (176)..(344): Homolog of NCBI NO: 15896660 NR Description: S-adenosylmethionine-dependent methyltransferase
  misc_feature (181)..(293): Homolog of NCBI NO: 20093135 NR Description: menaquinone biosynthesis methyltransferase
  misc_feature (44)..(273): Homolog of NCBI NO: 7487623 NR Description: hypothetical protein At2g41040 [imported] -
  misc_feature (44)..(352): Homolog of NCBI NO: 30688506 NR Description: expressed protein [Arabidopsis thaliana]
  misc_feature (235)..(353): Homolog of NCBI NO: 25406543 NR Description: hypothetical protein T11I11.8 [imported] -
  misc_feature (1)..(206): Homolog of NCBI NO: 25406543 NR Description: hypothetical protein T11I11.8 [imported] -
  misc_feature (1)..(353): Homolog of NCBI NO: 18411840 NR Description: expressed protein [Arabidopsis thaliana]
MTVVSGRFSTALLPTCFSLSRLHSVKYAAQRRVVFVSRSAHASSASVSVETNSNSNVDFVIEKKDKNRGEKKILACPICYNSLAWISQPNGLIESAASGIQVQCNTCKRSYSGNETHLDLAVASGSKRYSEPMPLSTELFRTPLVSFLYERGWRQNFIWGGFPGPEKEFEMAKAYLKPVLGGNIIDASCGSGMFSRLFTRSDLFSLVIALDYSENMLRQCYELLNKEENFPNKEKLVLVRADIARLPFLSGSVDAVHAGAALHCWPSPSSAVAEISRVLRPGGVFVATTFIYDGPFSFIPFLKNLRQEIMRYSGSHIFLNERELEDICKACGLVNFTRVRNGPFIMLSATKPS

SEQ ID NO: 21492 - protein, 221 aa, Arabidopsis thaliana
  peptide (1)..(221): Ceres Seq. ID no. 13490459
  misc_feature (43)..(167): Homolog of NCBI NO: 15897405 NR Description: Conserved hypothetical protein [Sulfolobus
  misc_feature (49)..(158): Homolog of NCBI NO: 23048342 NR Description: hypothetical protein [Methanosarcina barkeri]
  misc_feature (34)..(151): Homolog of NCBI NO: 15643087 NR Description: ubiquinone/menaquinone biosynthesis-related
  misc_feature (44)..(212): Homolog of NCBI NO: 15896660 NR Description: S-adenosylmethionine-dependent methyltransferase
  misc_feature (49)..(161): Homolog of NCBI NO: 20093135 NR Description: menaquinone biosynthesis methyltransferase
  misc_feature (1)..(141): Homolog of NCBI NO: 7487623 NR Description: hypothetical protein At2g41040 [imported] -
  misc_feature (1)..(220): Homolog of NCBI NO: 30688506 NR Description: expressed protein [Arabidopsis thaliana]
  misc_feature (103)..(221): Homolog of NCBI NO: 25406543 NR Description: hypothetical protein T11I11.8 [imported] -
  misc_feature (1)..(74): Homolog of NCBI NO: 25406543 NR Description: hypothetical protein T11I11.8 [imported] -
  misc_feature (1)..(221): Homolog of NCBI NO: 18411840 NR Description: expressed protein [Arabidopsis thaliana]
MPLSTELFRTPLVSFLYERGWRQNFIWGGFPGPEKEFEMAKAYLKPVLGGNIIDASCGSGMFSRLFTRSDLFSLVIALDYSENMLRQCYELLNKEENFPNKEKLVLVRADIARLPFLSGSVDAVHAGAALHCWPSPSSAVAEISRVLRPGGVFVATTFIYDGPFSFIPFLKNLRQEIMRYSGSHIFLNERELEDICKACGLVNFTRVRNGPFIMLSATKPS

SEQ ID NO: 21493 - DNA, 1326 bp, Arabidopsis thaliana
  misc_feature (1)..(1326): Ceres Seq. ID no. 12333873
  misc_feature: MA Experiment ID: 108434 Result: Down-regulated in Transcription
  misc_feature: MA Experiment 108434 PARAMETER Experiment Name: At_Root_Tips_cDNA_P Parameter: Tissue Value: Root Tips
  misc_feature: MA Experiment ID: 108435 Result: Up-regulated in Transcription
  misc_feature: MA Experiment 108435 PARAMETER Experiment Name: At_stm_Mutants_cDNA_P Parameter: Plant Line Value: wt Landsburg vs stm
  misc_feature: MA Experiment 108435 PARAMETER Experiment Name: At_stm_Mutants_cDNA_P Parameter: Tissue Value: Shoot Apical Meristem Region
  misc_feature: MA Experiment ID: 108461 Result: Up-regulated in Transcription
  misc_feature: MA Experiment 108461 PARAMETER Experiment Name: At_Germinating_Seeds_cDNA_P Parameter: Age (day) Value: 1 vs. 0
  misc_feature: MA Experiment 108461 PARAMETER Experiment Name: At_Germinating_Seeds_cDNA_P Parameter: Tissue Value: Germinating Seeds
  misc_feature: MA Experiment ID: 108462 Result: Up-regulated in Transcription
  misc_feature: MA Experiment 108462 PARAMETER Experiment Name: At_Germinating_Seeds_cDNA_P Parameter: Age (day) Value: 2 vs. 0
  misc_feature: MA Experiment 108462 PARAMETER Experiment Name: At_Germinating_Seeds_cDNA_P Parameter: Tissue Value: Germinating Seeds
  misc_feature: MA Experiment ID: 108463 Result: Up-regulated in Transcription
  misc_feature: MA Experiment 108463 PARAMETER Experiment Name: At_Germinating_Seeds_cDNA_P Parameter: Age (day) Value: 3 vs. 0
  misc_feature: MA Experiment 108463 PARAMETER Experiment Name: At_Germinating_Seeds_cDNA_P Parameter: Tissue Value: Germinating Seeds
  misc_feature: MA Experiment ID: 108464 Result: Up-regulated in Transcription
  misc_feature: MA Experiment 108464 PARAMETER Experiment Name: At_Germinating_Seeds_cDNA_P Parameter: Age (day) Value: 4 vs. 0
  misc_feature: MA Experiment 108464 PARAMETER Experiment Name: At_Germinating_Seeds_cDNA_P Parameter: Tissue Value: Germinating Seeds
  misc_feature: MA Experiment ID: 108561 Result: Up-regulated in Transcription
  misc_feature: MA Experiment 108561 PARAMETER Experiment Name: At_100uM_ABA_cDNA_P Parameter: Timepoint (hr) Value: 6
  misc_feature: MA Experiment 108561 PARAMETER Experiment Name: At_100uM_ABA_cDNA_P Parameter: Tissue Value: Aerial
  misc_feature: MA Experiment 108561 PARAMETER Experiment Name: At_100uM_ABA_cDNA_P Parameter: Treatment Value: 100uM ABA vs. No Treatment
  misc_feature: MA Experiment ID: 108573 Result: Up-regulated in Transcription
  misc_feature: MA Experiment 108573 PARAMETER Experiment Name: At_Drought_cDNA_P Parameter: Timepoint (hr) Value: 6
  misc_feature: MA Experiment 108573 PARAMETER Experiment Name: At_Drought_cDNA_P Parameter: Tissue Value: Aerial
  misc_feature: MA Experiment 108573 PARAMETER Experiment Name: At_Drought_cDNA_P Parameter: Treatment Value: Drought vs. No Drought
  misc_feature: MA Experiment ID: 20000070 Result: Up-regulated in Transcription
  misc_feature: MA Experiment 20000070 PARAMETER Experiment Name: At_100uM_ABA_Mutants_cDNA_P Parameter: Plant Line Value: CS24
  misc_feature: MA Experiment 20000070 PARAMETER Experiment Name: At_100uM_ABA_Mutants_cDNA_P Parameter: Timepoint (hr) Value: 6
  misc_feature: MA Experiment 20000070 PARAMETER Experiment Name: At_100uM_ABA_Mutants_cDNA_P Parameter: Tissue Value: Aerial
  misc_feature: MA Experiment 20000070 PARAMETER Experiment Name: At_100uM_ABA_Mutants_cDNA_P Parameter: Treatment Value: 100uM ABA vs. No Treatment
  misc_feature: MA Experiment ID: 20000090 Result: Down-regulated in Transcription
  misc_feature: MA Experiment ID: 20000179 Result: Up-regulated in Transcription
  misc_feature: MA Experiment 20000179 PARAMETER Experiment Name: At_Germinating_Seeds_P Parameter: Age (hr) Value: 6 vs. 0
  misc_feature: MA Experiment 20000179 PARAMETER Experiment Name: At_Germinating_Seeds_P Parameter: Tissue Value: Germinating Seeds
  misc_feature: MA Experiment ID: 20000180 Result: Up-regulated in Transcription
  misc_feature: MA Experiment 20000180 PARAMETER Experiment Name: At_Germinating_Seeds_P Parameter: Age (hr) Value: 24 vs. 0
  misc_feature: MA Experiment 20000180 PARAMETER Experiment Name: At_Germinating_Seeds_P Parameter: Tissue Value: Germinating Seeds
  misc_feature: MA Experiment ID: 20000184 Result: Down-regulated in Transcription
  misc_feature: MA Experiment 20000184 PARAMETER Experiment Name: At_Shoots__P Parameter: Age (day) Value: 7
  misc_feature: MA Experiment 20000184 PARAMETER Experiment Name: At_Shoots__P Parameter: Tissue Value: Shoots vs. Whole Plant
  misc_feature: MA Experiment ID: 20000224 Result: Up-regulated in Transcription
  misc_feature: MA Experiment ID: 20000234 Result: Down-regulated in Transcription
  misc_feature: MA Experiment 20000234 PARAMETER Experiment Name: At_Siliques_P Parameter: Age (day) Value: 21
  misc_feature: MA Experiment 20000234 PARAMETER Experiment Name: At_Siliques_P Parameter: Organism Value: A. thaliana
  misc_feature: MA Experiment 20000234 PARAMETER Experiment Name: At_Siliques_P Parameter: Plant Line Value: WS
  misc_feature: MA Experiment 20000234 PARAMETER Experiment Name: At_Siliques_P Parameter: Tissue Value: Less Than 5mm Siliques vs. Whole Plant
  misc_feature: MA Experiment ID: 20000438 Result: Down-regulated in Transcription
  misc_feature: MA Experiment 20000438 PARAMETER Experiment Name: At_Shoots__P Parameter: Age (day) Value: 14
  misc_feature: MA Experiment 20000438 PARAMETER Experiment Name: At_Shoots__P Parameter: Tissue Value: Shoots vs. Whole Plant
  misc_feature: MA Experiment ID: 20000527 Result: Down-regulated in Transcription
  misc_feature: MA Experiment 20000527 PARAMETER Experiment Name: At_10percent_PEG_P Parameter: Age (day) Value: 20
  misc_feature: MA Experiment 20000527 PARAMETER Experiment Name: At_10percent_PEG_P Parameter: Organism Value: A. thaliana
  misc_feature: MA Experiment 20000527 PARAMETER Experiment Name: At_10percent_PEG_P Parameter: Plant Line Value: WS
  misc_feature: MA Experiment 20000527 PARAMETER Experiment Name: At_10percent_PEG_P Parameter: Timepoint (day) Value: 20
  misc_feature: MA Experiment 20000527 PARAMETER Experiment Name: At_10percent_PEG_P Parameter: Tissue Value: Whole Plant
  misc_feature: MA Experiment 20000527 PARAMETER Experiment Name: At_10percent_PEG_P Parameter: Treatment Value: 10percent PEG vs. No Treatment
  misc_feature: MA Experiment ID: 20000794 Result: Up-regulated in Transcription
  misc_feature: MA Experiment 20000794 PARAMETER Experiment Name: At_Petals_P Parameter: Age (day) Value: 23-25 days
  misc_feature: MA Experiment 20000794 PARAMETER Experiment Name: At_Petals_P Parameter: Plant Line Value: WS
  misc_feature: MA Experiment 20000794 PARAMETER Experiment Name: At_Petals_P Parameter: Tissue Value: Petals vs. Whole plant
  misc_feature: MA Experiment ID: 20001556 Result: Down-regulated in Transcription
  misc_feature: MA Experiment 20001556 PARAMETER Experiment Name: At_Drought_Soil_Dry_P Parameter: Age (day) Value: 26
  misc_feature: MA Experiment 20001556 PARAMETER Experiment Name: At_Drought_Soil_Dry_P Parameter: Organism Value: A. thaliana
  misc_feature: MA Experiment 20001556 PARAMETER Experiment Name: At_Drought_Soil_Dry_P Parameter: Plant Line Value: WS
  misc_feature: MA Experiment 20001556 PARAMETER Experiment Name: At_Drought_Soil_Dry_P Parameter: Post Timepoint (hr) Value: None
  misc_feature: MA Experiment 20001556 PARAMETER Experiment Name: At_Drought_Soil_Dry_P Parameter: Post-Treatment Value: None
  misc_feature: MA Experiment 20001556 PARAMETER Experiment Name: At_Drought_Soil_Dry_P Parameter: Timepoint (day) Value: 12
  misc_feature: MA Experiment 20001556 PARAMETER Experiment Name: At_Drought_Soil_Dry_P Parameter: Treatment Value: Drought vs. No Drought
  misc_feature: MA Experiment ID: 20001905 Result: Down-regulated in Transcription
  misc_feature: MA Experiment 20001905 PARAMETER Experiment Name: At_Drought_Reproduction_P Parameter: Age (day) Value: 40
  misc_feature: MA Experiment 20001905 PARAMETER Experiment Name: At_Drought_Reproduction_P Parameter: Organism Value: A. thaliana
  misc_feature: MA Experiment 20001905 PARAMETER Experiment Name: At_Drought_Reproduction_P Parameter: Plant Line Value: WS
  misc_feature: MA Experiment 20001905 PARAMETER Experiment Name: At_Drought_Reproduction_P Parameter: Timepoint (day) Value: 10
  misc_feature: MA Experiment 20001905 PARAMETER Experiment Name: At_Drought_Reproduction_P Parameter: Tissue Value: Rosettes
  misc_feature: MA Experiment 20001905 PARAMETER Experiment Name: At_Drought_Reproduction_P Parameter: Treatment Value: Drought vs. No Drought
acaaaaacccaaaacctttgatatttgtctaattttacaaagatgggtttcaaactcatctctctcctccttctttttcttccacttctaacagtcacaatcttgtcgggagtcgagcaggcctttgcttccgacaaggcactcctcgtgaccggccgcaacatcacggctgacggtggaaggtcgtcactgagagggaagaagcagaggagagcatcaggatgtaacttgttccaaggccgatgggtgttcgatgcttcttaccctttctatgactcgtccaagtgtcctttcatcgacggcgagtttgactgtctcaagttcggccgaccagacaaacagttcctcaagtactcttggcaacctgaatcttgcaccatcccaaggttcgacggtggggcatttctgaggaaatacagaggaaaacgagtcatgttcgtcggagactcactgagtttaaacatgtgggaatcgttggcctgtatgatccatgcgtcggtaccaaacgccaagaccacttttctcaagcgtaccccactctctactctcactttccaggaatatggagtaacgttatatctatatagaacaccatacatagtagatatatccaaagagagagttgggcgtgtgcttaaccttggagctattgaaggaggtgctgatgcttggaaaaacatggacgttcttgtcttcaactcttggcattggtggactcacaaaggccaatctcaagggtgggattatattagagatgggtcgtctttggtgagagacatgaaccgtcttgacgctttctacaaaggactcagtacttgggctcgatgggttgatcaaaacgtcgatacggccaaaactcgagttttcttccaaggcatttctcccactcattacgagggaagggaatggaacgagccgaggaagacttgtagtgggcaaatgcagccgttgggtggatcaagttacccaagtggtcagcctccatcctcaggagtagtgtcgaaagtgttgagttcgatgaaaaagccagtgaccttgctcgatatcacaactttgtctcagttgagaaaagatgctcatccttcttcttatggtggcgatggaggaacagattgcagccattggtgcctcccagggttgcctgatacatggaaccaacttctctacgcagctcttacgatgtgaagtgttaagatactaaaaagaaagtgcataacacctttattctgtaaatgacattcgtaaatcttctagtgttgtgtgatgctatagaaaacagatttaaacaaaagagacattctcagtataaaataacacattggtttg

SEQ ID NO: 21494 - protein, 380 aa, Arabidopsis thaliana
  peptide (1)..(380): Ceres Seq. ID no. 12333874
  misc_feature (170)..(379): Homolog of NCBI NO: 34904010 NR Description: unnamed protein product [Oryza sativa (japonica
  misc_feature (61)..(379): Homolog of NCBI NO: 28393769 NR Description: unknown protein [Arabidopsis thaliana]
  misc_feature (61)..(379): Homolog of NCBI NO: 21593142 NR Description: unknown [Arabidopsis thaliana]
  misc_feature (54)..(378): Homolog of NCBI NO: 18406003 NR Description: expressed protein
  misc_feature (1)..(378): Homolog of NCBI NO: 34911864 NR Description: OSJNBb0032K15.9 [Oryza sativa (japonica
  misc_feature (1)..(151): Homolog of NCBI NO: 25408325 NR Description: hypothetical protein At2g34070 [imported] -
  misc_feature (214)..(380): Homolog of NCBI NO: 25408325 NR Description: hypothetical protein At2g34070 [imported] -
  misc_feature (1)..(380): Homolog of NCBI NO: 18403435 NR Description: expressed protein
  misc_feature (1)..(380): Homolog of NCBI NO: 25366741 NR Description: F28N24.24 protein - Arabidopsis thaliana
  misc_feature (1)..(380): Homolog of NCBI NO: 18396930 NR Description: expressed protein
MGFKLISLLLLFLPLLTVTILSGVEQAFASDKALLVTGRNITADGGRSSLRGKKQRRASGCNLFQGRWVFDASYPFYDSSKCPFIDGEFDCLKFGRPDKQFLKYSWQPESCTIPRFDGGAFLRKYRGKRVMFVGDSLSLNMWESLACMIHASVPNAKTTFLKRTPLSTLTFQEYGVTLYLYRTPYIVDISKERVGRVLNLGAIEGGADAWKNMDVLVFNSWHWWTHKGQSQGWDYIRDGSSLVRDMNRLDAFYKGLSTWARWVDQNVDTAKTRVFFQGISPTHYEGREWNEPRKTCSGQMQPLGGSSYPSGQPPSSGVVSKVLSSMKKPVTLLDITTLSQLRKDAHPSSYGGDGGTDCSHWCLPGLPDTWNQLLYAALTM

SEQ ID NO: 21495 - protein, 250 aa, Arabidopsis thaliana
  peptide (1)..(250): Ceres Seq. ID no. 12333875
  misc_feature (1)..(250): Homolog of NCBI NO: 25366741 NR Description: F28N24.24 protein - Arabidopsis thaliana
  misc_feature (1)..(250): Homolog of NCBI NO: 18396930 NR Description: expressed protein
  misc_feature (40)..(249): Homolog of NCBI NO: 34904010 NR Description: unnamed protein product [Oryza sativa (japonica
  misc_feature (1)..(249): Homolog of NCBI NO: 28393769 NR Description: unknown protein [Arabidopsis thaliana]
  misc_feature (1)..(249): Homolog of NCBI NO: 21593142 NR Description: unknown [Arabidopsis thaliana]
  misc_feature (1)..(248): Homolog of NCBI NO: 18406003 NR Description: expressed protein
  misc_feature (1)..(248): Homolog of NCBI NO: 34911864 NR Description: OSJNBb0032K15.9 [Oryza sativa (japonica
  misc_feature (1)..(21): Homolog of NCBI NO: 25408325 NR Description: hypothetical protein At2g34070 [imported] -
  misc_feature (84)..(250): Homolog of NCBI NO: 25408325 NR Description: hypothetical protein At2g34070 [imported] -
  misc_feature (1)..(250): Homolog of NCBI NO: 18403435 NR Description: expressed protein
MFVGDSLSLNMWESLACMIHASVPNAKTTFLKRTPLSTLTFQEYGVTLYLYRTPYIVDISKERVGRVLNLGAIEGGADAWKNMDVLVFNSWHWWTHKGQSQGWDYIRDGSSLVRDMNRLDAFYKGLSTWARWVDQNVDTAKTRVFFQGISPTHYEGREWNEPRKTCSGQMQPLGGSSYPSGQPPSSGVVSKVLSSMKKPVTLLDITTLSQLRKDAHPSSYGGDGGTDCSHWCLPGLPDTWNQLLYAALTM

SEQ ID NO: 21496 - protein, 240 aa, Arabidopsis thaliana
  peptide (1)..(240): Ceres Seq. ID no. 12333876
  misc_feature (30)..(239): Homolog of NCBI NO: 34904010 NR Description: unnamed protein product [Oryza sativa (japonica
  misc_feature (1)..(239): Homolog of NCBI NO: 28393769 NR Description: unknown protein [Arabidopsis thaliana]
  misc_feature (1)..(239): Homolog of NCBI NO: 21593142 NR Description: unknown [Arabidopsis thaliana]
  misc_feature (1)..(238): Homolog of NCBI NO: 18406003 NR Description: expressed protein
  misc_feature (1)..(238): Homolog of NCBI NO: 34911864 NR Description: OSJNBb0032K15.9 [Oryza sativa (japonica
  misc_feature (1)..(11): Homolog of NCBI NO: 25408325 NR Description: hypothetical protein At2g34070 [imported] -
  misc_feature (74)..(240): Homolog of NCBI NO: 25408325 NR Description: hypothetical protein At2g34070 [imported] -
  misc_feature (1)..(240): Homolog of NCBI NO: 18403435 NR Description: expressed protein
  misc_feature (1)..(240): Homolog of NCBI NO: 25366741 NR Description: F28N24.24 protein - Arabidopsis thaliana
  misc_feature (1)..(240): Homolog of NCBI NO: 18396930 NR Description: expressed protein
MWESLACMIHASVPNAKTTFLKRTPLSTLTFQEYGVTLYLYRTPYIVDISKERVGRVLNLGAIEGGADAWKNMDVLVFNSWHWWTHKGQSQGWDYIRDGSSLVRDMNRLDAFYKGLSTWARWVDQNVDTAKTRVFFQGISPTHYEGREWNEPRKTCSGQMQPLGGSSYPSGQPPSSGVVSKVLSSMKKPVTLLDITTLSQLRKDAHPSSYGGDGGTDCSHWCLPGLPDTWNQLLYAALTM

SEQ ID NO: 21497 - DNA, 1189 bp, Arabidopsis thaliana
  misc_feature (1)..(1189): Ceres Seq. ID no. 13488110
  misc_feature: MA Experiment ID: 108435 Result: Up-regulated in Transcription
  misc_feature: MA Experiment 108435 PARAMETER Experiment Name: At_stm_Mutants_cDNA_P Parameter: Plant Line Value: wt Landsburg vs stm
  misc_feature: MA Experiment 108435 PARAMETER Experiment Name: At_stm_Mutants_cDNA_P Parameter: Tissue Value: Shoot Apical Meristem Region
  misc_feature: MA Experiment ID: 108464 Result: Up-regulated in Transcription
  misc_feature: MA Experiment 108464 PARAMETER Experiment Name: At_Germinating_Seeds_cDNA_P Parameter: Age (day) Value: 4 vs. 0
  misc_feature: MA Experiment 108464 PARAMETER Experiment Name: At_Germinating_Seeds_cDNA_P Parameter: Tissue Value: Germinating Seeds
  misc_feature: MA Experiment ID: 108489 Result: Down-regulated in Transcription
  misc_feature: MA Experiment ID: 108605 Result: Up-regulated in Transcription
  misc_feature: MA Experiment 108605 PARAMETER Experiment Name: At_100uM_ABA_cDNA_P Parameter: Timepoint (hr) Value: 6
  misc_feature: MA Experiment 108605 PARAMETER Experiment Name: At_100uM_ABA_cDNA_P Parameter: Tissue Value: Aerial
  misc_feature: MA Experiment 108605 PARAMETER Experiment Name: At_100uM_ABA_cDNA_P Parameter: Treatment Value: 100uM ABA vs. No Treatment
  misc_feature: MA Experiment ID: 20000069 Result: Up-regulated in Transcription
  misc_feature: MA Experiment 20000069 PARAMETER Experiment Name: At_100uM_ABA_Mutants_cDNA_P Parameter: Plant Line Value: CS23
  misc_feature: MA Experiment 20000069 PARAMETER Experiment Name: At_100uM_ABA_Mutants_cDNA_P Parameter: Timepoint (hr) Value: 6
  misc_feature: MA Experiment 20000069 PARAMETER Experiment Name: At_100uM_ABA_Mutants_cDNA_P Parameter: Tissue Value: Aerial
  misc_feature: MA Experiment 20000069 PARAMETER Experiment Name: At_100uM_ABA_Mutants_cDNA_P Parameter: Treatment Value: 100uM ABA vs. No Treatment
  misc_feature: MA Experiment ID: 20000089 Result: Up-regulated in Transcription
  misc_feature: MA Experiment ID: 20000090 Result: Up-regulated in Transcription
  misc_feature: MA Experiment ID: 20000111 Result: Down-regulated in Transcription
  misc_feature: MA Experiment 20000111 PARAMETER Experiment Name: At_42deg_Heat_cDNA_P Parameter: Temperature (deg C) Value: 42 vs. 22
  misc_feature: MA Experiment 20000111 PARAMETER Experiment Name: At_42deg_Heat_cDNA_P Parameter: Timepoint (hr) Value: 6
  misc_feature: MA Experiment 20000111 PARAMETER Experiment Name: At_42deg_Heat_cDNA_P Parameter: Tissue Value: Aerial
  misc_feature: MA Experiment ID: 20000182 Result: Up-regulated in Transcription
  misc_feature: MA Experiment 20000182 PARAMETER Experiment Name: At_2mM_SA_P Parameter: Age (day) Value: 14
  misc_feature: MA Experiment 20000182 PARAMETER Experiment Name: At_2mM_SA_P Parameter: Organism Value: A. thaliana
  misc_feature: MA Experiment 20000182 PARAMETER Experiment Name: At_2mM_SA_P Parameter: Plant Line Value: WS
  misc_feature: MA Experiment 20000182 PARAMETER Experiment Name: At_2mM_SA_P Parameter: Timepoint (hr) Value: 6
  misc_feature: MA Experiment 20000182 PARAMETER Experiment Name: At_2mM_SA_P Parameter: Tissue Value: Aerial
  misc_feature: MA Experiment 20000182 PARAMETER Experiment Name: At_2mM_SA_P Parameter: Treatment Value: 2mM SA vs. No Treatment
  misc_feature: MA Experiment ID: 20000453 Result: Up-regulated in Transcription
  misc_feature: MA Experiment 20000453 PARAMETER Experiment Name: At_100uM_ABA_P Parameter: Age (day) Value: 15
  misc_feature: MA Experiment 20000453 PARAMETER Experiment Name: At_100uM_ABA_P Parameter: Organism Value: A. thaliana
  misc_feature: MA Experiment 20000453 PARAMETER Experiment Name: At_100uM_ABA_P Parameter: Plant Line Value: WS
  misc_feature: MA Experiment 20000453 PARAMETER Experiment Name: At_100uM_ABA_P Parameter: Timepoint (hr) Value: 24
  misc_feature: MA Experiment 20000453 PARAMETER Experiment Name: At_100uM_ABA_P Parameter: Tissue Value: Aerial
  misc_feature: MA Experiment 20000453 PARAMETER Experiment Name: At_100uM_ABA_P Parameter: Treatment Value: 100uM ABA vs. No Treatment
  misc_feature: MA Experiment ID: 20001911 Result: Down-regulated in Transcription
  misc_feature: MA Experiment 20001911 PARAMETER Experiment Name: At_Drought_Reproduction_P Parameter: Age (day) Value: 40
  misc_feature: MA Experiment 20001911 PARAMETER Experiment Name: At_Drought_Reproduction_P Parameter: Organism Value: A. thaliana
  misc_feature: MA Experiment 20001911 PARAMETER Experiment Name: At_Drought_Reproduction_P Parameter: Plant Line Value: WS
  misc_feature: MA Experiment 20001911 PARAMETER Experiment Name: At_Drought_Reproduction_P Parameter: Timepoint (day) Value: 10
  misc_feature: MA Experiment 20001911 PARAMETER Experiment Name: At_Drought_Reproduction_P Parameter: Tissue Value: Flowers
  misc_feature: MA Experiment 20001911 PARAMETER Experiment Name: At_Drought_Reproduction_P Parameter: Treatment Value: Drought vs. No Drought
atgaatttggtcttcgctataatctcacgttacattaaattggctcctgtgaacctaaatttatggactatgatcccaacaccaatccgttcgaccttcatttctccggtaaacttccgaaaagagaagtctcggcttcagcttctaaagttgtagagaagaaatggttagtgaaagatgagaagagaaatatgctacaagatgaaataaaccgggttaattcggagaacaagaagctaaccgaaatgttagcaagggtctgtgagaagtactatgctcttaataatcttatggaggagttgcagagtcgaaagagtcctgaaagtgttaactttcagaacaaacagctaacggggaaacgaaaacaagaacttgatgagtttgttagctccccaattggactcagtctcggaccaatcgagaacatcaccaacgataaagcgacggtttcaaccgcttactttgctgctgagaagtctgacacaagcttgactgtgaaagatggatatcaatggaggaaatacgggcaaaagattacgagagataatccatctcctagagcttacttcagatgctcgttttcaccgtcttgtctagtcaagaagaaggtgcaacgaagtgcagaagatccatctttcttggtagccacttacgaacggacacataaccacaccggaccacatgcaagtgtgtccaggacagtgaaacttgatctagttcaaggtgggcttgaaccagttgaggaaaagaaagagagagggacgattcaagaggttttggtgcaacaaatggcttcttcgttgaccaaagatcctaagttcactgcagctcttgcgactgctatttccgggagattgatagagcattcaagaacatgaaagttctctagaacatgtatatttctgttttgttctattttgttgctcattcctagtaaaaaggtaaagatttgtttgatcttgattaggaggcatagatgtcaattttaatgtgtgtgtatataattacatcaaatctaagtatccaaaaagggtcacccccattttatcttatgttgaaagagttttgttatagctcggtgtaagtatggtagattgacgctgcttcgacagtttatgtatcttccaatgttatcttgttcagttgtttgtattaacttccattagagaagaatgtgatgccattacag

SEQ ID NO: 21498 - protein, 271 aa, Arabidopsis thaliana
  peptide (1)..(271): Ceres Seq. ID no. 13488111
  misc_feature (145)..(205): Pfam Name: WRKY DNA -binding domain Pfam Description: WRKY DNA -binding domain
  misc_feature (17)..(111): Homolog of NCBI NO: 6472585 NR Description: WIZZ [Nicotiana tabacum]
  misc_feature (20)..(126): Homolog of NCBI NO: 7486317 NR Description: hypothetical protein F28M20.10 - Arabidopsis
  misc_feature (118)..(264): Homolog of NCBI NO: 7486317 NR Description: hypothetical protein F28M20.10 - Arabidopsis
  misc_feature (1)..(126): Homolog of NCBI NO: 18417877 NR Description: WRKY family transcription factor [Arabidopsis
  misc_feature (1)..(126): Homolog of NCBI NO: 13506731 NR Description: WRKY DNA-binding protein 18 [Arabidopsis
  misc_feature (118)..(271): Homolog of NCBI NO: 18417877 NR Description: WRKY family transcription factor [Arabidopsis
  misc_feature (118)..(271): Homolog of NCBI NO: 13506731 NR Description: WRKY DNA-binding protein 18 [Arabidopsis
  misc_feature (1)..(271): Homolog of NCBI NO: 17980964 NR Description: WRKY transcription factor 60 [Arabidopsis
  misc_feature (1)..(271): Homolog of NCBI NO: 15224660 NR Description: WRKY family transcription factor [Arabidopsis
  misc_feature (1)..(271): Homolog of NCBI NO: 21592591 NR Description: putative WRKY-type DNA binding protein
MDYDPNTNPFDLHFSGKLPKREVSASASKVVEKKWLVKDEKRNMLQDEINRVNSENKKLTEMLARVCEKYYALNNLMEELQSRKSPESVNFQNKQLTGKRKQELDEFVSSPIGLSLGPIENITNDKATVSTAYFAAEKSDTSLTVKDGYQWRKYGQKITRDNPSPRAYFRCSFSPSCLVKKKVQRSAEDPSFLVATYERTHNHTGPHASVSRTVKLDLVQGGLEPVEEKKERGTIQEVLVQQMASSLTKDPKFTAALATAISGRLIEHSRT

SEQ ID NO: 21499 - protein, 228 aa, Arabidopsis thaliana
  peptide (1)..(228): Ceres Seq. ID no. 13488112
  misc_feature (102)..(162): Pfam Name: WRKY DNA -binding domain Pfam Description: WRKY DNA -binding domain
  misc_feature (1)..(68): Homolog of NCBI NO: 6472585 NR Description: WIZZ [Nicotiana tabacum]
  misc_feature (1)..(83): Homolog of NCBI NO: 7486317 NR Description: hypothetical protein F28M20.10 - Arabidopsis
  misc_feature (75)..(221): Homolog of NCBI NO: 7486317 NR Description: hypothetical protein F28M20.10 - Arabidopsis
  misc_feature (1)..(83): Homolog of NCBI NO: 18417877 NR Description: WRKY family transcription factor [Arabidopsis
  misc_feature (1)..(83): Homolog of NCBI NO: 13506731 NR Description: WRKY DNA-binding protein 18 [Arabidopsis
  misc_feature (75)..(228): Homolog of NCBI NO: 18417877 NR Description: WRKY family transcription factor [Arabidopsis
  misc_feature (75)..(228): Homolog of NCBI NO: 13506731 NR Description: WRKY DNA-binding protein 18 [Arabidopsis
  misc_feature (1)..(228): Homolog of NCBI NO: 17980964 NR Description: WRKY transcription factor 60 [Arabidopsis
  misc_feature (1)..(228): Homolog of NCBI NO: 15224660 NR Description: WRKY family transcription factor [Arabidopsis
  misc_feature (1)..(228): Homolog of NCBI NO: 21592591 NR Description: putative WRKY-type DNA binding protein
MLQDEINRVNSENKKLTEMLARVCEKYYALNNLMEELQSRKSPESVNFQNKQLTGKRKQELDEFVSSPIGLSLGPIENITNDKATVSTAYFAAEKSDTSLTVKDGYQWRKYGQKITRDNPSPRAYFRCSFSPSCLVKKKVQRSAEDPSFLVATYERTHNHTGPHASVSRTVKLDLVQGGLEPVEEKKERGTIQEVLVQQMASSLTKDPKFTAALATAISGRLIEHSRT

SEQ ID NO: 21500 - protein, 210 aa, Arabidopsis thaliana
  peptide (1)..(210): Ceres Seq. ID no. 13488113
  misc_feature (84)..(144): Pfam Name: WRKY DNA -binding domain Pfam Description: WRKY DNA -binding domain
  misc_feature (1)..(50): Homolog of NCBI NO: 6472585 NR Description: WIZZ [Nicotiana tabacum]
  misc_feature (1)..(65): Homolog of NCBI NO: 7486317 NR Description: hypothetical protein F28M20.10 - Arabidopsis
  misc_feature (57)..(203): Homolog of NCBI NO: 7486317 NR Description: hypothetical protein F28M20.10 - Arabidopsis
  misc_feature (1)..(65): Homolog of NCBI NO: 18417877 NR Description: WRKY family transcription factor [Arabidopsis
  misc_feature (1)..(65): Homolog of NCBI NO: 13506731 NR Description: WRKY DNA-binding protein 18 [Arabidopsis
  misc_feature (57)..(210): Homolog of NCBI NO: 18417877 NR Description: WRKY family transcription factor [Arabidopsis
  misc_feature (57)..(210): Homolog of NCBI NO: 13506731 NR Description: WRKY DNA-binding protein 18 [Arabidopsis
  misc_feature (1)..(210): Homolog of NCBI NO: 17980964 NR Description: WRKY transcription factor 60 [Arabidopsis
  misc_feature (1)..(210): Homolog of NCBI NO: 15224660 NR Description: WRKY family transcription factor [Arabidopsis
  misc_feature (1)..(210): Homolog of NCBI NO: 21592591 NR Description: putative WRKY-type DNA binding protein
MLARVCEKYYALNNLMEELQSRKSPESVNFQNKQLTGKRKQELDEFVSSPIGLSLGPIENITNDKATVSTAYFAAEKSDTSLTVKDGYQWRKYGQKITRDNPSPRAYFRCSFSPSCLVKKKVQRSAEDPSFLVATYERTHNHTGPHASVSRTVKLDLVQGGLEPVEEKKERGTIQEVLVQQMASSLTKDPKFTAALATAISGRLIEHSRT

SEQ ID NO: 21501 - DNA, 834 bp, Arabidopsis thaliana
  misc_feature (1)..(834): Ceres Seq. ID no. 13493901
  misc_feature: MA Experiment ID: 108433 Result: Up-regulated in Transcription
  misc_feature: MA Experiment 108433 PARAMETER Experiment Name: At_rhl_Mutant2_cDNA_P Parameter: Age (day) Value: 7
  misc_feature: MA Experiment 108433 PARAMETER Experiment Name: At_rhl_Mutant2_cDNA_P Parameter: Organism Value: A. thaliana
  misc_feature: MA Experiment 108433 PARAMETER Experiment Name: At_rhl_Mutant2_cDNA_P Parameter: Plant Line Value: rhl Mutant vs. wt landsburg
  misc_feature: MA Experiment 108433 PARAMETER Experiment Name: At_rhl_Mutant2_cDNA_P Parameter: Tissue Value: Roots
  misc_feature: MA Experiment ID: 108434 Result: Down-regulated in Transcription
  misc_feature: MA Experiment 108434 PARAMETER Experiment Name: At_Root_Tips_cDNA_P Parameter: Tissue Value: Root Tips
  misc_feature: MA Experiment ID: 108435 Result: Down-regulated in Transcription
  misc_feature: MA Experiment 108435 PARAMETER Experiment Name: At_stm_Mutants_cDNA_P Parameter: Plant Line Value: wt Landsburg vs stm
  misc_feature: MA Experiment 108435 PARAMETER Experiment Name: At_stm_Mutants_cDNA_P Parameter: Tissue Value: Shoot Apical Meristem Region
  misc_feature: MA Experiment ID: 108461 Result: Up-regulated in Transcription
  misc_feature: MA Experiment 108461 PARAMETER Experiment Name: At_Germinating_Seeds_cDNA_P Parameter: Age (day) Value: 1 vs. 0
  misc_feature: MA Experiment 108461 PARAMETER Experiment Name: At_Germinating_Seeds_cDNA_P Parameter: Tissue Value: Germinating Seeds
  misc_feature: MA Experiment ID: 108462 Result: Up-regulated in Transcription
  misc_feature: MA Experiment 108462 PARAMETER Experiment Name: At_Germinating_Seeds_cDNA_P Parameter: Age (day) Value: 2 vs. 0
  misc_feature: MA Experiment 108462 PARAMETER Experiment Name: At_Germinating_Seeds_cDNA_P Parameter: Tissue Value: Germinating Seeds
  misc_feature: MA Experiment ID: 108463 Result: Up-regulated in Transcription
  misc_feature: MA Experiment 108463 PARAMETER Experiment Name: At_Germinating_Seeds_cDNA_P Parameter: Age (day) Value: 3 vs. 0
  misc_feature: MA Experiment 108463 PARAMETER Experiment Name: At_Germinating_Seeds_cDNA_P Parameter: Tissue Value: Germinating Seeds
  misc_feature: MA Experiment ID: 108464 Result: Up-regulated in Transcription
  misc_feature: MA Experiment 108464 PARAMETER Experiment Name: At_Germinating_Seeds_cDNA_P Parameter: Age (day) Value: 4 vs. 0
  misc_feature: MA Experiment 108464 PARAMETER Experiment Name: At_Germinating_Seeds_cDNA_P Parameter: Tissue Value: Germinating Seeds
  misc_feature: MA Experiment ID: 108473 Result: Down-regulated in Transcription
  misc_feature: MA Experiment 108473 PARAMETER Experiment Name: At_Drought_Flowers_cDNA_P Parameter: Timepoint (hr) Value: 7 d
  misc_feature: MA Experiment 108473 PARAMETER Experiment Name: At_Drought_Flowers_cDNA_P Parameter: Tissue Value: Flower
  misc_feature: MA Experiment 108473 PARAMETER Experiment Name: At_Drought_Flowers_cDNA_P Parameter: Treatment Value: Drought vs. No Drought
  misc_feature: MA Experiment ID: 108488 Result: Up-regulated in Transcription
  misc_feature: MA Experiment ID: 20000030 Result: Down-regulated in Transcription
  misc_feature: MA Experiment 20000030 PARAMETER Experiment Name: At_CS6630_Roots_cDNA_P Parameter: Plant Line Value: CS6630 vs. WS
  misc_feature: MA Experiment 20000030 PARAMETER Experiment Name: At_CS6630_Roots_cDNA_P Parameter: Tissue Value: Roots
  misc_feature: MA Experiment ID: 20000069 Result: Down-regulated in Transcription
  misc_feature: MA Experiment 20000069 PARAMETER Experiment Name: At_100uM_ABA_Mutants_cDNA_P Parameter: Plant Line Value: CS23
  misc_feature: MA Experiment 20000069 PARAMETER Experiment Name: At_100uM_ABA_Mutants_cDNA_P Parameter: Timepoint (hr) Value: 6
  misc_feature: MA Experiment 20000069 PARAMETER Experiment Name: At_100uM_ABA_Mutants_cDNA_P Parameter: Tissue Value: Aerial
  misc_feature: MA Experiment 20000069 PARAMETER Experiment Name: At_100uM_ABA_Mutants_cDNA_P Parameter: Treatment Value: 100uM ABA vs. No Treatment
  misc_feature: MA Experiment ID: 20000070 Result: Down-regulated in Transcription
  misc_feature: MA Experiment 20000070 PARAMETER Experiment Name: At_100uM_ABA_Mutants_cDNA_P Parameter: Plant Line Value: CS24
  misc_feature: MA Experiment 20000070 PARAMETER Experiment Name: At_100uM_ABA_Mutants_cDNA_P Parameter: Timepoint (hr) Value: 6
  misc_feature: MA Experiment 20000070 PARAMETER Experiment Name: At_100uM_ABA_Mutants_cDNA_P Parameter: Tissue Value: Aerial
  misc_feature: MA Experiment 20000070 PARAMETER Experiment Name: At_100uM_ABA_Mutants_cDNA_P Parameter: Treatment Value: 100uM ABA vs. No Treatment
  misc_feature: MA Experiment ID: 20000071 Result: Down-regulated in Transcription
  misc_feature: MA Experiment 20000071 PARAMETER Experiment Name: At_100uM_ABA_Mutants_cDNA_P Parameter: Plant Line Value: CS8104
  misc_feature: MA Experiment 20000071 PARAMETER Experiment Name: At_100uM_ABA_Mutants_cDNA_P Parameter: Timepoint (hr) Value: 6
  misc_feature: MA Experiment 20000071 PARAMETER Experiment Name: At_100uM_ABA_Mutants_cDNA_P Parameter: Tissue Value: Aerial
  misc_feature: MA Experiment 20000071 PARAMETER Experiment Name: At_100uM_ABA_Mutants_cDNA_P Parameter: Treatment Value: 100uM ABA vs. No Treatment
  misc_feature: MA Experiment ID: 20000086 Result: Down-regulated in Transcription
  misc_feature: MA Experiment 20000086 PARAMETER Experiment Name: At_100uM_ABA_Mutants_cDNA_P Parameter: Plant Line Value: CS22
  misc_feature: MA Experiment 20000086 PARAMETER Experiment Name: At_100uM_ABA_Mutants_cDNA_P Parameter: Timepoint (hr) Value: 6
  misc_feature: MA Experiment 20000086 PARAMETER Experiment Name: At_100uM_ABA_Mutants_cDNA_P Parameter: Tissue Value: Aerial
  misc_feature: MA Experiment 20000086 PARAMETER Experiment Name: At_100uM_ABA_Mutants_cDNA_P Parameter: Treatment Value: 100uM ABA vs. No Treatment
  misc_feature: MA Experiment ID: 20000087 Result: Down-regulated in Transcription
  misc_feature: MA Experiment 20000087 PARAMETER Experiment Name: At_100uM_ABA_Mutants_cDNA_P Parameter: Plant Line Value: WS
  misc_feature: MA Experiment 20000087 PARAMETER Experiment Name: At_100uM_ABA_Mutants_cDNA_P Parameter: Timepoint (hr) Value: 6
  misc_feature: MA Experiment 20000087 PARAMETER Experiment Name: At_100uM_ABA_Mutants_cDNA_P Parameter: Tissue Value: Aerial
  misc_feature: MA Experiment 20000087 PARAMETER Experiment Name: At_100uM_ABA_Mutants_cDNA_P Parameter: Treatment Value: 100uM ABA vs. No Treatment
  misc_feature: MA Experiment ID: 20000088 Result: Down-regulated in Transcription
  misc_feature: MA Experiment 20000088 PARAMETER Experiment Name: At_100uM_ABA_Mutants_cDNA_P Parameter: Plant Line Value: Landsberg
  misc_feature: MA Experiment 20000088 PARAMETER Experiment Name: At_100uM_ABA_Mutants_cDNA_P Parameter: Timepoint (hr) Value: 6
  misc_feature: MA Experiment 20000088 PARAMETER Experiment Name: At_100uM_ABA_Mutants_cDNA_P Parameter: Tissue Value: Aerial
  misc_feature: MA Experiment 20000088 PARAMETER Experiment Name: At_100uM_ABA_Mutants_cDNA_P Parameter: Treatment Value: 100uM ABA vs. No Treatment
  misc_feature: MA Experiment ID: 20000089 Result: Down-regulated in Transcription
  misc_feature: MA Experiment ID: 20000090 Result: Down-regulated in Transcription
  misc_feature: MA Experiment ID: 20000112 Result: Down-regulated in Transcription
  misc_feature: MA Experiment 20000112 PARAMETER Experiment Name: At_42deg_Heat_cDNA_P Parameter: Temperature (deg C) Value: 42 vs. 22
  misc_feature: MA Experiment 20000112 PARAMETER Experiment Name: At_42deg_Heat_cDNA_P Parameter: Timepoint (hr) Value: 2
  misc_feature: MA Experiment 20000112 PARAMETER Experiment Name: At_42deg_Heat_cDNA_P Parameter: Tissue Value: Aerial
  misc_feature: MA Experiment ID: 20000173 Result: Down-regulated in Transcription
  misc_feature: MA Experiment 20000173 PARAMETER Experiment Name: At_42deg_Heat_P Parameter: Age (day) Value: 14
  misc_feature: MA Experiment 20000173 PARAMETER Experiment Name: At_42deg_Heat_P Parameter: Organism Value: A. thaliana
  misc_feature: MA Experiment 20000173 PARAMETER Experiment Name: At_42deg_Heat_P Parameter: Plant Line Value: WS
  misc_feature: MA Experiment 20000173 PARAMETER Experiment Name: At_42deg_Heat_P Parameter: Temperature (deg C) Value: 42 vs. 22
  misc_feature: MA Experiment 20000173 PARAMETER Experiment Name: At_42deg_Heat_P Parameter: Timepoint (hr) Value: 6
  misc_feature: MA Experiment 20000173 PARAMETER Experiment Name: At_42deg_Heat_P Parameter: Tissue Value: Aerial
  misc_feature: MA Experiment ID: 20000182 Result: Down-regulated in Transcription
  misc_feature: MA Experiment 20000182 PARAMETER Experiment Name: At_2mM_SA_P Parameter: Age (day) Value: 14
  misc_feature: MA Experiment 20000182 PARAMETER Experiment Name: At_2mM_SA_P Parameter: Organism Value: A. thaliana
  misc_feature: MA Experiment 20000182 PARAMETER Experiment Name: At_2mM_SA_P Parameter: Plant Line Value: WS
  misc_feature: MA Experiment 20000182 PARAMETER Experiment Name: At_2mM_SA_P Parameter: Timepoint (hr) Value: 6
  misc_feature: MA Experiment 20000182 PARAMETER Experiment Name: At_2mM_SA_P Parameter: Tissue Value: Aerial
  misc_feature: MA Experiment 20000182 PARAMETER Experiment Name: At_2mM_SA_P Parameter: Treatment Value: 2mM SA vs. No Treatment
  misc_feature: MA Experiment ID: 20000184 Result: Up-regulated in Transcription
  misc_feature: MA Experiment 20000184 PARAMETER Experiment Name: At_Shoots__P Parameter: Age (day) Value: 7
  misc_feature: MA Experiment 20000184 PARAMETER Experiment Name: At_Shoots__P Parameter: Tissue Value: Shoots vs. Whole Plant
  misc_feature: MA Experiment ID: 20000185 Result: Down-regulated in Transcription
  misc_feature: MA Experiment 20000185 PARAMETER Experiment Name: At_Roots__P Parameter: Age (day) Value: 7 vs. 21
  misc_feature: MA Experiment 20000185 PARAMETER Experiment Name: At_Roots__P Parameter: Organism Value: A. thaliana
  misc_feature: MA Experiment 20000185 PARAMETER Experiment Name: At_Roots__P Parameter: Tissue Value: Roots vs. Whole Plant
  misc_feature: MA Experiment ID: 20000224 Result: Down-regulated in Transcription
  misc_feature: MA Experiment ID: 20000234 Result: Up-regulated in Transcription
  misc_feature: MA Experiment 20000234 PARAMETER Experiment Name: At_Siliques_P Parameter: Age (day) Value: 21
  misc_feature: MA Experiment 20000234 PARAMETER Experiment Name: At_Siliques_P Parameter: Organism Value: A. thaliana
  misc_feature: MA Experiment 20000234 PARAMETER Experiment Name: At_Siliques_P Parameter: Plant Line Value: WS
  misc_feature: MA Experiment 20000234 PARAMETER Experiment Name: At_Siliques_P Parameter: Tissue Value: Less Than 5mm Siliques vs. Whole Plant
  misc_feature: MA Experiment ID: 20000235 Result: Up-regulated in Transcription
  misc_feature: MA Experiment 20000235 PARAMETER Experiment Name: At_Siliques_P Parameter: Age (day) Value: 21
  misc_feature: MA Experiment 20000235 PARAMETER Experiment Name: At_Siliques_P Parameter: Organism Value: A. thaliana
  misc_feature: MA Experiment 20000235 PARAMETER Experiment Name: At_Siliques_P Parameter: Plant Line Value: WS
  misc_feature: MA Experiment 20000235 PARAMETER Experiment Name: At_Siliques_P Parameter: Tissue Value: 5-10mm Siliques vs. Whole Plant
  misc_feature: MA Experiment ID: 20000267 Result: Down-regulated in Transcription
  misc_feature: MA Experiment 20000267 PARAMETER Experiment Name: At_Drought_P Parameter: Age (day) Value: 7
  misc_feature: MA Experiment 20000267 PARAMETER Experiment Name: At_Drought_P Parameter: Organism Value: A. thaliana
  misc_feature: MA Experiment 20000267 PARAMETER Experiment Name: At_Drought_P Parameter: Plant Line Value: WS
  misc_feature: MA Experiment 20000267 PARAMETER Experiment Name: At_Drought_P Parameter: Timepoint (hr) Value: 6
  misc_feature: MA Experiment 20000267 PARAMETER Experiment Name: At_Drought_P Parameter: Tissue Value: Whole Plant
  misc_feature: MA Experiment 20000267 PARAMETER Experiment Name: At_Drought_P Parameter: Treatment Value: Drought vs. No Drought
  misc_feature: MA Experiment ID: 20000268 Result: Down-regulated in Transcription
  misc_feature: MA Experiment 20000268 PARAMETER Experiment Name: At_100mM_NaCl__P Parameter: Age (day) Value: 14
  misc_feature: MA Experiment 20000268 PARAMETER Experiment Name: At_100mM_NaCl__P Parameter: Organism Value: A. thaliana
  misc_feature: MA Experiment 20000268 PARAMETER Experiment Name: At_100mM_NaCl__P Parameter: Plant Line Value: WS
  misc_feature: MA Experiment 20000268 PARAMETER Experiment Name: At_100mM_NaCl__P Parameter: Timepoint (hr) Value: 6
  misc_feature: MA Experiment 20000268 PARAMETER Experiment Name: At_100mM_NaCl__P Parameter: Tissue Value: Whole Plant
  misc_feature: MA Experiment 20000268 PARAMETER Experiment Name: At_100mM_NaCl__P Parameter: Treatment Value: 100mM NaCl vs. No Treatment
  misc_feature: MA Experiment ID: 20000436 Result: Down-regulated in Transcription
  misc_feature: MA Experiment 20000436 PARAMETER Experiment Name: At_Drought_P Parameter: Age (day) Value: 7
  misc_feature: MA Experiment 20000436 PARAMETER Experiment Name: At_Drought_P Parameter: Organism Value: A. thaliana
  misc_feature: MA Experiment 20000436 PARAMETER Experiment Name: At_Drought_P Parameter: Plant Line Value: WS
  misc_feature: MA Experiment 20000436 PARAMETER Experiment Name: At_Drought_P Parameter: Timepoint (hr) Value: 12
  misc_feature: MA Experiment 20000436 PARAMETER Experiment Name: At_Drought_P Parameter: Tissue Value: Whole Plant
  misc_feature: MA Experiment 20000436 PARAMETER Experiment Name: At_Drought_P Parameter: Treatment Value: Drought vs. No Drought
  misc_feature: MA Experiment ID: 20000437 Result: Down-regulated in Transcription
  misc_feature: MA Experiment 20000437 PARAMETER Experiment Name: At_Drought_P Parameter: Age (day) Value: 8
  misc_feature: MA Experiment 20000437 PARAMETER Experiment Name: At_Drought_P Parameter: Organism Value: A. thaliana
  misc_feature: MA Experiment 20000437 PARAMETER Experiment Name: At_Drought_P Parameter: Plant Line Value: WS
  misc_feature: MA Experiment 20000437 PARAMETER Experiment Name: At_Drought_P Parameter: Timepoint (hr) Value: 24
  misc_feature: MA Experiment 20000437 PARAMETER Experiment Name: At_Drought_P Parameter: Tissue Value: Whole Plant
  misc_feature: MA Experiment 20000437 PARAMETER Experiment Name: At_Drought_P Parameter: Treatment Value: Drought vs. No Drought
  misc_feature: MA Experiment ID: 20000438 Result: Up-regulated in Transcription
  misc_feature: MA Experiment 20000438 PARAMETER Experiment Name: At_Shoots__P Parameter: Age (day) Value: 14
  misc_feature: MA Experiment 20000438 PARAMETER Experiment Name: At_Shoots__P Parameter: Tissue Value: Shoots vs. Whole Plant
  misc_feature: MA Experiment ID: 20000439 Result: Down-regulated in Transcription
  misc_feature: MA Experiment 20000439 PARAMETER Experiment Name: At_Roots__P Parameter: Age (day) Value: 14 vs. 21
  misc_feature: MA Experiment 20000439 PARAMETER Experiment Name: At_Roots__P Parameter: Organism Value: A. thaliana
  misc_feature: MA Experiment 20000439 PARAMETER Experiment Name: At_Roots__P Parameter: Tissue Value: Roots vs. Whole Plant
  misc_feature: MA Experiment ID: 20000451 Result: Down-regulated in Transcription
  misc_feature: MA Experiment 20000451 PARAMETER Experiment Name: At_CS6879_Shoots-Roots_P Parameter: Age (day) Value: 14
  misc_feature: MA Experiment 20000451 PARAMETER Experiment Name: At_CS6879_Shoots-Roots_P Parameter: Organism Value: A. thaliana
  misc_feature: MA Experiment 20000451 PARAMETER Experiment Name: At_CS6879_Shoots-Roots_P Parameter: Plant Line Value: CS6879 vs. WS
  misc_feature: MA Experiment 20000451 PARAMETER Experiment Name: At_CS6879_Shoots-Roots_P Parameter: Tissue Value: Roots
  misc_feature: MA Experiment ID: 20000452 Result: Down-regulated in Transcription
  misc_feature: MA Experiment 20000452 PARAMETER Experiment Name: At_CS6879_Shoots-Roots_P Parameter: Age (day) Value: 14
  misc_feature: MA Experiment 20000452 PARAMETER Experiment Name: At_CS6879_Shoots-Roots_P Parameter: Organism Value: A. thaliana
  misc_feature: MA Experiment 20000452 PARAMETER Experiment Name: At_CS6879_Shoots-Roots_P Parameter: Plant Line Value: CS6879 vs. WS
  misc_feature: MA Experiment 20000452 PARAMETER Experiment Name: At_CS6879_Shoots-Roots_P Parameter: Tissue Value: Shoots
  misc_feature: MA Experiment ID: 20000794 Result: Down-regulated in Transcription
  misc_feature: MA Experiment 20000794 PARAMETER Experiment Name: At_Petals_P Parameter: Age (day) Value: 23-25 days
  misc_feature: MA Experiment 20000794 PARAMETER Experiment Name: At_Petals_P Parameter: Plant Line Value: WS
  misc_feature: MA Experiment 20000794 PARAMETER Experiment Name: At_Petals_P Parameter: Tissue Value: Petals vs. Whole plant
  misc_feature: MA Experiment ID: 20001248 Result: Down-regulated in Transcription
  misc_feature: MA Experiment 20001248 PARAMETER Experiment Name: At_Far-red-induction_P Parameter: Age (day) Value: 7
  misc_feature: MA Experiment 20001248 PARAMETER Experiment Name: At_Far-red-induction_P Parameter: Light Value: Far-red vs. White
  misc_feature: MA Experiment 20001248 PARAMETER Experiment Name: At_Far-red-induction_P Parameter: Organism Value: A. thaliana
  misc_feature: MA Experiment 20001248 PARAMETER Experiment Name: At_Far-red-induction_P Parameter: Plant Line Value: Columbia
  misc_feature: MA Experiment 20001248 PARAMETER Experiment Name: At_Far-red-induction_P Parameter: Timepoint (hr) Value: 4
  misc_feature: MA Experiment 20001248 PARAMETER Experiment Name: At_Far-red-induction_P Parameter: Tissue Value: Whole Plant
  misc_feature: MA Experiment ID: 20001554 Result: Down-regulated in Transcription
  misc_feature: MA Experiment 20001554 PARAMETER Experiment Name: At_Drought_Soil_Dry_P Parameter: Age (day) Value: 21
  misc_feature: MA Experiment 20001554 PARAMETER Experiment Name: At_Drought_Soil_Dry_P Parameter: Organism Value: A. thaliana
  misc_feature: MA Experiment 20001554 PARAMETER Experiment Name: At_Drought_Soil_Dry_P Parameter: Plant Line Value: WS
  misc_feature: MA Experiment 20001554 PARAMETER Experiment Name: At_Drought_Soil_Dry_P Parameter: Post Timepoint (hr) Value: None
  misc_feature: MA Experiment 20001554 PARAMETER Experiment Name: At_Drought_Soil_Dry_P Parameter: Post-Treatment Value: None
  misc_feature: MA Experiment 20001554 PARAMETER Experiment Name: At_Drought_Soil_Dry_P Parameter: Timepoint (day) Value: 7
  misc_feature: MA Experiment 20001554 PARAMETER Experiment Name: At_Drought_Soil_Dry_P Parameter: Treatment Value: Drought vs. No Drought
  misc_feature: MA Experiment ID: 20001555 Result: Down-regulated in Transcription
  misc_feature: MA Experiment 20001555 PARAMETER Experiment Name: At_Drought_Soil_Dry_P Parameter: Age (day) Value: 24
  misc_feature: MA Experiment 20001555 PARAMETER Experiment Name: At_Drought_Soil_Dry_P Parameter: Organism Value: A. thaliana
  misc_feature: MA Experiment 20001555 PARAMETER Experiment Name: At_Drought_Soil_Dry_P Parameter: Plant Line Value: WS
  misc_feature: MA Experiment 20001555 PARAMETER Experiment Name: At_Drought_Soil_Dry_P Parameter: Post Timepoint (hr) Value: None
  misc_feature: MA Experiment 20001555 PARAMETER Experiment Name: At_Drought_Soil_Dry_P Parameter: Post-Treatment Value: None
  misc_feature: MA Experiment 20001555 PARAMETER Experiment Name: At_Drought_Soil_Dry_P Parameter: Timepoint (day) Value: 10
  misc_feature: MA Experiment 20001555 PARAMETER Experiment Name: At_Drought_Soil_Dry_P Parameter: Treatment Value: Drought vs. No Drought
  misc_feature: MA Experiment ID: 20001556 Result: Down-regulated in Transcription
  misc_feature: MA Experiment 20001556 PARAMETER Experiment Name: At_Drought_Soil_Dry_P Parameter: Age (day) Value: 26
  misc_feature: MA Experiment 20001556 PARAMETER Experiment Name: At_Drought_Soil_Dry_P Parameter: Organism Value: A. thaliana
  misc_feature: MA Experiment 20001556 PARAMETER Experiment Name: At_Drought_Soil_Dry_P Parameter: Plant Line Value: WS
  misc_feature: MA Experiment 20001556 PARAMETER Experiment Name: At_Drought_Soil_Dry_P Parameter: Post Timepoint (hr) Value: None
  misc_feature: MA Experiment 20001556 PARAMETER Experiment Name: At_Drought_Soil_Dry_P Parameter: Post-Treatment Value: None
  misc_feature: MA Experiment 20001556 PARAMETER Experiment Name: At_Drought_Soil_Dry_P Parameter: Timepoint (day) Value: 12
  misc_feature: MA Experiment 20001556 PARAMETER Experiment Name: At_Drought_Soil_Dry_P Parameter: Treatment Value: Drought vs. No Drought
  misc_feature: MA Experiment ID: 20001558 Result: Up-regulated in Transcription
  misc_feature: MA Experiment 20001558 PARAMETER Experiment Name: At_Drought_Soil_Dry_P Parameter: Age (day) Value: 27
  misc_feature: MA Experiment 20001558 PARAMETER Experiment Name: At_Drought_Soil_Dry_P Parameter: Organism Value: A. thaliana
  misc_feature: MA Experiment 20001558 PARAMETER Experiment Name: At_Drought_Soil_Dry_P Parameter: Plant Line Value: WS
  misc_feature: MA Experiment 20001558 PARAMETER Experiment Name: At_Drought_Soil_Dry_P Parameter: Post Timepoint (hr) Value: 6
  misc_feature: MA Experiment 20001558 PARAMETER Experiment Name: At_Drought_Soil_Dry_P Parameter: Post-Treatment Value: Re-Water vs. No Drought
  misc_feature: MA Experiment 20001558 PARAMETER Experiment Name: At_Drought_Soil_Dry_P Parameter: Timepoint (day) Value: 13
  misc_feature: MA Experiment 20001558 PARAMETER Experiment Name: At_Drought_Soil_Dry_P Parameter: Treatment Value: Drought vs. No Drought
  misc_feature: MA Experiment ID: 20001559 Result: Down-regulated in Transcription
  misc_feature: MA Experiment 20001559 PARAMETER Experiment Name: At_Drought_Soil_Dry_P Parameter: Age (day) Value: 28
  misc_feature: MA Experiment 20001559 PARAMETER Experiment Name: At_Drought_Soil_Dry_P Parameter: Organism Value: A. thaliana
  misc_feature: MA Experiment 20001559 PARAMETER Experiment Name: At_Drought_Soil_Dry_P Parameter: Plant Line Value: WS
  misc_feature: MA Experiment 20001559 PARAMETER Experiment Name: At_Drought_Soil_Dry_P Parameter: Post Timepoint (hr) Value: 29
  misc_feature: MA Experiment 20001559 PARAMETER Experiment Name: At_Drought_Soil_Dry_P Parameter: Post-Treatment Value: Re-Water vs. No Drought
  misc_feature: MA Experiment 20001559 PARAMETER Experiment Name: At_Drought_Soil_Dry_P Parameter: Timepoint (day) Value: 14
  misc_feature: MA Experiment 20001559 PARAMETER Experiment Name: At_Drought_Soil_Dry_P Parameter: Treatment Value: Drought vs. No Drought
  misc_feature: MA Experiment ID: 20001560 Result: Up-regulated in Transcription
  misc_feature: MA Experiment 20001560 PARAMETER Experiment Name: At_Drought_Soil_Dry_P Parameter: Age (day) Value: 28
  misc_feature: MA Experiment 20001560 PARAMETER Experiment Name: At_Drought_Soil_Dry_P Parameter: Organism Value: A. thaliana
  misc_feature: MA Experiment 20001560 PARAMETER Experiment Name: At_Drought_Soil_Dry_P Parameter: Plant Line Value: WS
  misc_feature: MA Experiment 20001560 PARAMETER Experiment Name: At_Drought_Soil_Dry_P Parameter: Post Timepoint (hr) Value: None
  misc_feature: MA Experiment 20001560 PARAMETER Experiment Name: At_Drought_Soil_Dry_P Parameter: Post-Treatment Value: None
  misc_feature: MA Experiment 20001560 PARAMETER Experiment Name: At_Drought_Soil_Dry_P Parameter: Timepoint (day) Value: 14
  misc_feature: MA Experiment 20001560 PARAMETER Experiment Name: At_Drought_Soil_Dry_P Parameter: Treatment Value: Drought vs. No Drought
  misc_feature: MA Experiment ID: 20001757 Result: Up-regulated in Transcription
  misc_feature: MA Experiment 20001757 PARAMETER Experiment Name: At_50mM_NH4NO3_L-to-H_P Parameter: Timepoint (hr) Value: 6
  misc_feature: MA Experiment 20001757 PARAMETER Experiment Name: At_50mM_NH4NO3_L-to-H_P Parameter: Tissue Value: Leaf
  misc_feature: MA Experiment 20001757 PARAMETER Experiment Name: At_50mM_NH4NO3_L-to-H_P Parameter: Treatment Value: 50mM NH4NO3 vs 100mM Mannitol
  misc_feature: MA Experiment ID: 20001904 Result: Down-regulated in Transcription
  misc_feature: MA Experiment 20001904 PARAMETER Experiment Name: At_Drought_Reproduction_P Parameter: Age (day) Value: 37
  misc_feature: MA Experiment 20001904 PARAMETER Experiment Name: At_Drought_Reproduction_P Parameter: Organism Value: A. thaliana
  misc_feature: MA Experiment 20001904 PARAMETER Experiment Name: At_Drought_Reproduction_P Parameter: Plant Line Value: WS
  misc_feature: MA Experiment 20001904 PARAMETER Experiment Name: At_Drought_Reproduction_P Parameter: Timepoint (day) Value: 7
  misc_feature: MA Experiment 20001904 PARAMETER Experiment Name: At_Drought_Reproduction_P Parameter: Tissue Value: Rosettes
  misc_feature: MA Experiment 20001904 PARAMETER Experiment Name: At_Drought_Reproduction_P Parameter: Treatment Value: Drought vs. No Drought
  misc_feature: MA Experiment ID: 20001906 Result: Down-regulated in Transcription
  misc_feature: MA Experiment 20001906 PARAMETER Experiment Name: At_Drought_Reproduction_P Parameter: Age (day) Value: 35
  misc_feature: MA Experiment 20001906 PARAMETER Experiment Name: At_Drought_Reproduction_P Parameter: Organism Value: A. thaliana
  misc_feature: MA Experiment 20001906 PARAMETER Experiment Name: At_Drought_Reproduction_P Parameter: Plant Line Value: WS
  misc_feature: MA Experiment 20001906 PARAMETER Experiment Name: At_Drought_Reproduction_P Parameter: Timepoint (day) Value: 5
  misc_feature: MA Experiment 20001906 PARAMETER Experiment Name: At_Drought_Reproduction_P Parameter: Tissue Value: Siliques
  misc_feature: MA Experiment 20001906 PARAMETER Experiment Name: At_Drought_Reproduction_P Parameter: Treatment Value: Drought vs. No Drought
  misc_feature: MA Experiment ID: 20001907 Result: Down-regulated in Transcription
  misc_feature: MA Experiment 20001907 PARAMETER Experiment Name: At_Drought_Reproduction_P Parameter: Age (day) Value: 37
  misc_feature: MA Experiment 20001907 PARAMETER Experiment Name: At_Drought_Reproduction_P Parameter: Organism Value: A. thaliana
  misc_feature: MA Experiment 20001907 PARAMETER Experiment Name: At_Drought_Reproduction_P Parameter: Plant Line Value: WS
  misc_feature: MA Experiment 20001907 PARAMETER Experiment Name: At_Drought_Reproduction_P Parameter: Timepoint (day) Value: 7
  misc_feature: MA Experiment 20001907 PARAMETER Experiment Name: At_Drought_Reproduction_P Parameter: Tissue Value: Siliques
  misc_feature: MA Experiment 20001907 PARAMETER Experiment Name: At_Drought_Reproduction_P Parameter: Treatment Value: Drought vs. No Drought
  misc_feature: MA Experiment ID: 20001911 Result: Down-regulated in Transcription
  misc_feature: MA Experiment 20001911 PARAMETER Experiment Name: At_Drought_Reproduction_P Parameter: Age (day) Value: 40
  misc_feature: MA Experiment 20001911 PARAMETER Experiment Name: At_Drought_Reproduction_P Parameter: Organism Value: A. thaliana
  misc_feature: MA Experiment 20001911 PARAMETER Experiment Name: At_Drought_Reproduction_P Parameter: Plant Line Value: WS
  misc_feature: MA Experiment 20001911 PARAMETER Experiment Name: At_Drought_Reproduction_P Parameter: Timepoint (day) Value: 10
  misc_feature: MA Experiment 20001911 PARAMETER Experiment Name: At_Drought_Reproduction_P Parameter: Tissue Value: Flowers
  misc_feature: MA Experiment 20001911 PARAMETER Experiment Name: At_Drought_Reproduction_P Parameter: Treatment Value: Drought vs. No Drought
aagaaccttcacttttctctcccactctttcttttactactctcacacatatctctgtctatatatcactttacataaacgactattccacacacaaacacacatagccatggcctcttctttctcttcacaagccttcttcttgctcacattgtctatggttttaattcctttctctttagctcaagctcccatgatggctccttctggctcaatgtccatgccgcctatgtctagcggcggtggaagctcggttcctcctccagtgatgtctccgatgccaatgatgactccaccacctatgcctatgactccaccacccatgcccatgactccaccacctatgcctatggctccaccaccaatgcccatggcttcaccaccaatgatgccaatgactccatctacaagcccaagcccattaacagttccggatatgccttcgccgccgatgccatccggaatggaatcttcaccttctccaggacccatgccaccggcaatggcggcttcgccggattcaggagctttcaatgttagaaacaacgtcgtaacactttcatgcgttgttggagttgttgcagcccattttctcctcgtttgaaatgattattgaattggtcagcctcgatcgttttcttgtaatttaccttcatttttttccctcaaattattagtggtcatcattttataatatttgagtttgtgtttgatgtacgattcagacatttgtttgcattatgtgcttaataagtttatcgttgactctacttgaagagagactttgtatgtgatgtaaatttcttctatctatggaacattgcattcgtagtc

SEQ ID NO: 21502 - protein, 200 aa, Arabidopsis thaliana
  peptide (1)..(200): Ceres Seq. ID no. 13493902
  misc_feature (68)..(166): Pfam Name: Extensin-like region Pfam Description: Extensin-like region
  misc_feature (63)..(172): Homolog of NCBI NO: 25404769 NR Description: hypothetical protein F14K14.17 [imported] -
  misc_feature (63)..(172): Homolog of NCBI NO: 22330504 NR Description: arabinogalactan-protein, putative (AGP19)
  misc_feature (43)..(174): Homolog of NCBI NO: 13265426 NR Description: At2g14890 [Arabidopsis thaliana]
  misc_feature (63)..(182): Homolog of NCBI NO: 23577891 NR Description: unknown [Rachiplusia ou multiple
  misc_feature (43)..(174): Homolog of NCBI NO: 15226024 NR Description: arabinogalactan-protein (AGP9) [Arabidopsis
  misc_feature (37)..(172): Homolog of NCBI NO: 15866589 NR Description: hypothetical protein [Capsella rubella]
  misc_feature (64)..(200): Homolog of NCBI NO: 15866589 NR Description: hypothetical protein [Capsella rubella]
  misc_feature (37)..(178): Homolog of NCBI NO: 7488174 NR Description: probable resistance protein - Arabidopsis thaliana
  misc_feature (37)..(200): Homolog of NCBI NO: 21592593 NR Description: unknown [Arabidopsis thaliana]
  misc_feature (37)..(200): Homolog of NCBI NO: 30683885 NR Description: arabinogalactan-protein family [Arabidopsis
RTFTFLSHSFFYYSHTYLCLYITLHKRLFHTQTHIAMASSFSSQAFFLLTLSMVLIPFSLAQAPMMAPSGSMSMPPMSSGGGSSVPPPVMSPMPMMTPPPMPMTPPPMPMTPPPMPMAPPPMPMASPPMMPMTPSTSPSPLTVPDMPSPPMPSGMESSPSPGPMPPAMAASPDSGAFNVRNNVVTLSCVVGVVAAHFLLV

SEQ ID NO: 21503 - protein, 164 aa, Arabidopsis thaliana
  peptide (1)..(164): Ceres Seq. ID no. 13493903
  misc_feature (32)..(130): Pfam Name: Extensin-like region Pfam Description: Extensin-like region
  misc_feature (27)..(136): Homolog of NCBI NO: 25404769 NR Description: hypothetical protein F14K14.17 [imported] -
  misc_feature (27)..(136): Homolog of NCBI NO: 22330504 NR Description: arabinogalactan-protein, putative (AGP19)
  misc_feature (7)..(138): Homolog of NCBI NO: 13265426 NR Description: At2g14890 [Arabidopsis thaliana]
  misc_feature (27)..(146): Homolog of NCBI NO: 23577891 NR Description: unknown [Rachiplusia ou multiple
  misc_feature (7)..(138): Homolog of NCBI NO: 15226024 NR Description: arabinogalactan-protein (AGP9) [Arabidopsis
  misc_feature (1)..(136): Homolog of NCBI NO: 15866589 NR Description: hypothetical protein [Capsella rubella]
  misc_feature (28)..(164): Homolog of NCBI NO: 15866589 NR Description: hypothetical protein [Capsella rubella]
  misc_feature (1)..(142): Homolog of NCBI NO: 7488174 NR Description: probable resistance protein - Arabidopsis thaliana
  misc_feature (1)..(164): Homolog of NCBI NO: 21592593 NR Description: unknown [Arabidopsis thaliana]
  misc_feature (1)..(164): Homolog of NCBI NO: 30683885 NR Description: arabinogalactan-protein family [Arabidopsis
MASSFSSQAFFLLTLSMVLIPFSLAQAPMMAPSGSMSMPPMSSGGGSSVPPPVMSPMPMMTPPPMPMTPPPMPMTPPPMPMAPPPMPMASPPMMPMTPSTSPSPLTVPDMPSPPMPSGMESSPSPGPMPPAMAASPDSGAFNVRNNVVTLSCVVGVVAAHFLLV

SEQ ID NO: 21504 - protein, 148 aa, Arabidopsis thaliana
  peptide (1)..(148): Ceres Seq. ID no. 13493904
  misc_feature (16)..(114): Pfam Name: Extensin-like region Pfam Description: Extensin-like region
  misc_feature (11)..(120): Homolog of NCBI NO: 25404769 NR Description: hypothetical protein F14K14.17 [imported] -
  misc_feature (11)..(120): Homolog of NCBI NO: 22330504 NR Description: arabinogalactan-protein, putative (AGP19)
  misc_feature (1)..(122): Homolog of NCBI NO: 13265426 NR Description: At2g14890 [Arabidopsis thaliana]
  misc_feature (11)..(130): Homolog of NCBI NO: 23577891 NR Description: unknown [Rachiplusia ou multiple
  misc_feature (1)..(122): Homolog of NCBI NO: 15226024 NR Description: arabinogalactan-protein (AGP9) [Arabidopsis
  misc_feature (1)..(120): Homolog of NCBI NO: 15866589 NR Description: hypothetical protein [Capsella rubella]
  misc_feature (12)..(148): Homolog of NCBI NO: 15866589 NR Description: hypothetical protein [Capsella rubella]
  misc_feature (1)..(126): Homolog of NCBI NO: 7488174 NR Description: probable resistance protein - Arabidopsis thaliana
  misc_feature (1)..(148): Homolog of NCBI NO: 21592593 NR Description: unknown [Arabidopsis thaliana]
  misc_feature (1)..(148): Homolog of NCBI NO: 30683885 NR Description: arabinogalactan-protein family [Arabidopsis
MVLIPFSLAQAPMMAPSGSMSMPPMSSGGGSSVPPPVMSPMPMMTPPPMPMTPPPMPMTPPPMPMAPPPMPMASPPMMPMTPSTSPSPLTVPDMPSPPMPSGMESSPSPGPMPPAMAASPDSGAFNVRNNVVTLSCVVGVVAAHFLLV

SEQ ID NO: 21505 - DNA, 907 bp, Arabidopsis thaliana
  misc_feature (1)..(907): Ceres Seq. ID no. 13580583
  misc_feature: MA Experiment ID: 108434 Result: Down-regulated in Transcription
  misc_feature: MA Experiment 108434 PARAMETER Experiment Name: At_Root_Tips_cDNA_P Parameter: Tissue Value: Root Tips
  misc_feature: MA Experiment ID: 108435 Result: Up-regulated in Transcription
  misc_feature: MA Experiment 108435 PARAMETER Experiment Name: At_stm_Mutants_cDNA_P Parameter: Plant Line Value: wt Landsburg vs stm
  misc_feature: MA Experiment 108435 PARAMETER Experiment Name: At_stm_Mutants_cDNA_P Parameter: Tissue Value: Shoot Apical Meristem Region
  misc_feature: MA Experiment ID: 108463 Result: Up-regulated in Transcription
  misc_feature: MA Experiment 108463 PARAMETER Experiment Name: At_Germinating_Seeds_cDNA_P Parameter: Age (day) Value: 3 vs. 0
  misc_feature: MA Experiment 108463 PARAMETER Experiment Name: At_Germinating_Seeds_cDNA_P Parameter: Tissue Value: Germinating Seeds
  misc_feature: MA Experiment ID: 108501 Result: Down-regulated in Transcription
  misc_feature: MA Experiment 108501 PARAMETER Experiment Name: At_ap2_floral_buds_cDNA_P Parameter: Plant Line Value: ap2 (Ler.)
  misc_feature: MA Experiment 108501 PARAMETER Experiment Name: At_ap2_floral_buds_cDNA_P Parameter: Tissue Value: Closed Flower
  misc_feature: MA Experiment ID: 108577 Result: Down-regulated in Transcription
  misc_feature: MA Experiment 108577 PARAMETER Experiment Name: At_42deg_Heat_cDNA_P Parameter: Temperature (deg C) Value: 42 vs. 22
  misc_feature: MA Experiment 108577 PARAMETER Experiment Name: At_42deg_Heat_cDNA_P Parameter: Timepoint (hr) Value: 6
  misc_feature: MA Experiment 108577 PARAMETER Experiment Name: At_42deg_Heat_cDNA_P Parameter: Tissue Value: Aerial
  misc_feature: MA Experiment ID: 108579 Result: Down-regulated in Transcription
  misc_feature: MA Experiment 108579 PARAMETER Experiment Name: At_4deg_Cold_cDNA_P Parameter: Temperature (deg C) Value: 4 vs. 22
  misc_feature: MA Experiment 108579 PARAMETER Experiment Name: At_4deg_Cold_cDNA_P Parameter: Timepoint (hr) Value: 6
  misc_feature: MA Experiment 108579 PARAMETER Experiment Name: At_4deg_Cold_cDNA_P Parameter: Tissue Value: Aerial
  misc_feature: MA Experiment ID: 108585 Result: Down-regulated in Transcription
  misc_feature: MA Experiment 108585 PARAMETER Experiment Name: At_5mM_NaNP_cDNA_P Parameter: Timepoint (hr) Value: 6
  misc_feature: MA Experiment 108585 PARAMETER Experiment Name: At_5mM_NaNP_cDNA_P Parameter: Tissue Value: Aerial
  misc_feature: MA Experiment 108585 PARAMETER Experiment Name: At_5mM_NaNP_cDNA_P Parameter: Treatment Value: null
  misc_feature: MA Experiment ID: 108609 Result: Up-regulated in Transcription
  misc_feature: MA Experiment 108609 PARAMETER Experiment Name: At_100uM_ABA_cDNA_P Parameter: Timepoint (hr) Value: 24
  misc_feature: MA Experiment 108609 PARAMETER Experiment Name: At_100uM_ABA_cDNA_P Parameter: Tissue Value: Aerial
  misc_feature: MA Experiment 108609 PARAMETER Experiment Name: At_100uM_ABA_cDNA_P Parameter: Treatment Value: 100uM ABA vs. No Treatment
  misc_feature: MA Experiment ID: 20000068 Result: Up-regulated in Transcription
  misc_feature: MA Experiment ID: 20000069 Result: Up-regulated in Transcription
  misc_feature: MA Experiment 20000069 PARAMETER Experiment Name: At_100uM_ABA_Mutants_cDNA_P Parameter: Plant Line Value: CS23
  misc_feature: MA Experiment 20000069 PARAMETER Experiment Name: At_100uM_ABA_Mutants_cDNA_P Parameter: Timepoint (hr) Value: 6
  misc_feature: MA Experiment 20000069 PARAMETER Experiment Name: At_100uM_ABA_Mutants_cDNA_P Parameter: Tissue Value: Aerial
  misc_feature: MA Experiment 20000069 PARAMETER Experiment Name: At_100uM_ABA_Mutants_cDNA_P Parameter: Treatment Value: 100uM ABA vs. No Treatment
  misc_feature: MA Experiment ID: 20000071 Result: Up-regulated in Transcription
  misc_feature: MA Experiment 20000071 PARAMETER Experiment Name: At_100uM_ABA_Mutants_cDNA_P Parameter: Plant Line Value: CS8104
  misc_feature: MA Experiment 20000071 PARAMETER Experiment Name: At_100uM_ABA_Mutants_cDNA_P Parameter: Timepoint (hr) Value: 6
  misc_feature: MA Experiment 20000071 PARAMETER Experiment Name: At_100uM_ABA_Mutants_cDNA_P Parameter: Tissue Value: Aerial
  misc_feature: MA Experiment 20000071 PARAMETER Experiment Name: At_100uM_ABA_Mutants_cDNA_P Parameter: Treatment Value: 100uM ABA vs. No Treatment
  misc_feature: MA Experiment ID: 20000117 Result: Up-regulated in Transcription
  misc_feature: MA Experiment 20000117 PARAMETER Experiment Name: At_100uM_ABA_Mutants_cDNA_P Parameter: Plant Line Value: Columbia
  misc_feature: MA Experiment 20000117 PARAMETER Experiment Name: At_100uM_ABA_Mutants_cDNA_P Parameter: Timepoint (hr) Value: 6
  misc_feature: MA Experiment 20000117 PARAMETER Experiment Name: At_100uM_ABA_Mutants_cDNA_P Parameter: Tissue Value: Aerial
  misc_feature: MA Experiment 20000117 PARAMETER Experiment Name: At_100uM_ABA_Mutants_cDNA_P Parameter: Treatment Value: 100uM ABA vs. No Treatment
  misc_feature: MA Experiment ID: 20000179 Result: Up-regulated in Transcription
  misc_feature: MA Experiment 20000179 PARAMETER Experiment Name: At_Germinating_Seeds_P Parameter: Age (hr) Value: 6 vs. 0
  misc_feature: MA Experiment 20000179 PARAMETER Experiment Name: At_Germinating_Seeds_P Parameter: Tissue Value: Germinating Seeds
  misc_feature: MA Experiment ID: 20000180 Result: Up-regulated in Transcription
  misc_feature: MA Experiment 20000180 PARAMETER Experiment Name: At_Germinating_Seeds_P Parameter: Age (hr) Value: 24 vs. 0
  misc_feature: MA Experiment 20000180 PARAMETER Experiment Name: At_Germinating_Seeds_P Parameter: Tissue Value: Germinating Seeds
  misc_feature: MA Experiment ID: 20000185 Result: Down-regulated in Transcription
  misc_feature: MA Experiment 20000185 PARAMETER Experiment Name: At_Roots__P Parameter: Age (day) Value: 7 vs. 21
  misc_feature: MA Experiment 20000185 PARAMETER Experiment Name: At_Roots__P Parameter: Organism Value: A. thaliana
  misc_feature: MA Experiment 20000185 PARAMETER Experiment Name: At_Roots__P Parameter: Tissue Value: Roots vs. Whole Plant
  misc_feature: MA Experiment ID: 20000224 Result: Up-regulated in Transcription
  misc_feature: MA Experiment ID: 20000264 Result: Down-regulated in Transcription
  misc_feature: MA Experiment 20000264 PARAMETER Experiment Name: At_Open_Flower_P Parameter: Age (day) Value: 21
  misc_feature: MA Experiment 20000264 PARAMETER Experiment Name: At_Open_Flower_P Parameter: Plant Line Value: WS
  misc_feature: MA Experiment 20000264 PARAMETER Experiment Name: At_Open_Flower_P Parameter: Tissue Value: Open Flower vs. Whole Plant
  misc_feature: MA Experiment ID: 20000438 Result: Up-regulated in Transcription
  misc_feature: MA Experiment 20000438 PARAMETER Experiment Name: At_Shoots__P Parameter: Age (day) Value: 14
  misc_feature: MA Experiment 20000438 PARAMETER Experiment Name: At_Shoots__P Parameter: Tissue Value: Shoots vs. Whole Plant
  misc_feature: MA Experiment ID: 20000439 Result: Down-regulated in Transcription
  misc_feature: MA Experiment 20000439 PARAMETER Experiment Name: At_Roots__P Parameter: Age (day) Value: 14 vs. 21
  misc_feature: MA Experiment 20000439 PARAMETER Experiment Name: At_Roots__P Parameter: Organism Value: A. thaliana
  misc_feature: MA Experiment 20000439 PARAMETER Experiment Name: At_Roots__P Parameter: Tissue Value: Roots vs. Whole Plant
  misc_feature: MA Experiment ID: 20000445 Result: Down-regulated in Transcription
  misc_feature: MA Experiment 20000445 PARAMETER Experiment Name: At_100uM_NAA__P Parameter: Age (day) Value: 14
  misc_feature: MA Experiment 20000445 PARAMETER Experiment Name: At_100uM_NAA__P Parameter: Organism Value: A. thaliana
  misc_feature: MA Experiment 20000445 PARAMETER Experiment Name: At_100uM_NAA__P Parameter: Plant Line Value: WS
  misc_feature: MA Experiment 20000445 PARAMETER Experiment Name: At_100uM_NAA__P Parameter: Timepoint (hr) Value: 6
  misc_feature: MA Experiment 20000445 PARAMETER Experiment Name: At_100uM_NAA__P Parameter: Tissue Value: Aerial
  misc_feature: MA Experiment 20000445 PARAMETER Experiment Name: At_100uM_NAA__P Parameter: Treatment Value: 100uM NAA vs. No Treatment
  misc_feature: MA Experiment ID: 20000453 Result: Up-regulated in Transcription
  misc_feature: MA Experiment 20000453 PARAMETER Experiment Name: At_100uM_ABA_P Parameter: Age (day) Value: 15
  misc_feature: MA Experiment 20000453 PARAMETER Experiment Name: At_100uM_ABA_P Parameter: Organism Value: A. thaliana
  misc_feature: MA Experiment 20000453 PARAMETER Experiment Name: At_100uM_ABA_P Parameter: Plant Line Value: WS
  misc_feature: MA Experiment 20000453 PARAMETER Experiment Name: At_100uM_ABA_P Parameter: Timepoint (hr) Value: 24
  misc_feature: MA Experiment 20000453 PARAMETER Experiment Name: At_100uM_ABA_P Parameter: Tissue Value: Aerial
  misc_feature: MA Experiment 20000453 PARAMETER Experiment Name: At_100uM_ABA_P Parameter: Treatment Value: 100uM ABA vs. No Treatment
  misc_feature: MA Experiment ID: 20000573 Result: Down-regulated in Transcription
  misc_feature: MA Experiment 20000573 PARAMETER Experiment Name: At_100uM_ABA_Mutants__P Parameter: Organism Value: A. thaliana
  misc_feature: MA Experiment 20000573 PARAMETER Experiment Name: At_100uM_ABA_Mutants__P Parameter: Plant Line Value: CS22 vs. Ler wt
  misc_feature: MA Experiment 20000573 PARAMETER Experiment Name: At_100uM_ABA_Mutants__P Parameter: Timepoint (hr) Value: N/A
  misc_feature: MA Experiment 20000573 PARAMETER Experiment Name: At_100uM_ABA_Mutants__P Parameter: Tissue Value: Whole Plant
  misc_feature: MA Experiment 20000573 PARAMETER Experiment Name: At_100uM_ABA_Mutants__P Parameter: Treatment Value: None
  misc_feature: MA Experiment ID: 20000574 Result: Down-regulated in Transcription
  misc_feature: MA Experiment 20000574 PARAMETER Experiment Name: At_100uM_ABA_Mutants__P Parameter: Organism Value: A. thaliana
  misc_feature: MA Experiment 20000574 PARAMETER Experiment Name: At_100uM_ABA_Mutants__P Parameter: Plant Line Value: CS23 vs. Ler wt
  misc_feature: MA Experiment 20000574 PARAMETER Experiment Name: At_100uM_ABA_Mutants__P Parameter: Timepoint (hr) Value: N/A
  misc_feature: MA Experiment 20000574 PARAMETER Experiment Name: At_100uM_ABA_Mutants__P Parameter: Tissue Value: Whole Plant
  misc_feature: MA Experiment 20000574 PARAMETER Experiment Name: At_100uM_ABA_Mutants__P Parameter: Treatment Value: None
  misc_feature: MA Experiment ID: 20000794 Result: Down-regulated in Transcription
  misc_feature: MA Experiment 20000794 PARAMETER Experiment Name: At_Petals_P Parameter: Age (day) Value: 23-25 days
  misc_feature: MA Experiment 20000794 PARAMETER Experiment Name: At_Petals_P Parameter: Plant Line Value: WS
  misc_feature: MA Experiment 20000794 PARAMETER Experiment Name: At_Petals_P Parameter: Tissue Value: Petals vs. Whole plant
  misc_feature: MA Experiment ID: 20001247 Result: Down-regulated in Transcription
  misc_feature: MA Experiment 20001247 PARAMETER Experiment Name: At_Far-red-induction_P Parameter: Age (day) Value: 7
  misc_feature: MA Experiment 20001247 PARAMETER Experiment Name: At_Far-red-induction_P Parameter: Light Value: Far-red vs. White
  misc_feature: MA Experiment 20001247 PARAMETER Experiment Name: At_Far-red-induction_P Parameter: Organism Value: A. thaliana
  misc_feature: MA Experiment 20001247 PARAMETER Experiment Name: At_Far-red-induction_P Parameter: Plant Line Value: Columbia
  misc_feature: MA Experiment 20001247 PARAMETER Experiment Name: At_Far-red-induction_P Parameter: Timepoint (hr) Value: 1
  misc_feature: MA Experiment 20001247 PARAMETER Experiment Name: At_Far-red-induction_P Parameter: Tissue Value: Whole Plant
  misc_feature: MA Experiment ID: 20001248 Result: Down-regulated in Transcription
  misc_feature: MA Experiment 20001248 PARAMETER Experiment Name: At_Far-red-induction_P Parameter: Age (day) Value: 7
  misc_feature: MA Experiment 20001248 PARAMETER Experiment Name: At_Far-red-induction_P Parameter: Light Value: Far-red vs. White
  misc_feature: MA Experiment 20001248 PARAMETER Experiment Name: At_Far-red-induction_P Parameter: Organism Value: A. thaliana
  misc_feature: MA Experiment 20001248 PARAMETER Experiment Name: At_Far-red-induction_P Parameter: Plant Line Value: Columbia
  misc_feature: MA Experiment 20001248 PARAMETER Experiment Name: At_Far-red-induction_P Parameter: Timepoint (hr) Value: 4
  misc_feature: MA Experiment 20001248 PARAMETER Experiment Name: At_Far-red-induction_P Parameter: Tissue Value: Whole Plant
  misc_feature: MA Experiment ID: 20001450 Result: Down-regulated in Transcription
  misc_feature: MA Experiment 20001450 PARAMETER Experiment Name: At_Far-red-induction_P Parameter: Age (day) Value: 7
  misc_feature: MA Experiment 20001450 PARAMETER Experiment Name: At_Far-red-induction_P Parameter: Light Value: Far-red vs. White
  misc_feature: MA Experiment 20001450 PARAMETER Experiment Name: At_Far-red-induction_P Parameter: Organism Value: A. thaliana
  misc_feature: MA Experiment 20001450 PARAMETER Experiment Name: At_Far-red-induction_P Parameter: Plant Line Value: Columbia
  misc_feature: MA Experiment 20001450 PARAMETER Experiment Name: At_Far-red-induction_P Parameter: Timepoint (hr) Value: 8
  misc_feature: MA Experiment 20001450 PARAMETER Experiment Name: At_Far-red-induction_P Parameter: Tissue Value: Whole Plant
  misc_feature: MA Experiment ID: 20001554 Result: Up-regulated in Transcription
  misc_feature: MA Experiment 20001554 PARAMETER Experiment Name: At_Drought_Soil_Dry_P Parameter: Age (day) Value: 21
  misc_feature: MA Experiment 20001554 PARAMETER Experiment Name: At_Drought_Soil_Dry_P Parameter: Organism Value: A. thaliana
  misc_feature: MA Experiment 20001554 PARAMETER Experiment Name: At_Drought_Soil_Dry_P Parameter: Plant Line Value: WS
  misc_feature: MA Experiment 20001554 PARAMETER Experiment Name: At_Drought_Soil_Dry_P Parameter: Post Timepoint (hr) Value: None
  misc_feature: MA Experiment 20001554 PARAMETER Experiment Name: At_Drought_Soil_Dry_P Parameter: Post-Treatment Value: None
  misc_feature: MA Experiment 20001554 PARAMETER Experiment Name: At_Drought_Soil_Dry_P Parameter: Timepoint (day) Value: 7
  misc_feature: MA Experiment 20001554 PARAMETER Experiment Name: At_Drought_Soil_Dry_P Parameter: Treatment Value: Drought vs. No Drought
  misc_feature: MA Experiment ID: 20001555 Result: Up-regulated in Transcription
  misc_feature: MA Experiment 20001555 PARAMETER Experiment Name: At_Drought_Soil_Dry_P Parameter: Age (day) Value: 24
  misc_feature: MA Experiment 20001555 PARAMETER Experiment Name: At_Drought_Soil_Dry_P Parameter: Organism Value: A. thaliana
  misc_feature: MA Experiment 20001555 PARAMETER Experiment Name: At_Drought_Soil_Dry_P Parameter: Plant Line Value: WS
  misc_feature: MA Experiment 20001555 PARAMETER Experiment Name: At_Drought_Soil_Dry_P Parameter: Post Timepoint (hr) Value: None
  misc_feature: MA Experiment 20001555 PARAMETER Experiment Name: At_Drought_Soil_Dry_P Parameter: Post-Treatment Value: None
  misc_feature: MA Experiment 20001555 PARAMETER Experiment Name: At_Drought_Soil_Dry_P Parameter: Timepoint (day) Value: 10
  misc_feature: MA Experiment 20001555 PARAMETER Experiment Name: At_Drought_Soil_Dry_P Parameter: Treatment Value: Drought vs. No Drought
  misc_feature: MA Experiment ID: 20001556 Result: Up-regulated in Transcription
  misc_feature: MA Experiment 20001556 PARAMETER Experiment Name: At_Drought_Soil_Dry_P Parameter: Age (day) Value: 26
  misc_feature: MA Experiment 20001556 PARAMETER Experiment Name: At_Drought_Soil_Dry_P Parameter: Organism Value: A. thaliana
  misc_feature: MA Experiment 20001556 PARAMETER Experiment Name: At_Drought_Soil_Dry_P Parameter: Plant Line Value: WS
  misc_feature: MA Experiment 20001556 PARAMETER Experiment Name: At_Drought_Soil_Dry_P Parameter: Post Timepoint (hr) Value: None
  misc_feature: MA Experiment 20001556 PARAMETER Experiment Name: At_Drought_Soil_Dry_P Parameter: Post-Treatment Value: None
  misc_feature: MA Experiment 20001556 PARAMETER Experiment Name: At_Drought_Soil_Dry_P Parameter: Timepoint (day) Value: 12
  misc_feature: MA Experiment 20001556 PARAMETER Experiment Name: At_Drought_Soil_Dry_P Parameter: Treatment Value: Drought vs. No Drought
  misc_feature: MA Experiment ID: 20001559 Result: Up-regulated in Transcription
  misc_feature: MA Experiment 20001559 PARAMETER Experiment Name: At_Drought_Soil_Dry_P Parameter: Age (day) Value: 28
  misc_feature: MA Experiment 20001559 PARAMETER Experiment Name: At_Drought_Soil_Dry_P Parameter: Organism Value: A. thaliana
  misc_feature: MA Experiment 20001559 PARAMETER Experiment Name: At_Drought_Soil_Dry_P Parameter: Plant Line Value: WS
  misc_feature: MA Experiment 20001559 PARAMETER Experiment Name: At_Drought_Soil_Dry_P Parameter: Post Timepoint (hr) Value: 29
  misc_feature: MA Experiment 20001559 PARAMETER Experiment Name: At_Drought_Soil_Dry_P Parameter: Post-Treatment Value: Re-Water vs. No Drought
  misc_feature: MA Experiment 20001559 PARAMETER Experiment Name: At_Drought_Soil_Dry_P Parameter: Timepoint (day) Value: 14
  misc_feature: MA Experiment 20001559 PARAMETER Experiment Name: At_Drought_Soil_Dry_P Parameter: Treatment Value: Drought vs. No Drought
  misc_feature: MA Experiment ID: 20001560 Result: Up-regulated in Transcription
  misc_feature: MA Experiment 20001560 PARAMETER Experiment Name: At_Drought_Soil_Dry_P Parameter: Age (day) Value: 28
  misc_feature: MA Experiment 20001560 PARAMETER Experiment Name: At_Drought_Soil_Dry_P Parameter: Organism Value: A. thaliana
  misc_feature: MA Experiment 20001560 PARAMETER Experiment Name: At_Drought_Soil_Dry_P Parameter: Plant Line Value: WS
  misc_feature: MA Experiment 20001560 PARAMETER Experiment Name: At_Drought_Soil_Dry_P Parameter: Post Timepoint (hr) Value: None
  misc_feature: MA Experiment 20001560 PARAMETER Experiment Name: At_Drought_Soil_Dry_P Parameter: Post-Treatment Value: None
  misc_feature: MA Experiment 20001560 PARAMETER Experiment Name: At_Drought_Soil_Dry_P Parameter: Timepoint (day) Value: 14
  misc_feature: MA Experiment 20001560 PARAMETER Experiment Name: At_Drought_Soil_Dry_P Parameter: Treatment Value: Drought vs. No Drought
  misc_feature: MA Experiment ID: 20001757 Result: Up-regulated in Transcription
  misc_feature: MA Experiment 20001757 PARAMETER Experiment Name: At_50mM_NH4NO3_L-to-H_P Parameter: Timepoint (hr) Value: 6
  misc_feature: MA Experiment 20001757 PARAMETER Experiment Name: At_50mM_NH4NO3_L-to-H_P Parameter: Tissue Value: Leaf
  misc_feature: MA Experiment 20001757 PARAMETER Experiment Name: At_50mM_NH4NO3_L-to-H_P Parameter: Treatment Value: 50mM NH4NO3 vs 100mM Mannitol
  misc_feature: MA Experiment ID: 20001906 Result: Up-regulated in Transcription
  misc_feature: MA Experiment 20001906 PARAMETER Experiment Name: At_Drought_Reproduction_P Parameter: Age (day) Value: 35
  misc_feature: MA Experiment 20001906 PARAMETER Experiment Name: At_Drought_Reproduction_P Parameter: Organism Value: A. thaliana
  misc_feature: MA Experiment 20001906 PARAMETER Experiment Name: At_Drought_Reproduction_P Parameter: Plant Line Value: WS
  misc_feature: MA Experiment 20001906 PARAMETER Experiment Name: At_Drought_Reproduction_P Parameter: Timepoint (day) Value: 5
  misc_feature: MA Experiment 20001906 PARAMETER Experiment Name: At_Drought_Reproduction_P Parameter: Tissue Value: Siliques
  misc_feature: MA Experiment 20001906 PARAMETER Experiment Name: At_Drought_Reproduction_P Parameter: Treatment Value: Drought vs. No Drought
  misc_feature: MA Experiment ID: 20001908 Result: Up-regulated in Transcription
  misc_feature: MA Experiment 20001908 PARAMETER Experiment Name: At_Drought_Reproduction_P Parameter: Age (day) Value: 40
  misc_feature: MA Experiment 20001908 PARAMETER Experiment Name: At_Drought_Reproduction_P Parameter: Organism Value: A. thaliana
  misc_feature: MA Experiment 20001908 PARAMETER Experiment Name: At_Drought_Reproduction_P Parameter: Plant Line Value: WS
  misc_feature: MA Experiment 20001908 PARAMETER Experiment Name: At_Drought_Reproduction_P Parameter: Timepoint (day) Value: 10
  misc_feature: MA Experiment 20001908 PARAMETER Experiment Name: At_Drought_Reproduction_P Parameter: Tissue Value: Siliques
  misc_feature: MA Experiment 20001908 PARAMETER Experiment Name: At_Drought_Reproduction_P Parameter: Treatment Value: Drought vs. No Drought
gatgacataccaaaagcaataccaaatgcaaacacaccacatgcagcaacaacaactccatcacttcgtctttgtccacggctcatgtcatggagcatggtgctggttcaaactagctgcaaagctcaagctcgatggtcaccgtgtgacagctatcgaccttggtggctccggtgtcgacacgaggcagctccatgaggttcgtttggtgtcggcgtatctagagcctttgatgagtttcatggagtctctccctgaaaacgagaaagtggttcttgttggtcatagctatggtggcattggaacttctcttgctatggaaaggtttccgaccaaagtctctgtcggaatcttcctctctgcttacatgccgcaccatgactctcctccggcggttttgattcaagagtattttacgagactaccagagggtttcgctatggactgtgagtttacattcgaggaaggattagaacacccaccaagttcagttttgttcggtactagtttcttgaaggagaaggcatatagtaattgccagttagaggatctagaattagccatggcgttgatgaaaccaagctagttatacactaaggaaatgggaggtgaagatctgataacaaaggagaggtatggatctgggaagagagtgtttattgtctgtgaaggcgacaatgtggttccagaggagattcagaagtggatgattagtaactacgagcctcacgaagttaagcggattgaagaagctggtcacatggctatgctcactaagcctcatgaactttctcaactgctacaagaaatagcagcgaaatataactaaatgtaaaatgatgacacctgtgtatgatttgggctcagttacatctatgatatgaataagagagtttcaatatttgtg

SEQ ID NO: 21506 - protein, 194 aa, Arabidopsis thaliana
  peptide (1)..(194): Ceres Seq. ID no. 13580584
  misc_feature (47)..(194): Pfam Name: alpha/beta hydrolase fold Pfam Description: alpha/beta hydrolase fold
  misc_feature (15)..(194): Homolog of NCBI NO: 15227863 NR Description: hydrolase, alpha/beta fold family [Arabidopsis
  misc_feature (15)..(194): Homolog of NCBI NO: 21554666 NR Description: putative acetone-cyanohydrin lyase [Arabidopsis
  misc_feature (21)..(194): Homolog of NCBI NO: 40549303 NR Description: salicylic acid-binding protein 2 [Nicotiana
  misc_feature (15)..(194): Homolog of NCBI NO: 27754457 NR Description: putative acetone-cyanohydrin lyase [Arabidopsis
  misc_feature (21)..(194): Homolog of NCBI NO: 14279437 NR Description: ethylene-induced esterase [Citrus sinensis]
  misc_feature (15)..(194): Homolog of NCBI NO: 15227865 NR Description: esterase, putative [Arabidopsis thaliana]
  misc_feature (17)..(194): Homolog of NCBI NO: 6651393 NR Description: polyneuridine aldehyde esterase [Rauvolfia
  misc_feature (15)..(194): Homolog of NCBI NO: 15227867 NR Description: esterase, putative [Arabidopsis thaliana]
  misc_feature (14)..(194): Homolog of NCBI NO: 11358112 NR Description: hypothetical protein T20E23.40 - Arabidopsis
  misc_feature (1)..(194): Homolog of NCBI NO: 30693313 NR Description: hydrolase, alpha/beta fold family [Arabidopsis
MTYQKQYQMQTHHMQQQQLHHFVFVHGSCHGAWCWFKLAAKLKLDGHRVTAIDLGGSGVDTRQLHEVRLVSAYLEPLMSFMESLPENEKVVLVGHSYGGIGTSLAMERFPTKVSVGIFLSAYMPHHDSPPAVLIQEYFTRLPEGFAMDCEFTFEEGLEHPPSSVLFGTSFLKEKAYSNCQLEDLELAMALMKPS

SEQ ID NO: 21507 - protein, 186 aa, Arabidopsis thaliana
  peptide (1)..(186): Ceres Seq. ID no. 13580585
  misc_feature (39)..(186): Pfam Name: alpha/beta hydrolase fold Pfam Description: alpha/beta hydrolase fold
  misc_feature (9)..(186): Homolog of NCBI NO: 6651393 NR Description: polyneuridine aldehyde esterase [Rauvolfia
  misc_feature (13)..(186): Homolog of NCBI NO: 14279437 NR Description: ethylene-induced esterase [Citrus sinensis]
  misc_feature (7)..(186): Homolog of NCBI NO: 15227865 NR Description: esterase, putative [Arabidopsis thaliana]
  misc_feature (7)..(186): Homolog of NCBI NO: 15227863 NR Description: hydrolase, alpha/beta fold family [Arabidopsis
  misc_feature (7)..(186): Homolog of NCBI NO: 21554666 NR Description: putative acetone-cyanohydrin lyase [Arabidopsis
  misc_feature (13)..(186): Homolog of NCBI NO: 40549303 NR Description: salicylic acid-binding protein 2 [Nicotiana
  misc_feature (7)..(186): Homolog of NCBI NO: 27754457 NR Description: putative acetone-cyanohydrin lyase [Arabidopsis
  misc_feature (7)..(186): Homolog of NCBI NO: 15227867 NR Description: esterase, putative [Arabidopsis thaliana]
  misc_feature (6)..(186): Homolog of NCBI NO: 11358112 NR Description: hypothetical protein T20E23.40 - Arabidopsis
  misc_feature (1)..(186): Homolog of NCBI NO: 30693313 NR Description: hydrolase, alpha/beta fold family [Arabidopsis
MQTHHMQQQQLHHFVFVHGSCHGAWCWFKLAAKLKLDGHRVTAIDLGGSGVDTRQLHEVRLVSAYLEPLMSFMESLPENEKVVLVGHSYGGIGTSLAMERFPTKVSVGIFLSAYMPHHDSPPAVLIQEYFTRLPEGFAMDCEFTFEEGLEHPPSSVLFGTSFLKEKAYSNCQLEDLELAMALMKPS

SEQ ID NO: 21508 - protein, 181 aa, Arabidopsis thaliana
  peptide (1)..(181): Ceres Seq. ID no. 13580586
  misc_feature (34)..(181): Pfam Name: alpha/beta hydrolase fold Pfam Description: alpha/beta hydrolase fold
  misc_feature (4)..(181): Homolog of NCBI NO: 6651393 NR Description: polyneuridine aldehyde esterase [Rauvolfia
  misc_feature (8)..(181): Homolog of NCBI NO: 14279437 NR Description: ethylene-induced esterase [Citrus sinensis]
  misc_feature (2)..(181): Homolog of NCBI NO: 15227865 NR Description: esterase, putative [Arabidopsis thaliana]
  misc_feature (2)..(181): Homolog of NCBI NO: 15227863 NR Description: hydrolase, alpha/beta fold family [Arabidopsis
  misc_feature (2)..(181): Homolog of NCBI NO: 21554666 NR Description: putative acetone-cyanohydrin lyase [Arabidopsis
  misc_feature (8)..(181): Homolog of NCBI NO: 40549303 NR Description: salicylic acid-binding protein 2 [Nicotiana
  misc_feature (2)..(181): Homolog of NCBI NO: 27754457 NR Description: putative acetone-cyanohydrin lyase [Arabidopsis
  misc_feature (2)..(181): Homolog of NCBI NO: 15227867 NR Description: esterase, putative [Arabidopsis thaliana]
  misc_feature (1)..(181): Homolog of NCBI NO: 11358112 NR Description: hypothetical protein T20E23.40 - Arabidopsis
  misc_feature (1)..(181): Homolog of NCBI NO: 30693313 NR Description: hydrolase, alpha/beta fold family [Arabidopsis
MQQQQLHHFVFVHGSCHGAWCWFKLAAKLKLDGHRVTAIDLGGSGVDTRQLHEVRLVSAYLEPLMSFMESLPENEKVVLVGHSYGGIGTSLAMERFPTKVSVGIFLSAYMPHHDSPPAVLIQEYFTRLPEGFAMDCEFTFEEGLEHPPSSVLFGTSFLKEKAYSNCQLEDLELAMALMKPS

SEQ ID NO: 21509 - DNA, 688 bp, Arabidopsis thaliana
  misc_feature (1)..(688): Ceres Seq. ID no. 12420591
  misc_feature: MA Experiment ID: 20000169 Result: Up-regulated in Transcription
  misc_feature: MA Experiment 20000169 PARAMETER Experiment Name: At_100uM_ABA_P Parameter: Age (day) Value: 14
  misc_feature: MA Experiment 20000169 PARAMETER Experiment Name: At_100uM_ABA_P Parameter: Organism Value: A. thaliana
  misc_feature: MA Experiment 20000169 PARAMETER Experiment Name: At_100uM_ABA_P Parameter: Plant Line Value: WS
  misc_feature: MA Experiment 20000169 PARAMETER Experiment Name: At_100uM_ABA_P Parameter: Timepoint (hr) Value: 6
  misc_feature: MA Experiment 20000169 PARAMETER Experiment Name: At_100uM_ABA_P Parameter: Tissue Value: Aerial
  misc_feature: MA Experiment 20000169 PARAMETER Experiment Name: At_100uM_ABA_P Parameter: Treatment Value: 100uM ABA vs. No Treatment
  misc_feature: MA Experiment ID: 20000171 Result: Up-regulated in Transcription
  misc_feature: MA Experiment 20000171 PARAMETER Experiment Name: At_42deg_Heat_P Parameter: Age (day) Value: 14
  misc_feature: MA Experiment 20000171 PARAMETER Experiment Name: At_42deg_Heat_P Parameter: Organism Value: A. thaliana
  misc_feature: MA Experiment 20000171 PARAMETER Experiment Name: At_42deg_Heat_P Parameter: Plant Line Value: WS
  misc_feature: MA Experiment 20000171 PARAMETER Experiment Name: At_42deg_Heat_P Parameter: Temperature (deg C) Value: 42 vs. 22
  misc_feature: MA Experiment 20000171 PARAMETER Experiment Name: At_42deg_Heat_P Parameter: Timepoint (hr) Value: 1
  misc_feature: MA Experiment 20000171 PARAMETER Experiment Name: At_42deg_Heat_P Parameter: Tissue Value: Aerial
  misc_feature: MA Experiment ID: 20000179 Result: Up-regulated in Transcription
  misc_feature: MA Experiment 20000179 PARAMETER Experiment Name: At_Germinating_Seeds_P Parameter: Age (hr) Value: 6 vs. 0
  misc_feature: MA Experiment 20000179 PARAMETER Experiment Name: At_Germinating_Seeds_P Parameter: Tissue Value: Germinating Seeds
  misc_feature: MA Experiment ID: 20000214 Result: Down-regulated in Transcription
  misc_feature: MA Experiment 20000214 PARAMETER Experiment Name: At_4deg_Cold_P Parameter: Timepoint (hr) Value: 6
  misc_feature: MA Experiment ID: 20000227 Result: Down-regulated in Transcription
  misc_feature: MA Experiment 20000227 PARAMETER Experiment Name: At_Root-Tips-vs-Tops_P Parameter: Tissue Value: Root Tips vs. Root Tops
  misc_feature: MA Experiment ID: 20000234 Result: Down-regulated in Transcription
  misc_feature: MA Experiment 20000234 PARAMETER Experiment Name: At_Siliques_P Parameter: Age (day) Value: 21
  misc_feature: MA Experiment 20000234 PARAMETER Experiment Name: At_Siliques_P Parameter: Organism Value: A. thaliana
  misc_feature: MA Experiment 20000234 PARAMETER Experiment Name: At_Siliques_P Parameter: Plant Line Value: WS
  misc_feature: MA Experiment 20000234 PARAMETER Experiment Name: At_Siliques_P Parameter: Tissue Value: Less Than 5mm Siliques vs. Whole Plant
  misc_feature: MA Experiment ID: 20000267 Result: Up-regulated in Transcription
  misc_feature: MA Experiment 20000267 PARAMETER Experiment Name: At_Drought_P Parameter: Age (day) Value: 7
  misc_feature: MA Experiment 20000267 PARAMETER Experiment Name: At_Drought_P Parameter: Organism Value: A. thaliana
  misc_feature: MA Experiment 20000267 PARAMETER Experiment Name: At_Drought_P Parameter: Plant Line Value: WS
  misc_feature: MA Experiment 20000267 PARAMETER Experiment Name: At_Drought_P Parameter: Timepoint (hr) Value: 6
  misc_feature: MA Experiment 20000267 PARAMETER Experiment Name: At_Drought_P Parameter: Tissue Value: Whole Plant
  misc_feature: MA Experiment 20000267 PARAMETER Experiment Name: At_Drought_P Parameter: Treatment Value: Drought vs. No Drought
  misc_feature: MA Experiment ID: 20000286 Result: Down-regulated in Transcription
  misc_feature: MA Experiment 20000286 PARAMETER Experiment Name: At_Open_Flower_P Parameter: Age (day) Value: 21
  misc_feature: MA Experiment 20000286 PARAMETER Experiment Name: At_Open_Flower_P Parameter: Plant Line Value: WS
  misc_feature: MA Experiment 20000286 PARAMETER Experiment Name: At_Open_Flower_P Parameter: Tissue Value: Half Open vs. Whole Plant
  misc_feature: MA Experiment ID: 20000437 Result: Up-regulated in Transcription
  misc_feature: MA Experiment 20000437 PARAMETER Experiment Name: At_Drought_P Parameter: Age (day) Value: 8
  misc_feature: MA Experiment 20000437 PARAMETER Experiment Name: At_Drought_P Parameter: Organism Value: A. thaliana
  misc_feature: MA Experiment 20000437 PARAMETER Experiment Name: At_Drought_P Parameter: Plant Line Value: WS
  misc_feature: MA Experiment 20000437 PARAMETER Experiment Name: At_Drought_P Parameter: Timepoint (hr) Value: 24
  misc_feature: MA Experiment 20000437 PARAMETER Experiment Name: At_Drought_P Parameter: Tissue Value: Whole Plant
  misc_feature: MA Experiment 20000437 PARAMETER Experiment Name: At_Drought_P Parameter: Treatment Value: Drought vs. No Drought
  misc_feature: MA Experiment ID: 20000453 Result: Up-regulated in Transcription
  misc_feature: MA Experiment 20000453 PARAMETER Experiment Name: At_100uM_ABA_P Parameter: Age (day) Value: 15
  misc_feature: MA Experiment 20000453 PARAMETER Experiment Name: At_100uM_ABA_P Parameter: Organism Value: A. thaliana
  misc_feature: MA Experiment 20000453 PARAMETER Experiment Name: At_100uM_ABA_P Parameter: Plant Line Value: WS
  misc_feature: MA Experiment 20000453 PARAMETER Experiment Name: At_100uM_ABA_P Parameter: Timepoint (hr) Value: 24
  misc_feature: MA Experiment 20000453 PARAMETER Experiment Name: At_100uM_ABA_P Parameter: Tissue Value: Aerial
  misc_feature: MA Experiment 20000453 PARAMETER Experiment Name: At_100uM_ABA_P Parameter: Treatment Value: 100uM ABA vs. No Treatment
  misc_feature: MA Experiment ID: 20000794 Result: Down-regulated in Transcription
  misc_feature: MA Experiment 20000794 PARAMETER Experiment Name: At_Petals_P Parameter: Age (day) Value: 23-25 days
  misc_feature: MA Experiment 20000794 PARAMETER Experiment Name: At_Petals_P Parameter: Plant Line Value: WS
  misc_feature: MA Experiment 20000794 PARAMETER Experiment Name: At_Petals_P Parameter: Tissue Value: Petals vs. Whole plant
  misc_feature: MA Experiment ID: 20001459 Result: Down-regulated in Transcription
  misc_feature: MA Experiment 20001459 PARAMETER Experiment Name: At_50mM_NH4NO3_L-to-H_P Parameter: Age (day) Value: Undefined
  misc_feature: MA Experiment 20001459 PARAMETER Experiment Name: At_50mM_NH4NO3_L-to-H_P Parameter: Organism Value: Undefined
  misc_feature: MA Experiment 20001459 PARAMETER Experiment Name: At_50mM_NH4NO3_L-to-H_P Parameter: Plant Line Value: Undefined
  misc_feature: MA Experiment 20001459 PARAMETER Experiment Name: At_50mM_NH4NO3_L-to-H_P Parameter: Timepoint (hr) Value: 4
  misc_feature: MA Experiment 20001459 PARAMETER Experiment Name: At_50mM_NH4NO3_L-to-H_P Parameter: Tissue Value: Siliques
  misc_feature: MA Experiment 20001459 PARAMETER Experiment Name: At_50mM_NH4NO3_L-to-H_P Parameter: Treatment Value: 50mM NH4NO3 vs. 100mM Manitol
  misc_feature: MA Experiment ID: 20001554 Result: Up-regulated in Transcription
  misc_feature: MA Experiment 20001554 PARAMETER Experiment Name: At_Drought_Soil_Dry_P Parameter: Age (day) Value: 21
  misc_feature: MA Experiment 20001554 PARAMETER Experiment Name: At_Drought_Soil_Dry_P Parameter: Organism Value: A. thaliana
  misc_feature: MA Experiment 20001554 PARAMETER Experiment Name: At_Drought_Soil_Dry_P Parameter: Plant Line Value: WS
  misc_feature: MA Experiment 20001554 PARAMETER Experiment Name: At_Drought_Soil_Dry_P Parameter: Post Timepoint (hr) Value: None
  misc_feature: MA Experiment 20001554 PARAMETER Experiment Name: At_Drought_Soil_Dry_P Parameter: Post-Treatment Value: None
  misc_feature: MA Experiment 20001554 PARAMETER Experiment Name: At_Drought_Soil_Dry_P Parameter: Timepoint (day) Value: 7
  misc_feature: MA Experiment 20001554 PARAMETER Experiment Name: At_Drought_Soil_Dry_P Parameter: Treatment Value: Drought vs. No Drought
  misc_feature: MA Experiment ID: 20001555 Result: Up-regulated in Transcription
  misc_feature: MA Experiment 20001555 PARAMETER Experiment Name: At_Drought_Soil_Dry_P Parameter: Age (day) Value: 24
  misc_feature: MA Experiment 20001555 PARAMETER Experiment Name: At_Drought_Soil_Dry_P Parameter: Organism Value: A. thaliana
  misc_feature: MA Experiment 20001555 PARAMETER Experiment Name: At_Drought_Soil_Dry_P Parameter: Plant Line Value: WS
  misc_feature: MA Experiment 20001555 PARAMETER Experiment Name: At_Drought_Soil_Dry_P Parameter: Post Timepoint (hr) Value: None
  misc_feature: MA Experiment 20001555 PARAMETER Experiment Name: At_Drought_Soil_Dry_P Parameter: Post-Treatment Value: None
  misc_feature: MA Experiment 20001555 PARAMETER Experiment Name: At_Drought_Soil_Dry_P Parameter: Timepoint (day) Value: 10
  misc_feature: MA Experiment 20001555 PARAMETER Experiment Name: At_Drought_Soil_Dry_P Parameter: Treatment Value: Drought vs. No Drought
  misc_feature: MA Experiment ID: 20001556 Result: Up-regulated in Transcription
  misc_feature: MA Experiment 20001556 PARAMETER Experiment Name: At_Drought_Soil_Dry_P Parameter: Age (day) Value: 26
  misc_feature: MA Experiment 20001556 PARAMETER Experiment Name: At_Drought_Soil_Dry_P Parameter: Organism Value: A. thaliana
  misc_feature: MA Experiment 20001556 PARAMETER Experiment Name: At_Drought_Soil_Dry_P Parameter: Plant Line Value: WS
  misc_feature: MA Experiment 20001556 PARAMETER Experiment Name: At_Drought_Soil_Dry_P Parameter: Post Timepoint (hr) Value: None
  misc_feature: MA Experiment 20001556 PARAMETER Experiment Name: At_Drought_Soil_Dry_P Parameter: Post-Treatment Value: None
  misc_feature: MA Experiment 20001556 PARAMETER Experiment Name: At_Drought_Soil_Dry_P Parameter: Timepoint (day) Value: 12
  misc_feature: MA Experiment 20001556 PARAMETER Experiment Name: At_Drought_Soil_Dry_P Parameter: Treatment Value: Drought vs. No Drought
  misc_feature: MA Experiment ID: 20001557 Result: Down-regulated in Transcription
  misc_feature: MA Experiment 20001557 PARAMETER Experiment Name: At_Drought_Soil_Dry_P Parameter: Age (day) Value: 27
  misc_feature: MA Experiment 20001557 PARAMETER Experiment Name: At_Drought_Soil_Dry_P Parameter: Organism Value: A. thaliana
  misc_feature: MA Experiment 20001557 PARAMETER Experiment Name: At_Drought_Soil_Dry_P Parameter: Plant Line Value: WS
  misc_feature: MA Experiment 20001557 PARAMETER Experiment Name: At_Drought_Soil_Dry_P Parameter: Post Timepoint (hr) Value: 3
  misc_feature: MA Experiment 20001557 PARAMETER Experiment Name: At_Drought_Soil_Dry_P Parameter: Post-Treatment Value: Re-Water vs. No Drought
  misc_feature: MA Experiment 20001557 PARAMETER Experiment Name: At_Drought_Soil_Dry_P Parameter: Timepoint (day) Value: 13
  misc_feature: MA Experiment 20001557 PARAMETER Experiment Name: At_Drought_Soil_Dry_P Parameter: Treatment Value: Drought vs. No Drought
  misc_feature: MA Experiment ID: 20001558 Result: Down-regulated in Transcription
  misc_feature: MA Experiment 20001558 PARAMETER Experiment Name: At_Drought_Soil_Dry_P Parameter: Age (day) Value: 27
  misc_feature: MA Experiment 20001558 PARAMETER Experiment Name: At_Drought_Soil_Dry_P Parameter: Organism Value: A. thaliana
  misc_feature: MA Experiment 20001558 PARAMETER Experiment Name: At_Drought_Soil_Dry_P Parameter: Plant Line Value: WS
  misc_feature: MA Experiment 20001558 PARAMETER Experiment Name: At_Drought_Soil_Dry_P Parameter: Post Timepoint (hr) Value: 6
  misc_feature: MA Experiment 20001558 PARAMETER Experiment Name: At_Drought_Soil_Dry_P Parameter: Post-Treatment Value: Re-Water vs. No Drought
  misc_feature: MA Experiment 20001558 PARAMETER Experiment Name: At_Drought_Soil_Dry_P Parameter: Timepoint (day) Value: 13
  misc_feature: MA Experiment 20001558 PARAMETER Experiment Name: At_Drought_Soil_Dry_P Parameter: Treatment Value: Drought vs. No Drought
  misc_feature: MA Experiment ID: 20001560 Result: Down-regulated in Transcription
  misc_feature: MA Experiment 20001560 PARAMETER Experiment Name: At_Drought_Soil_Dry_P Parameter: Age (day) Value: 28
  misc_feature: MA Experiment 20001560 PARAMETER Experiment Name: At_Drought_Soil_Dry_P Parameter: Organism Value: A. thaliana
  misc_feature: MA Experiment 20001560 PARAMETER Experiment Name: At_Drought_Soil_Dry_P Parameter: Plant Line Value: WS
  misc_feature: MA Experiment 20001560 PARAMETER Experiment Name: At_Drought_Soil_Dry_P Parameter: Post Timepoint (hr) Value: None
  misc_feature: MA Experiment 20001560 PARAMETER Experiment Name: At_Drought_Soil_Dry_P Parameter: Post-Treatment Value: None
  misc_feature: MA Experiment 20001560 PARAMETER Experiment Name: At_Drought_Soil_Dry_P Parameter: Timepoint (day) Value: 14
  misc_feature: MA Experiment 20001560 PARAMETER Experiment Name: At_Drought_Soil_Dry_P Parameter: Treatment Value: Drought vs. No Drought
gagactcgctctaagacccagtttgactcgttgatcaacgaaagtgtgagtttgaggtgaaagatgacggcgacgatagatcggaggttatcaacgctgaatccaaacgcgccggtgtttgatccggtggaatttcgtgaggtggaggatttttcaccgaaatggtgggatctagtaacgacttcgaaatggttccgtgacttttggctcagtgctaactctgagaatgagttcctcggcggcgacgatttctcagttatggaagaagagttcgaggagatgatcgcatcgtctgatggtggatccatggctgatacagttacagaagcagatgtggctagttatttgaagatgcttttgaacatagcggagtctacgaaagagaagatttatagatcgaaggtttcgtcttgttcaccaaagtataatcagaagaagtacatgaatccgaactttaattgtcgccggaatcatcatatctatcagccacggtgaagcttctagaaggaacaaagctcttcttcttcttctttcgagatgataatcagagtcgtgtctgtgtttatggctgaatctgatcttttctgctttcttgttttttgtaattctgtgaatattcctactttctataataacatcactttatgttatgagcataaccaaattgaaatcgaaccaggtcgaatcc

SEQ ID NO: 21510 - protein, 143 aa, Arabidopsis thaliana
  peptide (1)..(143): Ceres Seq. ID no. 12420592
  misc_feature (9)..(91): Homolog of NCBI NO: 34899128 NR Description: P0496C02.30 [Oryza sativa (japonica
  misc_feature (9)..(91): Homolog of NCBI NO: 34395186 NR Description: unknown protein [Oryza sativa (japonica
  misc_feature (3)..(63): Homolog of NCBI NO: 21592689 NR Description: ERD15 protein [Arabidopsis thaliana]
  misc_feature (3)..(71): Homolog of NCBI NO: 15227351 NR Description: ERD15 protein
  misc_feature (10)..(110): Homolog of NCBI NO: 8489786 NR Description: dehydration-induced protein ERD15 [Lycopersicon
  misc_feature (1)..(124): Homolog of NCBI NO: 7485087 NR Description: hypothetical protein - Arabidopsis thaliana
  misc_feature (1)..(143): Homolog of NCBI NO: 21592596 NR Description: unknown [Arabidopsis thaliana]
  misc_feature (1)..(143): Homolog of NCBI NO: 18414176 NR Description: Expressed protein
MTATIDRRLSTLNPNAPVFDPVEFREVEDFSPKWWDLVTTSKWFRDFWLSANSENEFLGGDDFSVMEEEFEEMIASSDGGSMADTVTEADVASYLKMLLNIAESTKEKIYRSKVSSCSPKYNQKKYMNPNFNCRRNHHIYQPR

SEQ ID NO: 21511 - protein, 78 aa, Arabidopsis thaliana
  peptide (1)..(78): Ceres Seq. ID no. 12420593
  misc_feature (1)..(26): Homolog of NCBI NO: 34899128 NR Description: P0496C02.30 [Oryza sativa (japonica
  misc_feature (1)..(26): Homolog of NCBI NO: 34395186 NR Description: unknown protein [Oryza sativa (japonica
  misc_feature (1)..(45): Homolog of NCBI NO: 8489786 NR Description: dehydration-induced protein ERD15 [Lycopersicon
  misc_feature (1)..(59): Homolog of NCBI NO: 7485087 NR Description: hypothetical protein - Arabidopsis thaliana
  misc_feature (1)..(78): Homolog of NCBI NO: 21592596 NR Description: unknown [Arabidopsis thaliana]
  misc_feature (1)..(78): Homolog of NCBI NO: 18414176 NR Description: Expressed protein
MEEEFEEMIASSDGGSMADTVTEADVASYLKMLLNIAESTKEKIYRSKVSSCSPKYNQKKYMNPNFNCRRNHHIYQPR

SEQ ID NO: 21512 - protein, 71 aa, Arabidopsis thaliana
  peptide (1)..(71): Ceres Seq. ID no. 12420594
  misc_feature (1)..(19): Homolog of NCBI NO: 34899128 NR Description: P0496C02.30 [Oryza sativa (japonica
  misc_feature (1)..(19): Homolog of NCBI NO: 34395186 NR Description: unknown protein [Oryza sativa (japonica
  misc_feature (1)..(38): Homolog of NCBI NO: 8489786 NR Description: dehydration-induced protein ERD15 [Lycopersicon
  misc_feature (1)..(52): Homolog of NCBI NO: 7485087 NR Description: hypothetical protein - Arabidopsis thaliana
  misc_feature (1)..(71): Homolog of NCBI NO: 21592596 NR Description: unknown [Arabidopsis thaliana]
  misc_feature (1)..(71): Homolog of NCBI NO: 18414176 NR Description: Expressed protein
MIASSDGGSMADTVTEADVASYLKMLLNIAESTKEKIYRSKVSSCSPKYNQKKYMNPNFNCRRNHHIYQPR

SEQ ID NO: 21513 - DNA, 627 bp, Arabidopsis thaliana
  misc_feature (1)..(627): Ceres Seq. ID no. 13496961
  misc_feature: MA Experiment ID: 108434 Result: Up-regulated in Transcription
  misc_feature: MA Experiment 108434 PARAMETER Experiment Name: At_Root_Tips_cDNA_P Parameter: Tissue Value: Root Tips
  misc_feature: MA Experiment ID: 108462 Result: Down-regulated in Transcription
  misc_feature: MA Experiment 108462 PARAMETER Experiment Name: At_Germinating_Seeds_cDNA_P Parameter: Age (day) Value: 2 vs. 0
  misc_feature: MA Experiment 108462 PARAMETER Experiment Name: At_Germinating_Seeds_cDNA_P Parameter: Tissue Value: Germinating Seeds
  misc_feature: MA Experiment ID: 108463 Result: Down-regulated in Transcription
  misc_feature: MA Experiment 108463 PARAMETER Experiment Name: At_Germinating_Seeds_cDNA_P Parameter: Age (day) Value: 3 vs. 0
  misc_feature: MA Experiment 108463 PARAMETER Experiment Name: At_Germinating_Seeds_cDNA_P Parameter: Tissue Value: Germinating Seeds
  misc_feature: MA Experiment ID: 108573 Result: Down-regulated in Transcription
  misc_feature: MA Experiment 108573 PARAMETER Experiment Name: At_Drought_cDNA_P Parameter: Timepoint (hr) Value: 6
  misc_feature: MA Experiment 108573 PARAMETER Experiment Name: At_Drought_cDNA_P Parameter: Tissue Value: Aerial
  misc_feature: MA Experiment 108573 PARAMETER Experiment Name: At_Drought_cDNA_P Parameter: Treatment Value: Drought vs. No Drought
  misc_feature: MA Experiment ID: 20000113 Result: Down-regulated in Transcription
  misc_feature: MA Experiment 20000113 PARAMETER Experiment Name: At_42deg_Heat_cDNA_P Parameter: Temperature (deg C) Value: 42 vs. 22
  misc_feature: MA Experiment 20000113 PARAMETER Experiment Name: At_42deg_Heat_cDNA_P Parameter: Timepoint (hr) Value: 8
  misc_feature: MA Experiment 20000113 PARAMETER Experiment Name: At_42deg_Heat_cDNA_P Parameter: Tissue Value: Aerial
  misc_feature: MA Experiment ID: 20000180 Result: Down-regulated in Transcription
  misc_feature: MA Experiment 20000180 PARAMETER Experiment Name: At_Germinating_Seeds_P Parameter: Age (hr) Value: 24 vs. 0
  misc_feature: MA Experiment 20000180 PARAMETER Experiment Name: At_Germinating_Seeds_P Parameter: Tissue Value: Germinating Seeds
  misc_feature: MA Experiment ID: 20000184 Result: Up-regulated in Transcription
  misc_feature: MA Experiment 20000184 PARAMETER Experiment Name: At_Shoots__P Parameter: Age (day) Value: 7
  misc_feature: MA Experiment 20000184 PARAMETER Experiment Name: At_Shoots__P Parameter: Tissue Value: Shoots vs. Whole Plant
  misc_feature: MA Experiment ID: 20000437 Result: Down-regulated in Transcription
  misc_feature: MA Experiment 20000437 PARAMETER Experiment Name: At_Drought_P Parameter: Age (day) Value: 8
  misc_feature: MA Experiment 20000437 PARAMETER Experiment Name: At_Drought_P Parameter: Organism Value: A. thaliana
  misc_feature: MA Experiment 20000437 PARAMETER Experiment Name: At_Drought_P Parameter: Plant Line Value: WS
  misc_feature: MA Experiment 20000437 PARAMETER Experiment Name: At_Drought_P Parameter: Timepoint (hr) Value: 24
  misc_feature: MA Experiment 20000437 PARAMETER Experiment Name: At_Drought_P Parameter: Tissue Value: Whole Plant
  misc_feature: MA Experiment 20000437 PARAMETER Experiment Name: At_Drought_P Parameter: Treatment Value: Drought vs. No Drought
  misc_feature: MA Experiment ID: 20001558 Result: Up-regulated in Transcription
  misc_feature: MA Experiment 20001558 PARAMETER Experiment Name: At_Drought_Soil_Dry_P Parameter: Age (day) Value: 27
  misc_feature: MA Experiment 20001558 PARAMETER Experiment Name: At_Drought_Soil_Dry_P Parameter: Organism Value: A. thaliana
  misc_feature: MA Experiment 20001558 PARAMETER Experiment Name: At_Drought_Soil_Dry_P Parameter: Plant Line Value: WS
  misc_feature: MA Experiment 20001558 PARAMETER Experiment Name: At_Drought_Soil_Dry_P Parameter: Post Timepoint (hr) Value: 6
  misc_feature: MA Experiment 20001558 PARAMETER Experiment Name: At_Drought_Soil_Dry_P Parameter: Post-Treatment Value: Re-Water vs. No Drought
  misc_feature: MA Experiment 20001558 PARAMETER Experiment Name: At_Drought_Soil_Dry_P Parameter: Timepoint (day) Value: 13
  misc_feature: MA Experiment 20001558 PARAMETER Experiment Name: At_Drought_Soil_Dry_P Parameter: Treatment Value: Drought vs. No Drought
  misc_feature: MA Experiment ID: 20001757 Result: Up-regulated in Transcription
  misc_feature: MA Experiment 20001757 PARAMETER Experiment Name: At_50mM_NH4NO3_L-to-H_P Parameter: Timepoint (hr) Value: 6
  misc_feature: MA Experiment 20001757 PARAMETER Experiment Name: At_50mM_NH4NO3_L-to-H_P Parameter: Tissue Value: Leaf
  misc_feature: MA Experiment 20001757 PARAMETER Experiment Name: At_50mM_NH4NO3_L-to-H_P Parameter: Treatment Value: 50mM NH4NO3 vs 100mM Mannitol
attcttcaacagaattagggttacatgagcggactctatataaatctttttttgcctactacgagtcacaagtaagaagaaaaacatggagcaaacttttattatgatcaagcctgacggcgtccagagaggactcatcggtgaagtcatctgcagatttgagaagaagggtttcactttgaaaggtctgaagttgatcagtgtagagagatcttttgctgagaagcactacgaagacttatcttcaaagtctttcttcagtggacttgttgactacattgtatccggccctgttgttgctatgatctgggaaggaaagaatgttgtcttgaccggaagaaagatcattggagctaccaacccagcagcttctgagcctggaactatccgtggggactttgctattgacattggaaggaatgtgatccacggtagtgactctgtcgagagcgccagaaaggagattgctttgtggttccctgatggacctgtcaactggcagagcagcgttcacccttgggtctatgaaacttgatgatctgttgctttttcagtagtgtgttttctacattgcttgcttttgaacaagactgaaatattttaagttgaatttgattatccttctcc

SEQ ID NO: 21514 - protein, 149 aa, Arabidopsis thaliana
  peptide (1)..(149): Ceres Seq. ID no. 15223002
  misc_feature (2)..(138): Pfam Name: Nucleoside diphosphate kinase Pfam Description: Nucleoside diphosphate kinase
  misc_feature (1)..(148): Homolog of NCBI NO: 2498076 NR Description: NUCLEOSIDE DIPHOSPHATE KINASE (NDK) (NDP KINASE)
  misc_feature (1)..(149): Homolog of NCBI NO: 322551 NR Description: nucleoside-diphosphate kinase (EC 2.7.4.6) -
  misc_feature (2)..(148): Homolog of NCBI NO: 1346672 NR Description: Nucleoside diphosphate kinase I (NDK I) (NDP
  misc_feature (2)..(148): Homolog of NCBI NO: 1389640 NR Description: PNDKN1 [Pisum sativum]
  misc_feature (1)..(148): Homolog of NCBI NO: 19570344 NR Description: nucleoside diphosphate kinase 1 [Brassica rapa]
  misc_feature (7)..(149): Homolog of NCBI NO: 13899069 NR Description: Unknown protein [Arabidopsis thaliana]
  misc_feature (3)..(149): Homolog of NCBI NO: 322552 NR Description: nucleoside-diphosphate kinase (EC 2.7.4.6) -
  misc_feature (1)..(149): Homolog of NCBI NO: 730129 NR Description: Nucleoside diphosphate kinase I (NDK I) (NDP
  misc_feature (1)..(149): Homolog of NCBI NO: 18413214 NR Description: nucleoside-diphosphate kinase [Arabidopsis
MEQTFIMIKPDGVQRGLIGEVICRFEKKGFTLKGLKLISVERSFAEKHYEDLSSKSFFSGLVDYIVSGPVVAMIWEGKNVVLTGRKIIGATNPAASEPGTIRGDFAIDIGRNVIHGSDSVESARKEIALWFPDGPVNWQSSVHPWVYET

SEQ ID NO: 21515 - protein, 143 aa, Arabidopsis thaliana
  peptide (1)..(143): Ceres Seq. ID no. 15223003
  misc_feature (1)..(132): Pfam Name: Nucleoside diphosphate kinase Pfam Description: Nucleoside diphosphate kinase
  misc_feature (1)..(142): Homolog of NCBI NO: 2498076 NR Description: NUCLEOSIDE DIPHOSPHATE KINASE (NDK) (NDP KINASE)
  misc_feature (1)..(143): Homolog of NCBI NO: 322551 NR Description: nucleoside-diphosphate kinase (EC 2.7.4.6) -
  misc_feature (1)..(142): Homolog of NCBI NO: 1346672 NR Description: Nucleoside diphosphate kinase I (NDK I) (NDP
  misc_feature (1)..(142): Homolog of NCBI NO: 1389640 NR Description: PNDKN1 [Pisum sativum]
  misc_feature (1)..(142): Homolog of NCBI NO: 19570344 NR Description: nucleoside diphosphate kinase 1 [Brassica rapa]
  misc_feature (1)..(143): Homolog of NCBI NO: 13899069 NR Description: Unknown protein [Arabidopsis thaliana]
  misc_feature (1)..(143): Homolog of NCBI NO: 322552 NR Description: nucleoside-diphosphate kinase (EC 2.7.4.6) -
  misc_feature (1)..(143): Homolog of NCBI NO: 730129 NR Description: Nucleoside diphosphate kinase I (NDK I) (NDP
  misc_feature (1)..(143): Homolog of NCBI NO: 18413214 NR Description: nucleoside-diphosphate kinase [Arabidopsis
MIKPDGVQRGLIGEVICRFEKKGFTLKGLKLISVERSFAEKHYEDLSSKSFFSGLVDYIVSGPVVAMIWEGKNVVLTGRKIIGATNPAASEPGTIRGDFAIDIGRNVIHGSDSVESARKEIALWFPDGPVNWQSSVHPWVYET

SEQ ID NO: 21516 - protein, 77 aa, Arabidopsis thaliana
  peptide (1)..(77): Ceres Seq. ID no. 15223004
  misc_feature (1)..(66): Pfam Name: Nucleoside diphosphate kinase Pfam Description: Nucleoside diphosphate kinase
  misc_feature (1)..(76): Homolog of NCBI NO: 2498076 NR Description: NUCLEOSIDE DIPHOSPHATE KINASE (NDK) (NDP KINASE)
  misc_feature (1)..(77): Homolog of NCBI NO: 322551 NR Description: nucleoside-diphosphate kinase (EC 2.7.4.6) -
  misc_feature (1)..(76): Homolog of NCBI NO: 1346672 NR Description: Nucleoside diphosphate kinase I (NDK I) (NDP
  misc_feature (1)..(76): Homolog of NCBI NO: 1389640 NR Description: PNDKN1 [Pisum sativum]
  misc_feature (1)..(76): Homolog of NCBI NO: 19570344 NR Description: nucleoside diphosphate kinase 1 [Brassica rapa]
  misc_feature (1)..(77): Homolog of NCBI NO: 13899069 NR Description: Unknown protein [Arabidopsis thaliana]
  misc_feature (1)..(77): Homolog of NCBI NO: 322552 NR Description: nucleoside-diphosphate kinase (EC 2.7.4.6) -
  misc_feature (1)..(77): Homolog of NCBI NO: 730129 NR Description: Nucleoside diphosphate kinase I (NDK I) (NDP
  misc_feature (1)..(77): Homolog of NCBI NO: 18413214 NR Description: nucleoside-diphosphate kinase [Arabidopsis
MIWEGKNVVLTGRKIIGATNPAASEPGTIRGDFAIDIGRNVIHGSDSVESARKEIALWFPDGPVNWQSSVHPWVYET

SEQ ID NO: 21517 - DNA, 1683 bp, Arabidopsis thaliana
  misc_feature (1)..(1683): Ceres Seq. ID no. 13621954
  misc_feature: MA Experiment ID: 108434 Result: Up-regulated in Transcription
  misc_feature: MA Experiment 108434 PARAMETER Experiment Name: At_Root_Tips_cDNA_P Parameter: Tissue Value: Root Tips
  misc_feature: MA Experiment ID: 108461 Result: Down-regulated in Transcription
  misc_feature: MA Experiment 108461 PARAMETER Experiment Name: At_Germinating_Seeds_cDNA_P Parameter: Age (day) Value: 1 vs. 0
  misc_feature: MA Experiment 108461 PARAMETER Experiment Name: At_Germinating_Seeds_cDNA_P Parameter: Tissue Value: Germinating Seeds
  misc_feature: MA Experiment ID: 108462 Result: Down-regulated in Transcription
  misc_feature: MA Experiment 108462 PARAMETER Experiment Name: At_Germinating_Seeds_cDNA_P Parameter: Age (day) Value: 2 vs. 0
  misc_feature: MA Experiment 108462 PARAMETER Experiment Name: At_Germinating_Seeds_cDNA_P Parameter: Tissue Value: Germinating Seeds
  misc_feature: MA Experiment ID: 108464 Result: Down-regulated in Transcription
  misc_feature: MA Experiment 108464 PARAMETER Experiment Name: At_Germinating_Seeds_cDNA_P Parameter: Age (day) Value: 4 vs. 0
  misc_feature: MA Experiment 108464 PARAMETER Experiment Name: At_Germinating_Seeds_cDNA_P Parameter: Tissue Value: Germinating Seeds
  misc_feature: MA Experiment ID: 108573 Result: Up-regulated in Transcription
  misc_feature: MA Experiment 108573 PARAMETER Experiment Name: At_Drought_cDNA_P Parameter: Timepoint (hr) Value: 6
  misc_feature: MA Experiment 108573 PARAMETER Experiment Name: At_Drought_cDNA_P Parameter: Tissue Value: Aerial
  misc_feature: MA Experiment 108573 PARAMETER Experiment Name: At_Drought_cDNA_P Parameter: Treatment Value: Drought vs. No Drought
  misc_feature: MA Experiment ID: 108595 Result: Down-regulated in Transcription
  misc_feature: MA Experiment 108595 PARAMETER Experiment Name: At_Ler-pi_Ovule_cDNA_P Parameter: Plant Line Value: null
aaaatctatcaagggtttgccgtacaaaggtatcggaggagagagtaaagggtaaacaaaagagagactggtttacttcttcttcgtgtgcgtgtagctttttcctgcgattctcatcgagttttggttagtgctttgttatcaaggtgaaaatcgatttgaagatggcgagcgaaagtcctgatgttgctgttgtagctccggtggtggagaatggcggcgctgagtcctctaatggtaaagaggaacaattggaatctgagctttcgaagaagcttgagattgcagaagatggtcaagaggagaacgatggagaagaaggaagcaaagctgagacttcaacgaagaagaagaagaagaaaaataaaagcaagaagaagaaggaactccctcaacagactgatccaccttcaattcctgtcgttgagctcttcccatcaggagagtttcctgaaggtgaaatccaagagtataaggatgataatctttggagaacaacatctgaagagaagagagagctggagcgttttgaaaagccaatatataactctgttcgccgagctgcagaagttcatcgccaggttcgtaaatatgtcagaagcatagtgaagcctggaatgttgatgactgatatatgtgagaccctagagaatactgttcgtaagttgatatcagagaatggtcttcaagctggtattgcattccctacaggatgctctttgaattgggtcgctgctcattggacaccaaactctggagataagactgtacttcagtacgacgatgttatgaaattggactttggaacacatattgatgggcatattattgactgtgcatttacagttgccttcaaccctatgttcgatcctctcttagcagcctctcgtgaagctacgtataccggtatcaaggaagctgggatcgatgtccgtctctgtgatatcggtgctgctattcaggaggtcatggagtcttatgaggttgaaatcaacggaaaggtcttccaagttaaaagtatccgaaacttgaatggtcacagcattggaccctatcagatacatgctgggaaatctgttcctatcgtaaaaggaggcgagcagacaaagatggaagagggcgagttttatgccatcgaaacatttggatcaaccgggaaaggatatgtgagagaagacctagaatgtagccattacatgaagaactttgacgctggccacgtccccttgaggttgcctagagcaaaacaactccttgcaaccattaacaagaatttctcgactctcgccttctgcagacgttatttggaccgcattggtgaaaccaaatacttaatggctctaaagaatctttgtgactctggcattgttcagccgtatcctcctctgtgtgatgtgaaaggaagctatgtatcacagtttgaacacaccattttactgcgacctacttgcaaagaagttctctccaagggagacgactactgattcagatcctctgttttgctctgtttacctttatcatctcatactgttgtcgagattgtacacttgcttgtttcttttgtcgtcgttaacacaagctttgaatccttttataaaaagcttcagtgcctctgttaaaaaaaaactatgtatttgccatgaacatgaatttgctcatcaatcttactagaagttgattgat

SEQ ID NO: 21518 - protein, 439 aa, Arabidopsis thaliana
  peptide (1)..(439): Ceres Seq. ID no. 13621955
  misc_feature (19)..(439): Homolog of NCBI NO: 1703275 NR Description: Methionine aminopeptidase 2 (MetAP 2) (Peptidase
  misc_feature (30)..(439): Homolog of NCBI NO: 9789873 NR Description: methionine aminopeptidase 2
  misc_feature (28)..(439): Homolog of NCBI NO: 27694969 NR Description: Similar to methionine aminopeptidase 2 [Xenopus
  misc_feature (59)..(439): Homolog of NCBI NO: 38636687 NR Description: putative methionyl aminopeptidase (EC 3.4.11.18)
  misc_feature (16)..(439): Homolog of NCBI NO: 7435570 NR Description: methionyl aminopeptidase (EC 3.4.11.18) F6E13.31
  misc_feature (1)..(439): Homolog of NCBI NO: 18406472 NR Description: methionine aminopeptidase -related [Arabidopsis
  misc_feature (1)..(439): Homolog of NCBI NO: 11320962 NR Description: methionine aminopeptidase-like protein
  misc_feature (1)..(439): Homolog of NCBI NO: 11264654 NR Description: hypothetical protein F24G16.260 - Arabidopsis
  misc_feature (1)..(439): Homolog of NCBI NO: 17473819 NR Description: putative protein [Arabidopsis thaliana]
  misc_feature (1)..(439): Homolog of NCBI NO: 18411408 NR Description: methionine aminopeptidase 2 -related [Arabidopsis
MASESPDVAVVAPVVENGGAESSNGKEEQLESELSKKLEIAEDGQEENDGEEGSKAETSTKKKKKKNKSKKKKELPQQTDPPSIPVVELFPSGEFPEGEIQEYKDDNLWRTTSEEKRELERFEKPIYNSVRRAAEVHRQVRKYVRSIVKPGMLMTDICETLENTVRKLISENGLQAGIAFPTGCSLNWVAAHWTPNSGDKTVLQYDDVMKLDFGTHIDGHIIDCAFTVAFNPMFDPLLAASREATYTGIKEAGIDVRLCDIGAAIQEVMESYEVEINGKVFQVKSIRNLNGHSIGPYQIHAGKSVPIVKGGEQTKMEEGEFYAIETFGSTGKGYVREDLECSHYMKNFDAGHVPLRLPRAKQLLATINKNFSTLAFCRRYLDRIGETKYLMALKNLCDSGIVQPYPPLCDVKGSYVSQFEHTILLRPTCKEVLSKGDDY

SEQ ID NO: 21519 - protein, 288 aa, Arabidopsis thaliana
  peptide (1)..(288): Ceres Seq. ID no. 13621956
  misc_feature (1)..(288): Homolog of NCBI NO: 11320962 NR Description: methionine aminopeptidase-like protein
  misc_feature (1)..(288): Homolog of NCBI NO: 11264654 NR Description: hypothetical protein F24G16.260 - Arabidopsis
  misc_feature (1)..(288): Homolog of NCBI NO: 17473819 NR Description: putative protein [Arabidopsis thaliana]
  misc_feature (1)..(288): Homolog of NCBI NO: 18411408 NR Description: methionine aminopeptidase 2 -related [Arabidopsis
  misc_feature (1)..(288): Homolog of NCBI NO: 7435570 NR Description: methionyl aminopeptidase (EC 3.4.11.18) F6E13.31
  misc_feature (1)..(288): Homolog of NCBI NO: 18406472 NR Description: methionine aminopeptidase -related [Arabidopsis
  misc_feature (1)..(288): Homolog of NCBI NO: 1703275 NR Description: Methionine aminopeptidase 2 (MetAP 2) (Peptidase
  misc_feature (1)..(288): Homolog of NCBI NO: 9789873 NR Description: methionine aminopeptidase 2
  misc_feature (1)..(288): Homolog of NCBI NO: 27694969 NR Description: Similar to methionine aminopeptidase 2 [Xenopus
  misc_feature (1)..(288): Homolog of NCBI NO: 38636687 NR Description: putative methionyl aminopeptidase (EC 3.4.11.18)
MLMTDICETLENTVRKLISENGLQAGIAFPTGCSLNWVAAHWTPNSGDKTVLQYDDVMKLDFGTHIDGHIIDCAFTVAFNPMFDPLLAASREATYTGIKEAGIDVRLCDIGAAIQEVMESYEVEINGKVFQVKSIRNLNGHSIGPYQIHAGKSVPIVKGGEQTKMEEGEFYAIETFGSTGKGYVREDLECSHYMKNFDAGHVPLRLPRAKQLLATINKNFSTLAFCRRYLDRIGETKYLMALKNLCDSGIVQPYPPLCDVKGSYVSQFEHTILLRPTCKEVLSKGDDY

SEQ ID NO: 21520 - protein, 286 aa, Arabidopsis thaliana
  peptide (1)..(286): Ceres Seq. ID no. 13621957
  misc_feature (1)..(286): Homolog of NCBI NO: 1703275 NR Description: Methionine aminopeptidase 2 (MetAP 2) (Peptidase
  misc_feature (1)..(286): Homolog of NCBI NO: 9789873 NR Description: methionine aminopeptidase 2
  misc_feature (1)..(286): Homolog of NCBI NO: 27694969 NR Description: Similar to methionine aminopeptidase 2 [Xenopus
  misc_feature (1)..(286): Homolog of NCBI NO: 38636687 NR Description: putative methionyl aminopeptidase (EC 3.4.11.18)
  misc_feature (1)..(286): Homolog of NCBI NO: 7435570 NR Description: methionyl aminopeptidase (EC 3.4.11.18) F6E13.31
  misc_feature (1)..(286): Homolog of NCBI NO: 18406472 NR Description: methionine aminopeptidase -related [Arabidopsis
  misc_feature (1)..(286): Homolog of NCBI NO: 11320962 NR Description: methionine aminopeptidase-like protein
  misc_feature (1)..(286): Homolog of NCBI NO: 11264654 NR Description: hypothetical protein F24G16.260 - Arabidopsis
  misc_feature (1)..(286): Homolog of NCBI NO: 17473819 NR Description: putative protein [Arabidopsis thaliana]
  misc_feature (1)..(286): Homolog of NCBI NO: 18411408 NR Description: methionine aminopeptidase 2 -related [Arabidopsis
MTDICETLENTVRKLISENGLQAGIAFPTGCSLNWVAAHWTPNSGDKTVLQYDDVMKLDFGTHIDGHIIDCAFTVAFNPMFDPLLAASREATYTGIKEAGIDVRLCDIGAAIQEVMESYEVEINGKVFQVKSIRNLNGHSIGPYQIHAGKSVPIVKGGEQTKMEEGEFYAIETFGSTGKGYVREDLECSHYMKNFDAGHVPLRLPRAKQLLATINKNFSTLAFCRRYLDRIGETKYLMALKNLCDSGIVQPYPPLCDVKGSYVSQFEHTILLRPTCKEVLSKGDDY

SEQ ID NO: 21521 - DNA, 923 bp, Arabidopsis thaliana
  misc_feature (1)..(923): Ceres Seq. ID no. 12328503
  misc_feature: MA Experiment ID: 108595 Result: Down-regulated in Transcription
  misc_feature: MA Experiment 108595 PARAMETER Experiment Name: At_Ler-pi_Ovule_cDNA_P Parameter: Plant Line Value: null
  misc_feature: MA Experiment ID: 20000224 Result: Down-regulated in Transcription
  misc_feature: MA Experiment ID: 20000495 Result: Down-regulated in Transcription
  misc_feature: MA Experiment 20000495 PARAMETER Experiment Name: At_Guard_Cells_P Parameter: Harvest Date Value: 8/2/2002
  misc_feature: MA Experiment 20000495 PARAMETER Experiment Name: At_Guard_Cells_P Parameter: Organism Value: A. thaliana
  misc_feature: MA Experiment 20000495 PARAMETER Experiment Name: At_Guard_Cells_P Parameter: Tissue Value: Guard Cells vs. Leaves
  misc_feature: MA Experiment ID: 20000794 Result: Up-regulated in Transcription
  misc_feature: MA Experiment 20000794 PARAMETER Experiment Name: At_Petals_P Parameter: Age (day) Value: 23-25 days
  misc_feature: MA Experiment 20000794 PARAMETER Experiment Name: At_Petals_P Parameter: Plant Line Value: WS
  misc_feature: MA Experiment 20000794 PARAMETER Experiment Name: At_Petals_P Parameter: Tissue Value: Petals vs. Whole plant
agctacgattgtgtgtttattattattgcaaccatttctctgctgtttcttcgtcgtttagcttcagaggacgacaatccggtaggcgagagagagagattaatcaatcggcgacctttttaattcgctcgtaattcgttttgattttcgtgtttttgcaacgaatttaacaacttctgtgtgtgtgggtgtgagtttcttaagagaagtcagaaacaatgattgggttgtttaaagtaaaggaaaagcaaagagaacaagctcaaaatgctactagaggaggagcttctgttaagaagcaatctgctggcgaacttcgtcttcacaaagatatatcagagttgaaccttcctagctcttgttcaatatcttttccaaatggcaaagatgatttgatgaactttgaagtatccattaaacctgatgatggatattaccacaatggtacgtttgttttcacattccaagtctctcctgtgtatccacatgaagctccaaaagttaaatgcaaaaccaaggtttatcatcccaatatcgatttggaaggaaacgtttgcctgaacatcttgcgtgaagattggaaacctgttcttaacattaacacagttatctacggactcttccatctgttcacggaacccaattctgaagatcccttgaaccatgatgctgcagcagttttgagggataacccaaagctctttgagaccaatgttcgcagggccatgaccggtggatatgtcggtcagacctttttcccgcgttgtatctaacaaagctctggtttgtcttcttcaaggaaaaagataagaaccaaaccctttgtccgccattgtatttcttctctttctcaaggaccctcgtttgtttgtttgatcttgtaaaattacattccgcgttaaagtaaccctttccttatatcc

SEQ ID NO: 21522 - protein, 184 aa, Arabidopsis thaliana
  peptide (1)..(184): Ceres Seq. ID no. 12328504
  misc_feature (1)..(184): Homolog of NCBI NO: 38174699 NR Description: Unknown (protein for MGC:75750) [Silurana
  misc_feature (1)..(184): Homolog of NCBI NO: 30585323 NR Description: Homo sapiens ubiquitin-conjugating enzyme E2M
  misc_feature (1)..(184): Homolog of NCBI NO: 4507791 NR Description: ubiquitin-conjugating enzyme E2M (UBC12 homolog,
  misc_feature (1)..(184): Homolog of NCBI NO: 40253382 NR Description: putative RUB1 conjugating enzyme
  misc_feature (31)..(184): Homolog of NCBI NO: 10946511 NR Description: RUB1 conjugating enzyme [Lycopersicon esculentum]
  misc_feature (1)..(183): Homolog of NCBI NO: 37531910 NR Description: putative ubiquitin-conjugating enzyme
  misc_feature (1)..(184): Homolog of NCBI NO: 26000688 NR Description: RUB1 conjugating enzyme [Olea europaea]
  misc_feature (1)..(184): Homolog of NCBI NO: 18398792 NR Description: RUB1-conjugating enzyme, putative; protein id:
  misc_feature (1)..(184): Homolog of NCBI NO: 25407764 NR Description: ubiquitin-protein ligase-like protein
  misc_feature (1)..(184): Homolog of NCBI NO: 6635457 NR Description: RUB1 conjugating enzyme [Arabidopsis thaliana]
MIGLFKVKEKQREQAQNATRGGASVKKQSAGELRLHKDISELNLPSSCSISFPNGKDDLMNFEVSIKPDDGYYHNGTFVFTFQVSPVYPHEAPKVKCKTKVYHPNIDLEGNVCLNILREDWKPVLNINTVIYGLFHLFTEPNSEDPLNHDAAAVLRDNPKLFETNVRRAMTGGYVGQTFFPRCI

SEQ ID NO: 21523 - protein, 125 aa, Arabidopsis thaliana
  peptide (1)..(125): Ceres Seq. ID no. 12328505
  misc_feature (1)..(125): Homolog of NCBI NO: 38174699 NR Description: Unknown (protein for MGC:75750) [Silurana
  misc_feature (1)..(125): Homolog of NCBI NO: 30585323 NR Description: Homo sapiens ubiquitin-conjugating enzyme E2M
  misc_feature (1)..(125): Homolog of NCBI NO: 4507791 NR Description: ubiquitin-conjugating enzyme E2M (UBC12 homolog,
  misc_feature (1)..(125): Homolog of NCBI NO: 40253382 NR Description: putative RUB1 conjugating enzyme
  misc_feature (1)..(125): Homolog of NCBI NO: 10946511 NR Description: RUB1 conjugating enzyme [Lycopersicon esculentum]
  misc_feature (1)..(124): Homolog of NCBI NO: 37531910 NR Description: putative ubiquitin-conjugating enzyme
  misc_feature (1)..(125): Homolog of NCBI NO: 26000688 NR Description: RUB1 conjugating enzyme [Olea europaea]
  misc_feature (1)..(125): Homolog of NCBI NO: 18398792 NR Description: RUB1-conjugating enzyme, putative; protein id:
  misc_feature (1)..(125): Homolog of NCBI NO: 25407764 NR Description: ubiquitin-protein ligase-like protein
  misc_feature (1)..(125): Homolog of NCBI NO: 6635457 NR Description: RUB1 conjugating enzyme [Arabidopsis thaliana]
MNFEVSIKPDDGYYHNGTFVFTFQVSPVYPHEAPKVKCKTKVYHPNIDLEGNVCLNILREDWKPVLNINTVIYGLFHLFTEPNSEDPLNHDAAAVLRDNPKLFETNVRRAMTGGYVGQTFFPRCI

SEQ ID NO: 21524 - DNA, 877 bp, Arabidopsis thaliana
  misc_feature (1)..(877): Ceres Seq. ID no. 12333370
  misc_feature: MA Experiment ID: 108461 Result: Up-regulated in Transcription
  misc_feature: MA Experiment 108461 PARAMETER Experiment Name: At_Germinating_Seeds_cDNA_P Parameter: Age (day) Value: 1 vs. 0
  misc_feature: MA Experiment 108461 PARAMETER Experiment Name: At_Germinating_Seeds_cDNA_P Parameter: Tissue Value: Germinating Seeds
  misc_feature: MA Experiment ID: 108463 Result: Up-regulated in Transcription
  misc_feature: MA Experiment 108463 PARAMETER Experiment Name: At_Germinating_Seeds_cDNA_P Parameter: Age (day) Value: 3 vs. 0
  misc_feature: MA Experiment 108463 PARAMETER Experiment Name: At_Germinating_Seeds_cDNA_P Parameter: Tissue Value: Germinating Seeds
  misc_feature: MA Experiment ID: 108464 Result: Up-regulated in Transcription
  misc_feature: MA Experiment 108464 PARAMETER Experiment Name: At_Germinating_Seeds_cDNA_P Parameter: Age (day) Value: 4 vs. 0
  misc_feature: MA Experiment 108464 PARAMETER Experiment Name: At_Germinating_Seeds_cDNA_P Parameter: Tissue Value: Germinating Seeds
  misc_feature: MA Experiment ID: 108473 Result: Up-regulated in Transcription
  misc_feature: MA Experiment 108473 PARAMETER Experiment Name: At_Drought_Flowers_cDNA_P Parameter: Timepoint (hr) Value: 7 d
  misc_feature: MA Experiment 108473 PARAMETER Experiment Name: At_Drought_Flowers_cDNA_P Parameter: Tissue Value: Flower
  misc_feature: MA Experiment 108473 PARAMETER Experiment Name: At_Drought_Flowers_cDNA_P Parameter: Treatment Value: Drought vs. No Drought
  misc_feature: MA Experiment ID: 108576 Result: Down-regulated in Transcription
  misc_feature: MA Experiment 108576 PARAMETER Experiment Name: At_42deg_Heat_cDNA_P Parameter: Temperature (deg C) Value: 42 vs. 22
  misc_feature: MA Experiment 108576 PARAMETER Experiment Name: At_42deg_Heat_cDNA_P Parameter: Timepoint (hr) Value: 1
  misc_feature: MA Experiment 108576 PARAMETER Experiment Name: At_42deg_Heat_cDNA_P Parameter: Tissue Value: Aerial
  misc_feature: MA Experiment ID: 108577 Result: Down-regulated in Transcription
  misc_feature: MA Experiment 108577 PARAMETER Experiment Name: At_42deg_Heat_cDNA_P Parameter: Temperature (deg C) Value: 42 vs. 22
  misc_feature: MA Experiment 108577 PARAMETER Experiment Name: At_42deg_Heat_cDNA_P Parameter: Timepoint (hr) Value: 6
  misc_feature: MA Experiment 108577 PARAMETER Experiment Name: At_42deg_Heat_cDNA_P Parameter: Tissue Value: Aerial
  misc_feature: MA Experiment ID: 108579 Result: Up-regulated in Transcription
  misc_feature: MA Experiment 108579 PARAMETER Experiment Name: At_4deg_Cold_cDNA_P Parameter: Temperature (deg C) Value: 4 vs. 22
  misc_feature: MA Experiment 108579 PARAMETER Experiment Name: At_4deg_Cold_cDNA_P Parameter: Timepoint (hr) Value: 6
  misc_feature: MA Experiment 108579 PARAMETER Experiment Name: At_4deg_Cold_cDNA_P Parameter: Tissue Value: Aerial
  misc_feature: MA Experiment ID: 108594 Result: Down-regulated in Transcription
  misc_feature: MA Experiment 108594 PARAMETER Experiment Name: At_Ler-rhl_Root_cDNA_P Parameter: Plant Line Value: null
  misc_feature: MA Experiment ID: 108595 Result: Down-regulated in Transcription
  misc_feature: MA Experiment 108595 PARAMETER Experiment Name: At_Ler-pi_Ovule_cDNA_P Parameter: Plant Line Value: null
  misc_feature: MA Experiment ID: 108607 Result: Up-regulated in Transcription
  misc_feature: MA Experiment 108607 PARAMETER Experiment Name: At_100uM_ABA_cDNA_P Parameter: Timepoint (hr) Value: 4
  misc_feature: MA Experiment 108607 PARAMETER Experiment Name: At_100uM_ABA_cDNA_P Parameter: Tissue Value: Aerial
  misc_feature: MA Experiment 108607 PARAMETER Experiment Name: At_100uM_ABA_cDNA_P Parameter: Treatment Value: 100uM ABA vs. No Treatment
  misc_feature: MA Experiment ID: 20000069 Result: Up-regulated in Transcription
  misc_feature: MA Experiment 20000069 PARAMETER Experiment Name: At_100uM_ABA_Mutants_cDNA_P Parameter: Plant Line Value: CS23
  misc_feature: MA Experiment 20000069 PARAMETER Experiment Name: At_100uM_ABA_Mutants_cDNA_P Parameter: Timepoint (hr) Value: 6
  misc_feature: MA Experiment 20000069 PARAMETER Experiment Name: At_100uM_ABA_Mutants_cDNA_P Parameter: Tissue Value: Aerial
  misc_feature: MA Experiment 20000069 PARAMETER Experiment Name: At_100uM_ABA_Mutants_cDNA_P Parameter: Treatment Value: 100uM ABA vs. No Treatment
  misc_feature: MA Experiment ID: 20000070 Result: Up-regulated in Transcription
  misc_feature: MA Experiment 20000070 PARAMETER Experiment Name: At_100uM_ABA_Mutants_cDNA_P Parameter: Plant Line Value: CS24
  misc_feature: MA Experiment 20000070 PARAMETER Experiment Name: At_100uM_ABA_Mutants_cDNA_P Parameter: Timepoint (hr) Value: 6
  misc_feature: MA Experiment 20000070 PARAMETER Experiment Name: At_100uM_ABA_Mutants_cDNA_P Parameter: Tissue Value: Aerial
  misc_feature: MA Experiment 20000070 PARAMETER Experiment Name: At_100uM_ABA_Mutants_cDNA_P Parameter: Treatment Value: 100uM ABA vs. No Treatment
  misc_feature: MA Experiment ID: 20000071 Result: Up-regulated in Transcription
  misc_feature: MA Experiment 20000071 PARAMETER Experiment Name: At_100uM_ABA_Mutants_cDNA_P Parameter: Plant Line Value: CS8104
  misc_feature: MA Experiment 20000071 PARAMETER Experiment Name: At_100uM_ABA_Mutants_cDNA_P Parameter: Timepoint (hr) Value: 6
  misc_feature: MA Experiment 20000071 PARAMETER Experiment Name: At_100uM_ABA_Mutants_cDNA_P Parameter: Tissue Value: Aerial
  misc_feature: MA Experiment 20000071 PARAMETER Experiment Name: At_100uM_ABA_Mutants_cDNA_P Parameter: Treatment Value: 100uM ABA vs. No Treatment
  misc_feature: MA Experiment ID: 20000072 Result: Up-regulated in Transcription
  misc_feature: MA Experiment 20000072 PARAMETER Experiment Name: At_100uM_ABA_Mutants_cDNA_P Parameter: Plant Line Value: CS8105
  misc_feature: MA Experiment 20000072 PARAMETER Experiment Name: At_100uM_ABA_Mutants_cDNA_P Parameter: Timepoint (hr) Value: 6
  misc_feature: MA Experiment 20000072 PARAMETER Experiment Name: At_100uM_ABA_Mutants_cDNA_P Parameter: Tissue Value: Aerial
  misc_feature: MA Experiment 20000072 PARAMETER Experiment Name: At_100uM_ABA_Mutants_cDNA_P Parameter: Treatment Value: 100uM ABA vs. No Treatment
  misc_feature: MA Experiment ID: 20000086 Result: Up-regulated in Transcription
  misc_feature: MA Experiment 20000086 PARAMETER Experiment Name: At_100uM_ABA_Mutants_cDNA_P Parameter: Plant Line Value: CS22
  misc_feature: MA Experiment 20000086 PARAMETER Experiment Name: At_100uM_ABA_Mutants_cDNA_P Parameter: Timepoint (hr) Value: 6
  misc_feature: MA Experiment 20000086 PARAMETER Experiment Name: At_100uM_ABA_Mutants_cDNA_P Parameter: Tissue Value: Aerial
  misc_feature: MA Experiment 20000086 PARAMETER Experiment Name: At_100uM_ABA_Mutants_cDNA_P Parameter: Treatment Value: 100uM ABA vs. No Treatment
  misc_feature: MA Experiment ID: 20000088 Result: Up-regulated in Transcription
  misc_feature: MA Experiment 20000088 PARAMETER Experiment Name: At_100uM_ABA_Mutants_cDNA_P Parameter: Plant Line Value: Landsberg
  misc_feature: MA Experiment 20000088 PARAMETER Experiment Name: At_100uM_ABA_Mutants_cDNA_P Parameter: Timepoint (hr) Value: 6
  misc_feature: MA Experiment 20000088 PARAMETER Experiment Name: At_100uM_ABA_Mutants_cDNA_P Parameter: Tissue Value: Aerial
  misc_feature: MA Experiment 20000088 PARAMETER Experiment Name: At_100uM_ABA_Mutants_cDNA_P Parameter: Treatment Value: 100uM ABA vs. No Treatment
  misc_feature: MA Experiment ID: 20000111 Result: Down-regulated in Transcription
  misc_feature: MA Experiment 20000111 PARAMETER Experiment Name: At_42deg_Heat_cDNA_P Parameter: Temperature (deg C) Value: 42 vs. 22
  misc_feature: MA Experiment 20000111 PARAMETER Experiment Name: At_42deg_Heat_cDNA_P Parameter: Timepoint (hr) Value: 6
  misc_feature: MA Experiment 20000111 PARAMETER Experiment Name: At_42deg_Heat_cDNA_P Parameter: Tissue Value: Aerial
  misc_feature: MA Experiment ID: 20000112 Result: Down-regulated in Transcription
  misc_feature: MA Experiment 20000112 PARAMETER Experiment Name: At_42deg_Heat_cDNA_P Parameter: Temperature (deg C) Value: 42 vs. 22
  misc_feature: MA Experiment 20000112 PARAMETER Experiment Name: At_42deg_Heat_cDNA_P Parameter: Timepoint (hr) Value: 2
  misc_feature: MA Experiment 20000112 PARAMETER Experiment Name: At_42deg_Heat_cDNA_P Parameter: Tissue Value: Aerial
  misc_feature: MA Experiment ID: 20000113 Result: Down-regulated in Transcription
  misc_feature: MA Experiment 20000113 PARAMETER Experiment Name: At_42deg_Heat_cDNA_P Parameter: Temperature (deg C) Value: 42 vs. 22
  misc_feature: MA Experiment 20000113 PARAMETER Experiment Name: At_42deg_Heat_cDNA_P Parameter: Timepoint (hr) Value: 8
  misc_feature: MA Experiment 20000113 PARAMETER Experiment Name: At_42deg_Heat_cDNA_P Parameter: Tissue Value: Aerial
  misc_feature: MA Experiment ID: 20000117 Result: Up-regulated in Transcription
  misc_feature: MA Experiment 20000117 PARAMETER Experiment Name: At_100uM_ABA_Mutants_cDNA_P Parameter: Plant Line Value: Columbia
  misc_feature: MA Experiment 20000117 PARAMETER Experiment Name: At_100uM_ABA_Mutants_cDNA_P Parameter: Timepoint (hr) Value: 6
  misc_feature: MA Experiment 20000117 PARAMETER Experiment Name: At_100uM_ABA_Mutants_cDNA_P Parameter: Tissue Value: Aerial
  misc_feature: MA Experiment 20000117 PARAMETER Experiment Name: At_100uM_ABA_Mutants_cDNA_P Parameter: Treatment Value: 100uM ABA vs. No Treatment
  misc_feature: MA Experiment ID: 20000144 Result: Down-regulated in Transcription
  misc_feature: MA Experiment 20000144 PARAMETER Experiment Name: At_42deg_Heat_cDNA_P Parameter: Temperature (deg C) Value: 42 vs. 22
  misc_feature: MA Experiment 20000144 PARAMETER Experiment Name: At_42deg_Heat_cDNA_P Parameter: Timepoint (hr) Value: 1
  misc_feature: MA Experiment 20000144 PARAMETER Experiment Name: At_42deg_Heat_cDNA_P Parameter: Tissue Value: Aerial
  misc_feature: MA Experiment ID: 20000173 Result: Down-regulated in Transcription
  misc_feature: MA Experiment 20000173 PARAMETER Experiment Name: At_42deg_Heat_P Parameter: Age (day) Value: 14
  misc_feature: MA Experiment 20000173 PARAMETER Experiment Name: At_42deg_Heat_P Parameter: Organism Value: A. thaliana
  misc_feature: MA Experiment 20000173 PARAMETER Experiment Name: At_42deg_Heat_P Parameter: Plant Line Value: WS
  misc_feature: MA Experiment 20000173 PARAMETER Experiment Name: At_42deg_Heat_P Parameter: Temperature (deg C) Value: 42 vs. 22
  misc_feature: MA Experiment 20000173 PARAMETER Experiment Name: At_42deg_Heat_P Parameter: Timepoint (hr) Value: 6
  misc_feature: MA Experiment 20000173 PARAMETER Experiment Name: At_42deg_Heat_P Parameter: Tissue Value: Aerial
  misc_feature: MA Experiment ID: 20000211 Result: Up-regulated in Transcription
  misc_feature: MA Experiment 20000211 PARAMETER Experiment Name: At_0.001percent_MeJA__P Parameter: Age (day) Value: 14
  misc_feature: MA Experiment 20000211 PARAMETER Experiment Name: At_0.001percent_MeJA__P Parameter: Organism Value: A. thaliana
  misc_feature: MA Experiment 20000211 PARAMETER Experiment Name: At_0.001percent_MeJA__P Parameter: Plant Line Value: WS
  misc_feature: MA Experiment 20000211 PARAMETER Experiment Name: At_0.001percent_MeJA__P Parameter: Timepoint (hr) Value: 1
  misc_feature: MA Experiment 20000211 PARAMETER Experiment Name: At_0.001percent_MeJA__P Parameter: Tissue Value: Aerial
  misc_feature: MA Experiment 20000211 PARAMETER Experiment Name: At_0.001percent_MeJA__P Parameter: Treatment Value: 0.001percent MeJA vs. No Treatment
  misc_feature: MA Experiment ID: 20000227 Result: Down-regulated in Transcription
  misc_feature: MA Experiment 20000227 PARAMETER Experiment Name: At_Root-Tips-vs-Tops_P Parameter: Tissue Value: Root Tips vs. Root Tops
  misc_feature: MA Experiment ID: 20000234 Result: Down-regulated in Transcription
  misc_feature: MA Experiment 20000234 PARAMETER Experiment Name: At_Siliques_P Parameter: Age (day) Value: 21
  misc_feature: MA Experiment 20000234 PARAMETER Experiment Name: At_Siliques_P Parameter: Organism Value: A. thaliana
  misc_feature: MA Experiment 20000234 PARAMETER Experiment Name: At_Siliques_P Parameter: Plant Line Value: WS
  misc_feature: MA Experiment 20000234 PARAMETER Experiment Name: At_Siliques_P Parameter: Tissue Value: Less Than 5mm Siliques vs. Whole Plant
  misc_feature: MA Experiment ID: 20000235 Result: Down-regulated in Transcription
  misc_feature: MA Experiment 20000235 PARAMETER Experiment Name: At_Siliques_P Parameter: Age (day) Value: 21
  misc_feature: MA Experiment 20000235 PARAMETER Experiment Name: At_Siliques_P Parameter: Organism Value: A. thaliana
  misc_feature: MA Experiment 20000235 PARAMETER Experiment Name: At_Siliques_P Parameter: Plant Line Value: WS
  misc_feature: MA Experiment 20000235 PARAMETER Experiment Name: At_Siliques_P Parameter: Tissue Value: 5-10mm Siliques vs. Whole Plant
  misc_feature: MA Experiment ID: 20000264 Result: Down-regulated in Transcription
  misc_feature: MA Experiment 20000264 PARAMETER Experiment Name: At_Open_Flower_P Parameter: Age (day) Value: 21
  misc_feature: MA Experiment 20000264 PARAMETER Experiment Name: At_Open_Flower_P Parameter: Plant Line Value: WS
  misc_feature: MA Experiment 20000264 PARAMETER Experiment Name: At_Open_Flower_P Parameter: Tissue Value: Open Flower vs. Whole Plant
  misc_feature: MA Experiment ID: 20000265 Result: Down-regulated in Transcription
  misc_feature: MA Experiment 20000265 PARAMETER Experiment Name: At_Open_Flower_P Parameter: Age (day) Value: 21
  misc_feature: MA Experiment 20000265 PARAMETER Experiment Name: At_Open_Flower_P Parameter: Plant Line Value: WS
  misc_feature: MA Experiment 20000265 PARAMETER Experiment Name: At_Open_Flower_P Parameter: Tissue Value: Closed Flower vs. Whole Plant
  misc_feature: MA Experiment ID: 20000286 Result: Down-regulated in Transcription
  misc_feature: MA Experiment 20000286 PARAMETER Experiment Name: At_Open_Flower_P Parameter: Age (day) Value: 21
  misc_feature: MA Experiment 20000286 PARAMETER Experiment Name: At_Open_Flower_P Parameter: Plant Line Value: WS
  misc_feature: MA Experiment 20000286 PARAMETER Experiment Name: At_Open_Flower_P Parameter: Tissue Value: Half Open vs. Whole Plant
  misc_feature: MA Experiment ID: 20000437 Result: Down-regulated in Transcription
  misc_feature: MA Experiment 20000437 PARAMETER Experiment Name: At_Drought_P Parameter: Age (day) Value: 8
  misc_feature: MA Experiment 20000437 PARAMETER Experiment Name: At_Drought_P Parameter: Organism Value: A. thaliana
  misc_feature: MA Experiment 20000437 PARAMETER Experiment Name: At_Drought_P Parameter: Plant Line Value: WS
  misc_feature: MA Experiment 20000437 PARAMETER Experiment Name: At_Drought_P Parameter: Timepoint (hr) Value: 24
  misc_feature: MA Experiment 20000437 PARAMETER Experiment Name: At_Drought_P Parameter: Tissue Value: Whole Plant
  misc_feature: MA Experiment 20000437 PARAMETER Experiment Name: At_Drought_P Parameter: Treatment Value: Drought vs. No Drought
  misc_feature: MA Experiment ID: 20000455 Result: Up-regulated in Transcription
  misc_feature: MA Experiment 20000455 PARAMETER Experiment Name: At_100uM_ABA_P Parameter: Age (day) Value: 16
  misc_feature: MA Experiment 20000455 PARAMETER Experiment Name: At_100uM_ABA_P Parameter: Organism Value: A. thaliana
  misc_feature: MA Experiment 20000455 PARAMETER Experiment Name: At_100uM_ABA_P Parameter: Plant Line Value: WS
  misc_feature: MA Experiment 20000455 PARAMETER Experiment Name: At_100uM_ABA_P Parameter: Timepoint (hr) Value: 48
  misc_feature: MA Experiment 20000455 PARAMETER Experiment Name: At_100uM_ABA_P Parameter: Tissue Value: Aerial
  misc_feature: MA Experiment 20000455 PARAMETER Experiment Name: At_100uM_ABA_P Parameter: Treatment Value: 100uM ABA vs. No Treatment
  misc_feature: MA Experiment ID: 20000496 Result: Down-regulated in Transcription
  misc_feature: MA Experiment 20000496 PARAMETER Experiment Name: At_Guard_Cells_P Parameter: Harvest Date Value: 7/19/2002
  misc_feature: MA Experiment 20000496 PARAMETER Experiment Name: At_Guard_Cells_P Parameter: Organism Value: Canola
  misc_feature: MA Experiment 20000496 PARAMETER Experiment Name: At_Guard_Cells_P Parameter: Tissue Value: Guard Cells vs. Leaves
  misc_feature: MA Experiment ID: 20000794 Result: Down-regulated in Transcription
  misc_feature: MA Experiment 20000794 PARAMETER Experiment Name: At_Petals_P Parameter: Age (day) Value: 23-25 days
  misc_feature: MA Experiment 20000794 PARAMETER Experiment Name: At_Petals_P Parameter: Plant Line Value: WS
  misc_feature: MA Experiment 20000794 PARAMETER Experiment Name: At_Petals_P Parameter: Tissue Value: Petals vs. Whole plant
  misc_feature: MA Experiment ID: 20001247 Result: Down-regulated in Transcription
  misc_feature: MA Experiment 20001247 PARAMETER Experiment Name: At_Far-red-induction_P Parameter: Age (day) Value: 7
  misc_feature: MA Experiment 20001247 PARAMETER Experiment Name: At_Far-red-induction_P Parameter: Light Value: Far-red vs. White
  misc_feature: MA Experiment 20001247 PARAMETER Experiment Name: At_Far-red-induction_P Parameter: Organism Value: A. thaliana
  misc_feature: MA Experiment 20001247 PARAMETER Experiment Name: At_Far-red-induction_P Parameter: Plant Line Value: Columbia
  misc_feature: MA Experiment 20001247 PARAMETER Experiment Name: At_Far-red-induction_P Parameter: Timepoint (hr) Value: 1
  misc_feature: MA Experiment 20001247 PARAMETER Experiment Name: At_Far-red-induction_P Parameter: Tissue Value: Whole Plant
  misc_feature: MA Experiment ID: 20001248 Result: Down-regulated in Transcription
  misc_feature: MA Experiment 20001248 PARAMETER Experiment Name: At_Far-red-induction_P Parameter: Age (day) Value: 7
  misc_feature: MA Experiment 20001248 PARAMETER Experiment Name: At_Far-red-induction_P Parameter: Light Value: Far-red vs. White
  misc_feature: MA Experiment 20001248 PARAMETER Experiment Name: At_Far-red-induction_P Parameter: Organism Value: A. thaliana
  misc_feature: MA Experiment 20001248 PARAMETER Experiment Name: At_Far-red-induction_P Parameter: Plant Line Value: Columbia
  misc_feature: MA Experiment 20001248 PARAMETER Experiment Name: At_Far-red-induction_P Parameter: Timepoint (hr) Value: 4
  misc_feature: MA Experiment 20001248 PARAMETER Experiment Name: At_Far-red-induction_P Parameter: Tissue Value: Whole Plant
  misc_feature: MA Experiment ID: 20001450 Result: Down-regulated in Transcription
  misc_feature: MA Experiment 20001450 PARAMETER Experiment Name: At_Far-red-induction_P Parameter: Age (day) Value: 7
  misc_feature: MA Experiment 20001450 PARAMETER Experiment Name: At_Far-red-induction_P Parameter: Light Value: Far-red vs. White
  misc_feature: MA Experiment 20001450 PARAMETER Experiment Name: At_Far-red-induction_P Parameter: Organism Value: A. thaliana
  misc_feature: MA Experiment 20001450 PARAMETER Experiment Name: At_Far-red-induction_P Parameter: Plant Line Value: Columbia
  misc_feature: MA Experiment 20001450 PARAMETER Experiment Name: At_Far-red-induction_P Parameter: Timepoint (hr) Value: 8
  misc_feature: MA Experiment 20001450 PARAMETER Experiment Name: At_Far-red-induction_P Parameter: Tissue Value: Whole Plant
  misc_feature: MA Experiment ID: 20001451 Result: Down-regulated in Transcription
  misc_feature: MA Experiment 20001451 PARAMETER Experiment Name: At_Far-red-induction_P Parameter: Age (day) Value: 7
  misc_feature: MA Experiment 20001451 PARAMETER Experiment Name: At_Far-red-induction_P Parameter: Light Value: Far-red vs. White
  misc_feature: MA Experiment 20001451 PARAMETER Experiment Name: At_Far-red-induction_P Parameter: Organism Value: A. thaliana
  misc_feature: MA Experiment 20001451 PARAMETER Experiment Name: At_Far-red-induction_P Parameter: Plant Line Value: Columbia
  misc_feature: MA Experiment 20001451 PARAMETER Experiment Name: At_Far-red-induction_P Parameter: Timepoint (hr) Value: 24
  misc_feature: MA Experiment 20001451 PARAMETER Experiment Name: At_Far-red-induction_P Parameter: Tissue Value: Whole Plant
  misc_feature: MA Experiment ID: 20001555 Result: Up-regulated in Transcription
  misc_feature: MA Experiment 20001555 PARAMETER Experiment Name: At_Drought_Soil_Dry_P Parameter: Age (day) Value: 24
  misc_feature: MA Experiment 20001555 PARAMETER Experiment Name: At_Drought_Soil_Dry_P Parameter: Organism Value: A. thaliana
  misc_feature: MA Experiment 20001555 PARAMETER Experiment Name: At_Drought_Soil_Dry_P Parameter: Plant Line Value: WS
  misc_feature: MA Experiment 20001555 PARAMETER Experiment Name: At_Drought_Soil_Dry_P Parameter: Post Timepoint (hr) Value: None
  misc_feature: MA Experiment 20001555 PARAMETER Experiment Name: At_Drought_Soil_Dry_P Parameter: Post-Treatment Value: None
  misc_feature: MA Experiment 20001555 PARAMETER Experiment Name: At_Drought_Soil_Dry_P Parameter: Timepoint (day) Value: 10
  misc_feature: MA Experiment 20001555 PARAMETER Experiment Name: At_Drought_Soil_Dry_P Parameter: Treatment Value: Drought vs. No Drought
  misc_feature: MA Experiment ID: 20001557 Result: Down-regulated in Transcription
  misc_feature: MA Experiment 20001557 PARAMETER Experiment Name: At_Drought_Soil_Dry_P Parameter: Age (day) Value: 27
  misc_feature: MA Experiment 20001557 PARAMETER Experiment Name: At_Drought_Soil_Dry_P Parameter: Organism Value: A. thaliana
  misc_feature: MA Experiment 20001557 PARAMETER Experiment Name: At_Drought_Soil_Dry_P Parameter: Plant Line Value: WS
  misc_feature: MA Experiment 20001557 PARAMETER Experiment Name: At_Drought_Soil_Dry_P Parameter: Post Timepoint (hr) Value: 3
  misc_feature: MA Experiment 20001557 PARAMETER Experiment Name: At_Drought_Soil_Dry_P Parameter: Post-Treatment Value: Re-Water vs. No Drought
  misc_feature: MA Experiment 20001557 PARAMETER Experiment Name: At_Drought_Soil_Dry_P Parameter: Timepoint (day) Value: 13
  misc_feature: MA Experiment 20001557 PARAMETER Experiment Name: At_Drought_Soil_Dry_P Parameter: Treatment Value: Drought vs. No Drought
  misc_feature: MA Experiment ID: 20001757 Result: Up-regulated in Transcription
  misc_feature: MA Experiment 20001757 PARAMETER Experiment Name: At_50mM_NH4NO3_L-to-H_P Parameter: Timepoint (hr) Value: 6
  misc_feature: MA Experiment 20001757 PARAMETER Experiment Name: At_50mM_NH4NO3_L-to-H_P Parameter: Tissue Value: Leaf
  misc_feature: MA Experiment 20001757 PARAMETER Experiment Name: At_50mM_NH4NO3_L-to-H_P Parameter: Treatment Value: 50mM NH4NO3 vs 100mM Mannitol
  misc_feature: MA Experiment ID: 20001905 Result: Down-regulated in Transcription
  misc_feature: MA Experiment 20001905 PARAMETER Experiment Name: At_Drought_Reproduction_P Parameter: Age (day) Value: 40
  misc_feature: MA Experiment 20001905 PARAMETER Experiment Name: At_Drought_Reproduction_P Parameter: Organism Value: A. thaliana
  misc_feature: MA Experiment 20001905 PARAMETER Experiment Name: At_Drought_Reproduction_P Parameter: Plant Line Value: WS
  misc_feature: MA Experiment 20001905 PARAMETER Experiment Name: At_Drought_Reproduction_P Parameter: Timepoint (day) Value: 10
  misc_feature: MA Experiment 20001905 PARAMETER Experiment Name: At_Drought_Reproduction_P Parameter: Tissue Value: Rosettes
  misc_feature: MA Experiment 20001905 PARAMETER Experiment Name: At_Drought_Reproduction_P Parameter: Treatment Value: Drought vs. No Drought
  misc_feature: MA Experiment ID: 20001911 Result: Up-regulated in Transcription
  misc_feature: MA Experiment 20001911 PARAMETER Experiment Name: At_Drought_Reproduction_P Parameter: Age (day) Value: 40
  misc_feature: MA Experiment 20001911 PARAMETER Experiment Name: At_Drought_Reproduction_P Parameter: Organism Value: A. thaliana
  misc_feature: MA Experiment 20001911 PARAMETER Experiment Name: At_Drought_Reproduction_P Parameter: Plant Line Value: WS
  misc_feature: MA Experiment 20001911 PARAMETER Experiment Name: At_Drought_Reproduction_P Parameter: Timepoint (day) Value: 10
  misc_feature: MA Experiment 20001911 PARAMETER Experiment Name: At_Drought_Reproduction_P Parameter: Tissue Value: Flowers
  misc_feature: MA Experiment 20001911 PARAMETER Experiment Name: At_Drought_Reproduction_P Parameter: Treatment Value: Drought vs. No Drought
actcaacaaagcttaaccataaactgtgagtaaaaaagagaagaaagaaaaatggtgctaaaggtgtacggacctcactttgcttcaccaaagagagctttggtcacactgatcgagaagggcgttgccttcgagaccatccccgtcgatctcatgaaaggagaacacaagcagcctgcttatctcgctctacagccttttggtactgttcctgctgttgttgacggtgactacaaaatcttcgagtcccgtgcggtgatgaggtacgtagctgagaagtacaggtcacaaggacctgatcttttggggaaaaccgttgaagacagaggtcaagttgaacaatggcttgatgtggaagcgaccacttaccacccaccgctattgaacttaacgcttcacataatgttcgcatcagtcatgggattcccatctgatgagaagctgatcaaggagagtgaagagaagcttgcgggtgttcttgatgtctacgaggcacatctctcaaagagcaagtacttggccggtgacttcgtgagcttggctgatttggctcacctcccgttcactgattacttggttggtccgattgggaaagcttacatgatcaaagataggaaacacgtgagcgcgtggtgggatgatattagcagccgtcctgcgtggaaggagactgttgccaagtattcattcccagcttaagatgtgttcatcttcttggtgatgtggtttgtgttttatgagaggtttaataaaagtggaactaaatgtacctcttaatgtaatgttgccacctctgtgttctctttccttttgtagtttaataagtatctttatggctttgtgaggctttcaattttaaggaaatgatcttttcccc

SEQ ID NO: 21525 - protein, 215 aa, Arabidopsis thaliana
  peptide (1)..(215): Ceres Seq. ID no. 12333371
  misc_feature (1)..(214): Homolog of NCBI NO: 15224582 NR Description: glutathione transferase, putative
  misc_feature (1)..(215): Homolog of NCBI NO: 2462929 NR Description: glutathione transferase [Arabidopsis thaliana]
  misc_feature (1)..(215): Homolog of NCBI NO: 15224581 NR Description: glutathione transferase, putative
MVLKVYGPHFASPKRALVTLIEKGVAFETIPVDLMKGEHKQPAYLALQPFGTVPAVVDGDYKIFESRAVMRYVAEKYRSQGPDLLGKTVEDRGQVEQWLDVEATTYHPPLLNLTLHIMFASVMGFPSDEKLIKESEEKLAGVLDVYEAHLSKSKYLAGDFVSLADLAHLPFTDYLVGPIGKAYMIKDRKHVSAWWDDISSRPAWKETVAKYSFPA

SEQ ID NO: 21526 - protein, 181 aa, Arabidopsis thaliana
  peptide (1)..(181): Ceres Seq. ID no. 12333372
  misc_feature (1)..(180): Homolog of NCBI NO: 15224582 NR Description: glutathione transferase, putative
  misc_feature (1)..(181): Homolog of NCBI NO: 2462929 NR Description: glutathione transferase [Arabidopsis thaliana]
  misc_feature (1)..(181): Homolog of NCBI NO: 15224581 NR Description: glutathione transferase, putative
MKGEHKQPAYLALQPFGTVPAVVDGDYKIFESRAVMRYVAEKYRSQGPDLLGKTVEDRGQVEQWLDVEATTYHPPLLNLTLHIMFASVMGFPSDEKLIKESEEKLAGVLDVYEAHLSKSKYLAGDFVSLADLAHLPFTDYLVGPIGKAYMIKDRKHVSAWWDDISSRPAWKETVAKYSFPA

SEQ ID NO: 21527 - protein, 146 aa, Arabidopsis thaliana
  peptide (1)..(146): Ceres Seq. ID no. 12333373
  misc_feature (1)..(145): Homolog of NCBI NO: 15224582 NR Description: glutathione transferase, putative
  misc_feature (1)..(146): Homolog of NCBI NO: 2462929 NR Description: glutathione transferase [Arabidopsis thaliana]
  misc_feature (1)..(146): Homolog of NCBI NO: 15224581 NR Description: glutathione transferase, putative
MRYVAEKYRSQGPDLLGKTVEDRGQVEQWLDVEATTYHPPLLNLTLHIMFASVMGFPSDEKLIKESEEKLAGVLDVYEAHLSKSKYLAGDFVSLADLAHLPFTDYLVGPIGKAYMIKDRKHVSAWWDDISSRPAWKETVAKYSFPA

SEQ ID NO: 21528 - DNA, 1577 bp, Arabidopsis thaliana
  misc_feature (1)..(1577): Ceres Seq. ID no. 12575042
  misc_feature: MA Experiment ID: 108434 Result: Up-regulated in Transcription
  misc_feature: MA Experiment 108434 PARAMETER Experiment Name: At_Root_Tips_cDNA_P Parameter: Tissue Value: Root Tips
  misc_feature: MA Experiment ID: 108461 Result: Down-regulated in Transcription
  misc_feature: MA Experiment 108461 PARAMETER Experiment Name: At_Germinating_Seeds_cDNA_P Parameter: Age (day) Value: 1 vs. 0
  misc_feature: MA Experiment 108461 PARAMETER Experiment Name: At_Germinating_Seeds_cDNA_P Parameter: Tissue Value: Germinating Seeds
  misc_feature: MA Experiment ID: 108462 Result: Down-regulated in Transcription
  misc_feature: MA Experiment 108462 PARAMETER Experiment Name: At_Germinating_Seeds_cDNA_P Parameter: Age (day) Value: 2 vs. 0
  misc_feature: MA Experiment 108462 PARAMETER Experiment Name: At_Germinating_Seeds_cDNA_P Parameter: Tissue Value: Germinating Seeds
  misc_feature: MA Experiment ID: 108463 Result: Down-regulated in Transcription
  misc_feature: MA Experiment 108463 PARAMETER Experiment Name: At_Germinating_Seeds_cDNA_P Parameter: Age (day) Value: 3 vs. 0
  misc_feature: MA Experiment 108463 PARAMETER Experiment Name: At_Germinating_Seeds_cDNA_P Parameter: Tissue Value: Germinating Seeds
  misc_feature: MA Experiment ID: 108464 Result: Down-regulated in Transcription
  misc_feature: MA Experiment 108464 PARAMETER Experiment Name: At_Germinating_Seeds_cDNA_P Parameter: Age (day) Value: 4 vs. 0
  misc_feature: MA Experiment 108464 PARAMETER Experiment Name: At_Germinating_Seeds_cDNA_P Parameter: Tissue Value: Germinating Seeds
  misc_feature: MA Experiment ID: 108595 Result: Down-regulated in Transcription
  misc_feature: MA Experiment 108595 PARAMETER Experiment Name: At_Ler-pi_Ovule_cDNA_P Parameter: Plant Line Value: null
  misc_feature: MA Experiment ID: 20000087 Result: Down-regulated in Transcription
  misc_feature: MA Experiment 20000087 PARAMETER Experiment Name: At_100uM_ABA_Mutants_cDNA_P Parameter: Plant Line Value: WS
  misc_feature: MA Experiment 20000087 PARAMETER Experiment Name: At_100uM_ABA_Mutants_cDNA_P Parameter: Timepoint (hr) Value: 6
  misc_feature: MA Experiment 20000087 PARAMETER Experiment Name: At_100uM_ABA_Mutants_cDNA_P Parameter: Tissue Value: Aerial
  misc_feature: MA Experiment 20000087 PARAMETER Experiment Name: At_100uM_ABA_Mutants_cDNA_P Parameter: Treatment Value: 100uM ABA vs. No Treatment
  misc_feature: MA Experiment ID: 20000111 Result: Up-regulated in Transcription
  misc_feature: MA Experiment 20000111 PARAMETER Experiment Name: At_42deg_Heat_cDNA_P Parameter: Temperature (deg C) Value: 42 vs. 22
  misc_feature: MA Experiment 20000111 PARAMETER Experiment Name: At_42deg_Heat_cDNA_P Parameter: Timepoint (hr) Value: 6
  misc_feature: MA Experiment 20000111 PARAMETER Experiment Name: At_42deg_Heat_cDNA_P Parameter: Tissue Value: Aerial
  misc_feature: MA Experiment ID: 20000180 Result: Down-regulated in Transcription
  misc_feature: MA Experiment 20000180 PARAMETER Experiment Name: At_Germinating_Seeds_P Parameter: Age (hr) Value: 24 vs. 0
  misc_feature: MA Experiment 20000180 PARAMETER Experiment Name: At_Germinating_Seeds_P Parameter: Tissue Value: Germinating Seeds
  misc_feature: MA Experiment ID: 20000495 Result: Down-regulated in Transcription
  misc_feature: MA Experiment 20000495 PARAMETER Experiment Name: At_Guard_Cells_P Parameter: Harvest Date Value: 8/2/2002
  misc_feature: MA Experiment 20000495 PARAMETER Experiment Name: At_Guard_Cells_P Parameter: Organism Value: A. thaliana
  misc_feature: MA Experiment 20000495 PARAMETER Experiment Name: At_Guard_Cells_P Parameter: Tissue Value: Guard Cells vs. Leaves
  misc_feature: MA Experiment ID: 20000496 Result: Down-regulated in Transcription
  misc_feature: MA Experiment 20000496 PARAMETER Experiment Name: At_Guard_Cells_P Parameter: Harvest Date Value: 7/19/2002
  misc_feature: MA Experiment 20000496 PARAMETER Experiment Name: At_Guard_Cells_P Parameter: Organism Value: Canola
  misc_feature: MA Experiment 20000496 PARAMETER Experiment Name: At_Guard_Cells_P Parameter: Tissue Value: Guard Cells vs. Leaves
  misc_feature: MA Experiment ID: 20001451 Result: Down-regulated in Transcription
  misc_feature: MA Experiment 20001451 PARAMETER Experiment Name: At_Far-red-induction_P Parameter: Age (day) Value: 7
  misc_feature: MA Experiment 20001451 PARAMETER Experiment Name: At_Far-red-induction_P Parameter: Light Value: Far-red vs. White
  misc_feature: MA Experiment 20001451 PARAMETER Experiment Name: At_Far-red-induction_P Parameter: Organism Value: A. thaliana
  misc_feature: MA Experiment 20001451 PARAMETER Experiment Name: At_Far-red-induction_P Parameter: Plant Line Value: Columbia
  misc_feature: MA Experiment 20001451 PARAMETER Experiment Name: At_Far-red-induction_P Parameter: Timepoint (hr) Value: 24
  misc_feature: MA Experiment 20001451 PARAMETER Experiment Name: At_Far-red-induction_P Parameter: Tissue Value: Whole Plant
  misc_feature: MA Experiment ID: 20001558 Result: Up-regulated in Transcription
  misc_feature: MA Experiment 20001558 PARAMETER Experiment Name: At_Drought_Soil_Dry_P Parameter: Age (day) Value: 27
  misc_feature: MA Experiment 20001558 PARAMETER Experiment Name: At_Drought_Soil_Dry_P Parameter: Organism Value: A. thaliana
  misc_feature: MA Experiment 20001558 PARAMETER Experiment Name: At_Drought_Soil_Dry_P Parameter: Plant Line Value: WS
  misc_feature: MA Experiment 20001558 PARAMETER Experiment Name: At_Drought_Soil_Dry_P Parameter: Post Timepoint (hr) Value: 6
  misc_feature: MA Experiment 20001558 PARAMETER Experiment Name: At_Drought_Soil_Dry_P Parameter: Post-Treatment Value: Re-Water vs. No Drought
  misc_feature: MA Experiment 20001558 PARAMETER Experiment Name: At_Drought_Soil_Dry_P Parameter: Timepoint (day) Value: 13
  misc_feature: MA Experiment 20001558 PARAMETER Experiment Name: At_Drought_Soil_Dry_P Parameter: Treatment Value: Drought vs. No Drought
  misc_feature: MA Experiment ID: 20001757 Result: Up-regulated in Transcription
  misc_feature: MA Experiment 20001757 PARAMETER Experiment Name: At_50mM_NH4NO3_L-to-H_P Parameter: Timepoint (hr) Value: 6
  misc_feature: MA Experiment 20001757 PARAMETER Experiment Name: At_50mM_NH4NO3_L-to-H_P Parameter: Tissue Value: Leaf
  misc_feature: MA Experiment 20001757 PARAMETER Experiment Name: At_50mM_NH4NO3_L-to-H_P Parameter: Treatment Value: 50mM NH4NO3 vs 100mM Mannitol
gaaacttcatctctgccgtcttaagaagattttgccagtgcgggaagcggcggagattgagagattagcgacgatggaggaaagcaaacagaactatgacctgacgccactaatagcgcctaacctggacagacacttggtgtttcctatattcgagttccttcaagagcgtcagctttaccctgatgagcagatcctgaagtctaaaatccagcttttgaaccagacgaacatggttgattacgccatggatattcacaagagtctctaccacactgaagacgctcctcaagaaatggtggagagaagaacagaggttgtcgctaggctcaaatctttggaggaggctgctgcaccactcgtgtcttttcttttgaaccctaacgctgtgcaggagctaagagctgacaagcagtacaatctccaaatgctcaaggaacgctaccagattggtccagaccagattgaggctttgtaccagtacgccaagtttcagtttgaatgtggcaactattctggtgctgctgattatctttaccagtacaggaccctgtgctctaaccttgagaggagtttgagtgccttgtggggaaagctcgcatctgaaatattgatgcaaaactgggatattgctcttgaagagcttaaccgtctcaaagagattattgactcaaagagtttttcatcgccgttaaaccaggtgcagaacaggatttggttgatgcattggggtctgtatatcttttttaaccatgataatggaaggacacagatcattgatctttttaaccaagacaagtatctgaatgccatccaaactagtgctccacacttgctgcgctacttggcaactgctttcattgtcaacaaaaggagaagaccacaattgaaagaattcattaaggtcattcagcaagagcactactcctacaaagatccaattatcgagttcctggcatgtgtgtttgtcaattatgactttgatggggctcaaaagaagatgaaagagtgtgaagaggtcattgtgaatgatccattccttggcaagcgagttgaggatggaaacttttcaactgtaccactgagagatgaatttcttgaaaatgcccgcctattcgtctttgaaacctattgcaaaattcatcaaaggattgacatgggggtacttgctgaaaaattgaatctgaactatgaggaggccgagagatggattgtgaacctaatccgcacctcaaagcttgatgccaagattgattctgagtcaggaactgtaatcatggagcctactcagcccaacgtgcatgagcagttgataaaccacaccaaaggcttatcaggacgaacatacaagttagtgaatcagctcttggaacacacacaggcgcaagcaactcgctagtcaaaattttgctgtggaagcctttccttgataaaactcaccttcggttgactggaattattttctttttcttgctctgagttcaccttttactttgaaaaagattattatggagttgttctatttgaaatgttggatccacagattggaacattttccaaccaaatcagcattttgt

SEQ ID NO: 21529 - protein, 465 aa, Arabidopsis thaliana
  peptide (1)..(465): Ceres Seq. ID no. 12575043
  misc_feature (312)..(428): Pfam Name: PCI domain Pfam Description: PCI domain
  misc_feature (312)..(428): Pfam Name: PCI domain Pfam Description: PCI domain
  misc_feature (32)..(451): Homolog of NCBI NO: 17389740 NR Description: eukaryotic translation initiation factor 3,
  misc_feature (32)..(459): Homolog of NCBI NO: 38494387 NR Description: Murine mammary tumor integration site 6 [Silurana
  misc_feature (32)..(451): Homolog of NCBI NO: 34866211 NR Description: similar to Eukaryotic translation initiation
  misc_feature (32)..(451): Homolog of NCBI NO: 12847562 NR Description: unnamed protein product [Mus musculus]
  misc_feature (32)..(451): Homolog of NCBI NO: 4503521 NR Description: murine mammary tumor integration site 6 (oncogene
  misc_feature (32)..(451): Homolog of NCBI NO: 17389740 NR Description: eukaryotic translation initiation factor 3,
  misc_feature (32)..(451): Homolog of NCBI NO: 34866211 NR Description: similar to Eukaryotic translation initiation
  misc_feature (32)..(451): Homolog of NCBI NO: 4503521 NR Description: murine mammary tumor integration site 6 (oncogene
  misc_feature (25)..(465): Homolog of NCBI NO: 18410687 NR Description: translation initiation factor 3 -like protein
  misc_feature (25)..(465): Homolog of NCBI NO: 7689381 NR Description: eIF3e [Arabidopsis thaliana]
  misc_feature (32)..(465): Homolog of NCBI NO: 34900328 NR Description: putative translation initiation factor 3
  misc_feature (32)..(457): Homolog of NCBI NO: 34394686 NR Description: putative eukaryotic initiation factor 3E
  misc_feature (144)..(465): Homolog of NCBI NO: 34900030 NR Description: putative eIF3e [Oryza sativa (japonica
  misc_feature (32)..(451): Homolog of NCBI NO: 12847562 NR Description: unnamed protein product [Mus musculus]
  misc_feature (32)..(459): Homolog of NCBI NO: 38494387 NR Description: Murine mammary tumor integration site 6 [Silurana
  misc_feature (144)..(465): Homolog of NCBI NO: 34900030 NR Description: putative eIF3e [Oryza sativa (japonica
  misc_feature (32)..(457): Homolog of NCBI NO: 34394686 NR Description: putative eukaryotic initiation factor 3E
  misc_feature (32)..(465): Homolog of NCBI NO: 34900328 NR Description: putative translation initiation factor 3
  misc_feature (25)..(465): Homolog of NCBI NO: 7689381 NR Description: eIF3e [Arabidopsis thaliana]
  misc_feature (25)..(465): Homolog of NCBI NO: 18410687 NR Description: translation initiation factor 3 -like protein
KLHLCRLKKILPVREAAEIERLATMEESKQNYDLTPLIAPNLDRHLVFPIFEFLQERQLYPDEQILKSKIQLLNQTNMVDYAMDIHKSLYHTEDAPQEMVERRTEVVARLKSLEEAAAPLVSFLLNPNAVQELRADKQYNLQMLKERYQIGPDQIEALYQYAKFQFECGNYSGAADYLYQYRTLCSNLERSLSALWGKLASEILMQNWDIALEELNRLKEIIDSKSFSSPLNQVQNRIWLMHWGLYIFFNHDNGRTQIIDLFNQDKYLNAIQTSAPHLLRYLATAFIVNKRRRPQLKEFIKVIQQEHYSYKDPIIEFLACVFVNYDFDGAQKKMKECEEVIVNDPFLGKRVEDGNFSTVPLRDEFLENARLFVFETYCKIHQRIDMGVLAEKLNLNYEEAERWIVNLIRTSKLDAKIDSESGTVIMEPTQPNVHEQLINHTKGLSGRTYKLVNQLLEHTQAQATR

SEQ ID NO: 21530 - protein, 441 aa, Arabidopsis thaliana
  peptide (1)..(441): Ceres Seq. ID no. 12575044
  misc_feature (288)..(404): Pfam Name: PCI domain Pfam Description: PCI domain
  misc_feature (288)..(404): Pfam Name: PCI domain Pfam Description: PCI domain
  misc_feature (8)..(427): Homolog of NCBI NO: 17389740 NR Description: eukaryotic translation initiation factor 3,
  misc_feature (8)..(435): Homolog of NCBI NO: 38494387 NR Description: Murine mammary tumor integration site 6 [Silurana
  misc_feature (8)..(427): Homolog of NCBI NO: 34866211 NR Description: similar to Eukaryotic translation initiation
  misc_feature (8)..(427): Homolog of NCBI NO: 12847562 NR Description: unnamed protein product [Mus musculus]
  misc_feature (8)..(427): Homolog of NCBI NO: 4503521 NR Description: murine mammary tumor integration site 6 (oncogene
  misc_feature (8)..(427): Homolog of NCBI NO: 17389740 NR Description: eukaryotic translation initiation factor 3,
  misc_feature (8)..(427): Homolog of NCBI NO: 34866211 NR Description: similar to Eukaryotic translation initiation
  misc_feature (8)..(427): Homolog of NCBI NO: 4503521 NR Description: murine mammary tumor integration site 6 (oncogene
  misc_feature (1)..(441): Homolog of NCBI NO: 18410687 NR Description: translation initiation factor 3 -like protein
  misc_feature (1)..(441): Homolog of NCBI NO: 7689381 NR Description: eIF3e [Arabidopsis thaliana]
  misc_feature (8)..(441): Homolog of NCBI NO: 34900328 NR Description: putative translation initiation factor 3
  misc_feature (8)..(433): Homolog of NCBI NO: 34394686 NR Description: putative eukaryotic initiation factor 3E
  misc_feature (120)..(441): Homolog of NCBI NO: 34900030 NR Description: putative eIF3e [Oryza sativa (japonica
  misc_feature (8)..(427): Homolog of NCBI NO: 12847562 NR Description: unnamed protein product [Mus musculus]
  misc_feature (8)..(435): Homolog of NCBI NO: 38494387 NR Description: Murine mammary tumor integration site 6 [Silurana
  misc_feature (120)..(441): Homolog of NCBI NO: 34900030 NR Description: putative eIF3e [Oryza sativa (japonica
  misc_feature (8)..(433): Homolog of NCBI NO: 34394686 NR Description: putative eukaryotic initiation factor 3E
  misc_feature (8)..(441): Homolog of NCBI NO: 34900328 NR Description: putative translation initiation factor 3
  misc_feature (1)..(441): Homolog of NCBI NO: 7689381 NR Description: eIF3e [Arabidopsis thaliana]
  misc_feature (1)..(441): Homolog of NCBI NO: 18410687 NR Description: translation initiation factor 3 -like protein
MEESKQNYDLTPLIAPNLDRHLVFPIFEFLQERQLYPDEQILKSKIQLLNQTNMVDYAMDIHKSLYHTEDAPQEMVERRTEVVARLKSLEEAAAPLVSFLLNPNAVQELRADKQYNLQMLKERYQIGPDQIEALYQYAKFQFECGNYSGAADYLYQYRTLCSNLERSLSALWGKLASEILMQNWDIALEELNRLKEIIDSKSFSSPLNQVQNRIWLMHWGLYIFFNHDNGRTQIIDLFNQDKYLNAIQTSAPHLLRYLATAFIVNKRRRPQLKEFIKVIQQEHYSYKDPIIEFLACVFVNYDFDGAQKKMKECEEVIVNDPFLGKRVEDGNFSTVPLRDEFLENARLFVFETYCKIHQRIDMGVLAEKLNLNYEEAERWIVNLIRTSKLDAKIDSESGTVIMEPTQPNVHEQLINHTKGLSGRTYKLVNQLLEHTQAQATR

SEQ ID NO: 21531 - protein, 388 aa, Arabidopsis thaliana
  peptide (1)..(388): Ceres Seq. ID no. 12575045
  misc_feature (235)..(351): Pfam Name: PCI domain Pfam Description: PCI domain
  misc_feature (235)..(351): Pfam Name: PCI domain Pfam Description: PCI domain
  misc_feature (1)..(374): Homolog of NCBI NO: 17389740 NR Description: eukaryotic translation initiation factor 3,
  misc_feature (1)..(382): Homolog of NCBI NO: 38494387 NR Description: Murine mammary tumor integration site 6 [Silurana
  misc_feature (1)..(374): Homolog of NCBI NO: 34866211 NR Description: similar to Eukaryotic translation initiation
  misc_feature (1)..(374): Homolog of NCBI NO: 12847562 NR Description: unnamed protein product [Mus musculus]
  misc_feature (1)..(374): Homolog of NCBI NO: 4503521 NR Description: murine mammary tumor integration site 6 (oncogene
  misc_feature (1)..(374): Homolog of NCBI NO: 17389740 NR Description: eukaryotic translation initiation factor 3,
  misc_feature (1)..(374): Homolog of NCBI NO: 34866211 NR Description: similar to Eukaryotic translation initiation
  misc_feature (1)..(374): Homolog of NCBI NO: 4503521 NR Description: murine mammary tumor integration site 6 (oncogene
  misc_feature (1)..(388): Homolog of NCBI NO: 18410687 NR Description: translation initiation factor 3 -like protein
  misc_feature (1)..(388): Homolog of NCBI NO: 7689381 NR Description: eIF3e [Arabidopsis thaliana]
  misc_feature (1)..(388): Homolog of NCBI NO: 34900328 NR Description: putative translation initiation factor 3
  misc_feature (1)..(380): Homolog of NCBI NO: 34394686 NR Description: putative eukaryotic initiation factor 3E
  misc_feature (67)..(388): Homolog of NCBI NO: 34900030 NR Description: putative eIF3e [Oryza sativa (japonica
  misc_feature (1)..(374): Homolog of NCBI NO: 12847562 NR Description: unnamed protein product [Mus musculus]
  misc_feature (1)..(382): Homolog of NCBI NO: 38494387 NR Description: Murine mammary tumor integration site 6 [Silurana
  misc_feature (67)..(388): Homolog of NCBI NO: 34900030 NR Description: putative eIF3e [Oryza sativa (japonica
  misc_feature (1)..(380): Homolog of NCBI NO: 34394686 NR Description: putative eukaryotic initiation factor 3E
  misc_feature (1)..(388): Homolog of NCBI NO: 34900328 NR Description: putative translation initiation factor 3
  misc_feature (1)..(388): Homolog of NCBI NO: 7689381 NR Description: eIF3e [Arabidopsis thaliana]
  misc_feature (1)..(388): Homolog of NCBI NO: 18410687 NR Description: translation initiation factor 3 -like protein
MVDYAMDIHKSLYHTEDAPQEMVERRTEVVARLKSLEEAAAPLVSFLLNPNAVQELRADKQYNLQMLKERYQIGPDQIEALYQYAKFQFECGNYSGAADYLYQYRTLCSNLERSLSALWGKLASEILMQNWDIALEELNRLKEIIDSKSFSSPLNQVQNRIWLMHWGLYIFFNHDNGRTQIIDLFNQDKYLNAIQTSAPHLLRYLATAFIVNKRRRPQLKEFIKVIQQEHYSYKDPIIEFLACVFVNYDFDGAQKKMKECEEVIVNDPFLGKRVEDGNFSTVPLRDEFLENARLFVFETYCKIHQRIDMGVLAEKLNLNYEEAERWIVNLIRTSKLDAKIDSESGTVIMEPTQPNVHEQLINHTKGLSGRTYKLVNQLLEHTQAQATR

SEQ ID NO: 21532 - DNA, 658 bp, Arabidopsis thaliana
  misc_feature (1)..(658): Ceres Seq. ID no. 12331893
  misc_feature: MA Experiment ID: 108461 Result: Up-regulated in Transcription
  misc_feature: MA Experiment 108461 PARAMETER Experiment Name: At_Germinating_Seeds_cDNA_P Parameter: Age (day) Value: 1 vs. 0
  misc_feature: MA Experiment 108461 PARAMETER Experiment Name: At_Germinating_Seeds_cDNA_P Parameter: Tissue Value: Germinating Seeds
  misc_feature: MA Experiment ID: 108462 Result: Up-regulated in Transcription
  misc_feature: MA Experiment 108462 PARAMETER Experiment Name: At_Germinating_Seeds_cDNA_P Parameter: Age (day) Value: 2 vs. 0
  misc_feature: MA Experiment 108462 PARAMETER Experiment Name: At_Germinating_Seeds_cDNA_P Parameter: Tissue Value: Germinating Seeds
  misc_feature: MA Experiment ID: 108464 Result: Up-regulated in Transcription
  misc_feature: MA Experiment 108464 PARAMETER Experiment Name: At_Germinating_Seeds_cDNA_P Parameter: Age (day) Value: 4 vs. 0
  misc_feature: MA Experiment 108464 PARAMETER Experiment Name: At_Germinating_Seeds_cDNA_P Parameter: Tissue Value: Germinating Seeds
  misc_feature: MA Experiment ID: 108488 Result: Down-regulated in Transcription
  misc_feature: MA Experiment ID: 108668 Result: Up-regulated in Transcription
  misc_feature: MA Experiment 108668 PARAMETER Experiment Name: At_2mM_SA_cDNA_P Parameter: Plant Line Value: WS
  misc_feature: MA Experiment 108668 PARAMETER Experiment Name: At_2mM_SA_cDNA_P Parameter: Timepoint (hr) Value: 6
  misc_feature: MA Experiment 108668 PARAMETER Experiment Name: At_2mM_SA_cDNA_P Parameter: Treatment Value: 2mM SA vs. No Treatment
  misc_feature: MA Experiment ID: 20000069 Result: Up-regulated in Transcription
  misc_feature: MA Experiment 20000069 PARAMETER Experiment Name: At_100uM_ABA_Mutants_cDNA_P Parameter: Plant Line Value: CS23
  misc_feature: MA Experiment 20000069 PARAMETER Experiment Name: At_100uM_ABA_Mutants_cDNA_P Parameter: Timepoint (hr) Value: 6
  misc_feature: MA Experiment 20000069 PARAMETER Experiment Name: At_100uM_ABA_Mutants_cDNA_P Parameter: Tissue Value: Aerial
  misc_feature: MA Experiment 20000069 PARAMETER Experiment Name: At_100uM_ABA_Mutants_cDNA_P Parameter: Treatment Value: 100uM ABA vs. No Treatment
  misc_feature: MA Experiment ID: 20000090 Result: Up-regulated in Transcription
  misc_feature: MA Experiment ID: 20000111 Result: Down-regulated in Transcription
  misc_feature: MA Experiment 20000111 PARAMETER Experiment Name: At_42deg_Heat_cDNA_P Parameter: Temperature (deg C) Value: 42 vs. 22
  misc_feature: MA Experiment 20000111 PARAMETER Experiment Name: At_42deg_Heat_cDNA_P Parameter: Timepoint (hr) Value: 6
  misc_feature: MA Experiment 20000111 PARAMETER Experiment Name: At_42deg_Heat_cDNA_P Parameter: Tissue Value: Aerial
  misc_feature: MA Experiment ID: 20000113 Result: Down-regulated in Transcription
  misc_feature: MA Experiment 20000113 PARAMETER Experiment Name: At_42deg_Heat_cDNA_P Parameter: Temperature (deg C) Value: 42 vs. 22
  misc_feature: MA Experiment 20000113 PARAMETER Experiment Name: At_42deg_Heat_cDNA_P Parameter: Timepoint (hr) Value: 8
  misc_feature: MA Experiment 20000113 PARAMETER Experiment Name: At_42deg_Heat_cDNA_P Parameter: Tissue Value: Aerial
  misc_feature: MA Experiment ID: 20000117 Result: Up-regulated in Transcription
  misc_feature: MA Experiment 20000117 PARAMETER Experiment Name: At_100uM_ABA_Mutants_cDNA_P Parameter: Plant Line Value: Columbia
  misc_feature: MA Experiment 20000117 PARAMETER Experiment Name: At_100uM_ABA_Mutants_cDNA_P Parameter: Timepoint (hr) Value: 6
  misc_feature: MA Experiment 20000117 PARAMETER Experiment Name: At_100uM_ABA_Mutants_cDNA_P Parameter: Tissue Value: Aerial
  misc_feature: MA Experiment 20000117 PARAMETER Experiment Name: At_100uM_ABA_Mutants_cDNA_P Parameter: Treatment Value: 100uM ABA vs. No Treatment
  misc_feature: MA Experiment ID: 20000180 Result: Up-regulated in Transcription
  misc_feature: MA Experiment 20000180 PARAMETER Experiment Name: At_Germinating_Seeds_P Parameter: Age (hr) Value: 24 vs. 0
  misc_feature: MA Experiment 20000180 PARAMETER Experiment Name: At_Germinating_Seeds_P Parameter: Tissue Value: Germinating Seeds
  misc_feature: MA Experiment ID: 20000184 Result: Down-regulated in Transcription
  misc_feature: MA Experiment 20000184 PARAMETER Experiment Name: At_Shoots__P Parameter: Age (day) Value: 7
  misc_feature: MA Experiment 20000184 PARAMETER Experiment Name: At_Shoots__P Parameter: Tissue Value: Shoots vs. Whole Plant
  misc_feature: MA Experiment ID: 20001911 Result: Down-regulated in Transcription
  misc_feature: MA Experiment 20001911 PARAMETER Experiment Name: At_Drought_Reproduction_P Parameter: Age (day) Value: 40
  misc_feature: MA Experiment 20001911 PARAMETER Experiment Name: At_Drought_Reproduction_P Parameter: Organism Value: A. thaliana
  misc_feature: MA Experiment 20001911 PARAMETER Experiment Name: At_Drought_Reproduction_P Parameter: Plant Line Value: WS
  misc_feature: MA Experiment 20001911 PARAMETER Experiment Name: At_Drought_Reproduction_P Parameter: Timepoint (day) Value: 10
  misc_feature: MA Experiment 20001911 PARAMETER Experiment Name: At_Drought_Reproduction_P Parameter: Tissue Value: Flowers
  misc_feature: MA Experiment 20001911 PARAMETER Experiment Name: At_Drought_Reproduction_P Parameter: Treatment Value: Drought vs. No Drought
tttcccagtgagaaatggcgacgaaggaaccagaatctgtttacgagttaagcatcgaggatgcaaaagggaacaacttagcactcagtcaatacaaagacaaagttcttttaattgtcaatgttgcttccaaatgtgggatgacaaactcaaactacactgaattgaatgagctttacaacaggtataaagataaaggtctggagattctagcatttccttgtaaccagtttggtgacgaggaaccgggaactaatgaccaaattactgactttgtttgtactcgcttcaaatctgaattccccattttcaacaagattgaagtaaacggagagaatgcttctcctctgtataagttcctgaagaaaggcaaatggggaatcttcggcgatgacattcaatggaactttgctaagtttcttgttgacaaaaacggtcaagctgtacaacgttattatccaactacttcccctcttacacttgagcatgacataaagaatcttctgaatatctcctgaatgatgaagctttgttgctgaatcgtattgtatttgattatgaacctctctcattcaataaagagccatgacattgacttggattgattagttctgtttgagagccaaatcggttatttagataaaccagcattattatc

SEQ ID NO: 21533 - protein, 167 aa, Arabidopsis thaliana
  peptide (1)..(167): Ceres Seq. ID no. 12331894
  misc_feature (8)..(117): Pfam Name: Glutathione peroxidase Pfam Description: Glutathione peroxidase
  misc_feature (1)..(164): Homolog of NCBI NO: 34786892 NR Description: phospholipid hydroperoxide glutathione peroxidase
  misc_feature (2)..(167): Homolog of NCBI NO: 30681827 NR Description: glutathione peroxidase, putative [Arabidopsis
  misc_feature (2)..(167): Homolog of NCBI NO: 20138157 NR Description: Probable phospholipid hydroperoxide glutathione
  misc_feature (1)..(164): Homolog of NCBI NO: 485512 NR Description: glutathione peroxidase (EC 1.11.1.9) - sweet
  misc_feature (1)..(164): Homolog of NCBI NO: 544437 NR Description: Probable phospholipid hydroperoxide glutathione
  misc_feature (2)..(167): Homolog of NCBI NO: 20138384 NR Description: Probable phospholipid hydroperoxide glutathione
  misc_feature (3)..(167): Homolog of NCBI NO: 232190 NR Description: Probable phospholipid hydroperoxide glutathione
  misc_feature (1)..(166): Homolog of NCBI NO: 3913794 NR Description: GLUTATHIONE PEROXIDASE 1
  misc_feature (1)..(167): Homolog of NCBI NO: 25285634 NR Description: protein F2K11.16 [imported] - Arabidopsis
  misc_feature (1)..(167): Homolog of NCBI NO: 18407822 NR Description: glutathione peroxidase, putative
MATKEPESVYELSIEDAKGNNLALSQYKDKVLLIVNVASKCGMTNSNYTELNELYNRYKDKGLEILAFPCNQFGDEEPGTNDQITDFVCTRFKSEFPIFNKIEVNGENASPLYKFLKKGKWGIFGDDIQWNFAKFLVDKNGQAVQRYYPTTSPLTLEHDIKNLLNIS

SEQ ID NO: 21534 - protein, 125 aa, Arabidopsis thaliana
  peptide (1)..(125): Ceres Seq. ID no. 12331895
  misc_feature (1)..(75): Pfam Name: Glutathione peroxidase Pfam Description: Glutathione peroxidase
  misc_feature (1)..(122): Homolog of NCBI NO: 485512 NR Description: glutathione peroxidase (EC 1.11.1.9) - sweet
  misc_feature (1)..(125): Homolog of NCBI NO: 232190 NR Description: Probable phospholipid hydroperoxide glutathione
  misc_feature (1)..(122): Homolog of NCBI NO: 544437 NR Description: Probable phospholipid hydroperoxide glutathione
  misc_feature (1)..(125): Homolog of NCBI NO: 20138384 NR Description: Probable phospholipid hydroperoxide glutathione
  misc_feature (1)..(122): Homolog of NCBI NO: 34786892 NR Description: phospholipid hydroperoxide glutathione peroxidase
  misc_feature (1)..(125): Homolog of NCBI NO: 30681827 NR Description: glutathione peroxidase, putative [Arabidopsis
  misc_feature (1)..(125): Homolog of NCBI NO: 20138157 NR Description: Probable phospholipid hydroperoxide glutathione
  misc_feature (1)..(124): Homolog of NCBI NO: 3913794 NR Description: GLUTATHIONE PEROXIDASE 1
  misc_feature (1)..(125): Homolog of NCBI NO: 25285634 NR Description: protein F2K11.16 [imported] - Arabidopsis
  misc_feature (1)..(125): Homolog of NCBI NO: 18407822 NR Description: glutathione peroxidase, putative
MTNSNYTELNELYNRYKDKGLEILAFPCNQFGDEEPGTNDQITDFVCTRFKSEFPIFNKIEVNGENASPLYKFLKKGKWGIFGDDIQWNFAKFLVDKNGQAVQRYYPTTSPLTLEHDIKNLLNIS

SEQ ID NO: 21535 - DNA, 1018 bp, Arabidopsis thaliana
  misc_feature (1)..(1018): Ceres Seq. ID no. 13490011
  misc_feature: MA Experiment ID: 108488 Result: Down-regulated in Transcription
  misc_feature: MA Experiment ID: 108573 Result: Up-regulated in Transcription
  misc_feature: MA Experiment 108573 PARAMETER Experiment Name: At_Drought_cDNA_P Parameter: Timepoint (hr) Value: 6
  misc_feature: MA Experiment 108573 PARAMETER Experiment Name: At_Drought_cDNA_P Parameter: Tissue Value: Aerial
  misc_feature: MA Experiment 108573 PARAMETER Experiment Name: At_Drought_cDNA_P Parameter: Treatment Value: Drought vs. No Drought
  misc_feature: MA Experiment ID: 20000224 Result: Down-regulated in Transcription
  misc_feature: MA Experiment ID: 20000234 Result: Down-regulated in Transcription
  misc_feature: MA Experiment 20000234 PARAMETER Experiment Name: At_Siliques_P Parameter: Age (day) Value: 21
  misc_feature: MA Experiment 20000234 PARAMETER Experiment Name: At_Siliques_P Parameter: Organism Value: A. thaliana
  misc_feature: MA Experiment 20000234 PARAMETER Experiment Name: At_Siliques_P Parameter: Plant Line Value: WS
  misc_feature: MA Experiment 20000234 PARAMETER Experiment Name: At_Siliques_P Parameter: Tissue Value: Less Than 5mm Siliques vs. Whole Plant
  misc_feature: MA Experiment ID: 20000265 Result: Down-regulated in Transcription
  misc_feature: MA Experiment 20000265 PARAMETER Experiment Name: At_Open_Flower_P Parameter: Age (day) Value: 21
  misc_feature: MA Experiment 20000265 PARAMETER Experiment Name: At_Open_Flower_P Parameter: Plant Line Value: WS
  misc_feature: MA Experiment 20000265 PARAMETER Experiment Name: At_Open_Flower_P Parameter: Tissue Value: Closed Flower vs. Whole Plant
  misc_feature: MA Experiment ID: 20000437 Result: Up-regulated in Transcription
  misc_feature: MA Experiment 20000437 PARAMETER Experiment Name: At_Drought_P Parameter: Age (day) Value: 8
  misc_feature: MA Experiment 20000437 PARAMETER Experiment Name: At_Drought_P Parameter: Organism Value: A. thaliana
  misc_feature: MA Experiment 20000437 PARAMETER Experiment Name: At_Drought_P Parameter: Plant Line Value: WS
  misc_feature: MA Experiment 20000437 PARAMETER Experiment Name: At_Drought_P Parameter: Timepoint (hr) Value: 24
  misc_feature: MA Experiment 20000437 PARAMETER Experiment Name: At_Drought_P Parameter: Tissue Value: Whole Plant
  misc_feature: MA Experiment 20000437 PARAMETER Experiment Name: At_Drought_P Parameter: Treatment Value: Drought vs. No Drought
  misc_feature: MA Experiment ID: 20001905 Result: Up-regulated in Transcription
  misc_feature: MA Experiment 20001905 PARAMETER Experiment Name: At_Drought_Reproduction_P Parameter: Age (day) Value: 40
  misc_feature: MA Experiment 20001905 PARAMETER Experiment Name: At_Drought_Reproduction_P Parameter: Organism Value: A. thaliana
  misc_feature: MA Experiment 20001905 PARAMETER Experiment Name: At_Drought_Reproduction_P Parameter: Plant Line Value: WS
  misc_feature: MA Experiment 20001905 PARAMETER Experiment Name: At_Drought_Reproduction_P Parameter: Timepoint (day) Value: 10
  misc_feature: MA Experiment 20001905 PARAMETER Experiment Name: At_Drought_Reproduction_P Parameter: Tissue Value: Rosettes
  misc_feature: MA Experiment 20001905 PARAMETER Experiment Name: At_Drought_Reproduction_P Parameter: Treatment Value: Drought vs. No Drought
attacttaacccaaaccaaaaaaataaaaagttcatttcgaaagaagaagaagaaaacatcaaatcatgagtgggcaagagaatcatgatcatggccggatctcttctacgcccgccgccgcgtcggagccttccaaggctgctgctcactcctctgactacgctccttaccctaagctcgatcctaccgacgtcactcctcctcctcctcagcctattcccaccggtgccgccgcaaccaccatgccagcggaatccaatccttacgtttctccttcccctgccccaaggaatacgatggattcggtgaaggatacgttagggaaatgggggaaaatggctgccgacgccaccaagaaggcggaggatctcgccggaaatttttggcagcacttgaaaacaggcccaagtgtagcagatgctgctgtttcacgaattgctcaggggacaaaaatacttgcagagggtggatacgagaaggtcttcaagcaaacatttgattgccttcctgatgaaaaacttctcaagacctatgcttgctacttgtctacatctgctggtcctgtcctgggagttatgtatctttcgactcacaagcttgcgttctctagtgacaatcctctctcttacaaagagggtgagcagaccctgtggagctattacaaggtggtacttccggcgaatcagctgaaggcagtgaacccatcaacaagtagagtgaacacatctgataaatacatacaagtgatttccatcgacaaccacgagttctggtttatggggtttgtgacttatgaaagcgctgtgaagagccttcaagaagcggtgcagtcacatggtccgtgaaggtccactggtataaatggcagctcttagtgatattgtgcattaatatatggaacagtgtgttttagtatttgataccatttcaatgtgttctacattttgtcctcttggcgtttactcataaacattgcttttgttcatttccttttgtataaaattatttcttattttt

SEQ ID NO: 21536 - protein, 259 aa, Arabidopsis thaliana
  peptide (1)..(259): Ceres Seq. ID no. 13490012
  misc_feature (138)..(215): Pfam Name: GRAM domain Pfam Description: GRAM domain
  misc_feature (121)..(255): Homolog of NCBI NO: 33146631 NR Description: putative FH protein interacting protein FIP1
  misc_feature (201)..(256): Homolog of NCBI NO: 15236123 NR Description: GRAM domain-containing protein [Arabidopsis
  misc_feature (24)..(185): Homolog of NCBI NO: 15236123 NR Description: GRAM domain-containing protein [Arabidopsis
  misc_feature (35)..(255): Homolog of NCBI NO: 29788871 NR Description: putative ABA-responsive protein
  misc_feature (12)..(255): Homolog of NCBI NO: 34906818 NR Description: contains EST C91668(E31216)~similar to FH protein
  misc_feature (52)..(259): Homolog of NCBI NO: 26452129 NR Description: unknown protein [Arabidopsis thaliana]
  misc_feature (52)..(259): Homolog of NCBI NO: 21592789 NR Description: unknown [Arabidopsis thaliana]
  misc_feature (52)..(259): Homolog of NCBI NO: 18399985 NR Description: GRAM domain-containing protein [Arabidopsis
  misc_feature (8)..(255): Homolog of NCBI NO: 34902414 NR Description: Putative FH protein interacting protein FIP1
  misc_feature (1)..(259): Homolog of NCBI NO: 15217869 NR Description: GRAM domain-containing protein [Arabidopsis
MSGQENHDHGRISSTPAAASEPSKAAAHSSDYAPYPKLDPTDVTPPPPQPIPTGAAATTMPAESNPYVSPSPAPRNTMDSVKDTLGKWGKMAADATKKAEDLAGNFWQHLKTGPSVADAAVSRIAQGTKILAEGGYEKVFKQTFDCLPDEKLLKTYACYLSTSAGPVLGVMYLSTHKLAFSSDNPLSYKEGEQTLWSYYKVVLPANQLKAVNPSTSRVNTSDKYIQVISIDNHEFWFMGFVTYESAVKSLQEAVQSHGP

SEQ ID NO: 21537 - protein, 200 aa, Arabidopsis thaliana
  peptide (1)..(200): Ceres Seq. ID no. 13490013
  misc_feature (79)..(156): Pfam Name: GRAM domain Pfam Description: GRAM domain
  misc_feature (62)..(196): Homolog of NCBI NO: 33146631 NR Description: putative FH protein interacting protein FIP1
  misc_feature (142)..(197): Homolog of NCBI NO: 15236123 NR Description: GRAM domain-containing protein [Arabidopsis
  misc_feature (1)..(126): Homolog of NCBI NO: 15236123 NR Description: GRAM domain-containing protein [Arabidopsis
  misc_feature (1)..(196): Homolog of NCBI NO: 29788871 NR Description: putative ABA-responsive protein
  misc_feature (1)..(196): Homolog of NCBI NO: 34906818 NR Description: contains EST C91668(E31216)~similar to FH protein
  misc_feature (1)..(200): Homolog of NCBI NO: 26452129 NR Description: unknown protein [Arabidopsis thaliana]
  misc_feature (1)..(200): Homolog of NCBI NO: 21592789 NR Description: unknown [Arabidopsis thaliana]
  misc_feature (1)..(200): Homolog of NCBI NO: 18399985 NR Description: GRAM domain-containing protein [Arabidopsis
  misc_feature (1)..(196): Homolog of NCBI NO: 34902414 NR Description: Putative FH protein interacting protein FIP1
  misc_feature (1)..(200): Homolog of NCBI NO: 15217869 NR Description: GRAM domain-containing protein [Arabidopsis
MPAESNPYVSPSPAPRNTMDSVKDTLGKWGKMAADATKKAEDLAGNFWQHLKTGPSVADAAVSRIAQGTKILAEGGYEKVFKQTFDCLPDEKLLKTYACYLSTSAGPVLGVMYLSTHKLAFSSDNPLSYKEGEQTLWSYYKVVLPANQLKAVNPSTSRVNTSDKYIQVISIDNHEFWFMGFVTYESAVKSLQEAVQSHGP

SEQ ID NO: 21538 - protein, 182 aa, Arabidopsis thaliana
  peptide (1)..(182): Ceres Seq. ID no. 13490014
  misc_feature (61)..(138): Pfam Name: GRAM domain Pfam Description: GRAM domain
  misc_feature (44)..(178): Homolog of NCBI NO: 33146631 NR Description: putative FH protein interacting protein FIP1
  misc_feature (124)..(179): Homolog of NCBI NO: 15236123 NR Description: GRAM domain-containing protein [Arabidopsis
  misc_feature (1)..(108): Homolog of NCBI NO: 15236123 NR Description: GRAM domain-containing protein [Arabidopsis
  misc_feature (1)..(178): Homolog of NCBI NO: 29788871 NR Description: putative ABA-responsive protein
  misc_feature (1)..(178): Homolog of NCBI NO: 34906818 NR Description: contains EST C91668(E31216)~similar to FH protein
  misc_feature (1)..(182): Homolog of NCBI NO: 26452129 NR Description: unknown protein [Arabidopsis thaliana]
  misc_feature (1)..(182): Homolog of NCBI NO: 21592789 NR Description: unknown [Arabidopsis thaliana]
  misc_feature (1)..(182): Homolog of NCBI NO: 18399985 NR Description: GRAM domain-containing protein [Arabidopsis
  misc_feature (1)..(178): Homolog of NCBI NO: 34902414 NR Description: Putative FH protein interacting protein FIP1
  misc_feature (1)..(182): Homolog of NCBI NO: 15217869 NR Description: GRAM domain-containing protein [Arabidopsis
MDSVKDTLGKWGKMAADATKKAEDLAGNFWQHLKTGPSVADAAVSRIAQGTKILAEGGYEKVFKQTFDCLPDEKLLKTYACYLSTSAGPVLGVMYLSTHKLAFSSDNPLSYKEGEQTLWSYYKVVLPANQLKAVNPSTSRVNTSDKYIQVISIDNHEFWFMGFVTYESAVKSLQEAVQSHGP

SEQ ID NO: 21539 - DNA, 871 bp, Arabidopsis thaliana
  misc_feature (1)..(871): Ceres Seq. ID no. 12561955
  misc_feature: MA Experiment ID: 108461 Result: Up-regulated in Transcription
  misc_feature: MA Experiment 108461 PARAMETER Experiment Name: At_Germinating_Seeds_cDNA_P Parameter: Age (day) Value: 1 vs. 0
  misc_feature: MA Experiment 108461 PARAMETER Experiment Name: At_Germinating_Seeds_cDNA_P Parameter: Tissue Value: Germinating Seeds
  misc_feature: MA Experiment ID: 108462 Result: Up-regulated in Transcription
  misc_feature: MA Experiment 108462 PARAMETER Experiment Name: At_Germinating_Seeds_cDNA_P Parameter: Age (day) Value: 2 vs. 0
  misc_feature: MA Experiment 108462 PARAMETER Experiment Name: At_Germinating_Seeds_cDNA_P Parameter: Tissue Value: Germinating Seeds
  misc_feature: MA Experiment ID: 108463 Result: Up-regulated in Transcription
  misc_feature: MA Experiment 108463 PARAMETER Experiment Name: At_Germinating_Seeds_cDNA_P Parameter: Age (day) Value: 3 vs. 0
  misc_feature: MA Experiment 108463 PARAMETER Experiment Name: At_Germinating_Seeds_cDNA_P Parameter: Tissue Value: Germinating Seeds
  misc_feature: MA Experiment ID: 108464 Result: Up-regulated in Transcription
  misc_feature: MA Experiment 108464 PARAMETER Experiment Name: At_Germinating_Seeds_cDNA_P Parameter: Age (day) Value: 4 vs. 0
  misc_feature: MA Experiment 108464 PARAMETER Experiment Name: At_Germinating_Seeds_cDNA_P Parameter: Tissue Value: Germinating Seeds
  misc_feature: MA Experiment ID: 108607 Result: Up-regulated in Transcription
  misc_feature: MA Experiment 108607 PARAMETER Experiment Name: At_100uM_ABA_cDNA_P Parameter: Timepoint (hr) Value: 4
  misc_feature: MA Experiment 108607 PARAMETER Experiment Name: At_100uM_ABA_cDNA_P Parameter: Tissue Value: Aerial
  misc_feature: MA Experiment 108607 PARAMETER Experiment Name: At_100uM_ABA_cDNA_P Parameter: Treatment Value: 100uM ABA vs. No Treatment
  misc_feature: MA Experiment ID: 20000173 Result: Down-regulated in Transcription
  misc_feature: MA Experiment 20000173 PARAMETER Experiment Name: At_42deg_Heat_P Parameter: Age (day) Value: 14
  misc_feature: MA Experiment 20000173 PARAMETER Experiment Name: At_42deg_Heat_P Parameter: Organism Value: A. thaliana
  misc_feature: MA Experiment 20000173 PARAMETER Experiment Name: At_42deg_Heat_P Parameter: Plant Line Value: WS
  misc_feature: MA Experiment 20000173 PARAMETER Experiment Name: At_42deg_Heat_P Parameter: Temperature (deg C) Value: 42 vs. 22
  misc_feature: MA Experiment 20000173 PARAMETER Experiment Name: At_42deg_Heat_P Parameter: Timepoint (hr) Value: 6
  misc_feature: MA Experiment 20000173 PARAMETER Experiment Name: At_42deg_Heat_P Parameter: Tissue Value: Aerial
  misc_feature: MA Experiment ID: 20000179 Result: Up-regulated in Transcription
  misc_feature: MA Experiment 20000179 PARAMETER Experiment Name: At_Germinating_Seeds_P Parameter: Age (hr) Value: 6 vs. 0
  misc_feature: MA Experiment 20000179 PARAMETER Experiment Name: At_Germinating_Seeds_P Parameter: Tissue Value: Germinating Seeds
  misc_feature: MA Experiment ID: 20000180 Result: Up-regulated in Transcription
  misc_feature: MA Experiment 20000180 PARAMETER Experiment Name: At_Germinating_Seeds_P Parameter: Age (hr) Value: 24 vs. 0
  misc_feature: MA Experiment 20000180 PARAMETER Experiment Name: At_Germinating_Seeds_P Parameter: Tissue Value: Germinating Seeds
  misc_feature: MA Experiment ID: 20000184 Result: Down-regulated in Transcription
  misc_feature: MA Experiment 20000184 PARAMETER Experiment Name: At_Shoots__P Parameter: Age (day) Value: 7
  misc_feature: MA Experiment 20000184 PARAMETER Experiment Name: At_Shoots__P Parameter: Tissue Value: Shoots vs. Whole Plant
  misc_feature: MA Experiment ID: 20000224 Result: Up-regulated in Transcription
  misc_feature: MA Experiment ID: 20000264 Result: Up-regulated in Transcription
  misc_feature: MA Experiment 20000264 PARAMETER Experiment Name: At_Open_Flower_P Parameter: Age (day) Value: 21
  misc_feature: MA Experiment 20000264 PARAMETER Experiment Name: At_Open_Flower_P Parameter: Plant Line Value: WS
  misc_feature: MA Experiment 20000264 PARAMETER Experiment Name: At_Open_Flower_P Parameter: Tissue Value: Open Flower vs. Whole Plant
  misc_feature: MA Experiment ID: 20000286 Result: Up-regulated in Transcription
  misc_feature: MA Experiment 20000286 PARAMETER Experiment Name: At_Open_Flower_P Parameter: Age (day) Value: 21
  misc_feature: MA Experiment 20000286 PARAMETER Experiment Name: At_Open_Flower_P Parameter: Plant Line Value: WS
  misc_feature: MA Experiment 20000286 PARAMETER Experiment Name: At_Open_Flower_P Parameter: Tissue Value: Half Open vs. Whole Plant
  misc_feature: MA Experiment ID: 20000573 Result: Down-regulated in Transcription
  misc_feature: MA Experiment 20000573 PARAMETER Experiment Name: At_100uM_ABA_Mutants__P Parameter: Organism Value: A. thaliana
  misc_feature: MA Experiment 20000573 PARAMETER Experiment Name: At_100uM_ABA_Mutants__P Parameter: Plant Line Value: CS22 vs. Ler wt
  misc_feature: MA Experiment 20000573 PARAMETER Experiment Name: At_100uM_ABA_Mutants__P Parameter: Timepoint (hr) Value: N/A
  misc_feature: MA Experiment 20000573 PARAMETER Experiment Name: At_100uM_ABA_Mutants__P Parameter: Tissue Value: Whole Plant
  misc_feature: MA Experiment 20000573 PARAMETER Experiment Name: At_100uM_ABA_Mutants__P Parameter: Treatment Value: None
  misc_feature: MA Experiment ID: 20000574 Result: Down-regulated in Transcription
  misc_feature: MA Experiment 20000574 PARAMETER Experiment Name: At_100uM_ABA_Mutants__P Parameter: Organism Value: A. thaliana
  misc_feature: MA Experiment 20000574 PARAMETER Experiment Name: At_100uM_ABA_Mutants__P Parameter: Plant Line Value: CS23 vs. Ler wt
  misc_feature: MA Experiment 20000574 PARAMETER Experiment Name: At_100uM_ABA_Mutants__P Parameter: Timepoint (hr) Value: N/A
  misc_feature: MA Experiment 20000574 PARAMETER Experiment Name: At_100uM_ABA_Mutants__P Parameter: Tissue Value: Whole Plant
  misc_feature: MA Experiment 20000574 PARAMETER Experiment Name: At_100uM_ABA_Mutants__P Parameter: Treatment Value: None
  misc_feature: MA Experiment ID: 20000794 Result: Up-regulated in Transcription
  misc_feature: MA Experiment 20000794 PARAMETER Experiment Name: At_Petals_P Parameter: Age (day) Value: 23-25 days
  misc_feature: MA Experiment 20000794 PARAMETER Experiment Name: At_Petals_P Parameter: Plant Line Value: WS
  misc_feature: MA Experiment 20000794 PARAMETER Experiment Name: At_Petals_P Parameter: Tissue Value: Petals vs. Whole plant
  misc_feature: MA Experiment ID: 20001911 Result: Down-regulated in Transcription
  misc_feature: MA Experiment 20001911 PARAMETER Experiment Name: At_Drought_Reproduction_P Parameter: Age (day) Value: 40
  misc_feature: MA Experiment 20001911 PARAMETER Experiment Name: At_Drought_Reproduction_P Parameter: Organism Value: A. thaliana
  misc_feature: MA Experiment 20001911 PARAMETER Experiment Name: At_Drought_Reproduction_P Parameter: Plant Line Value: WS
  misc_feature: MA Experiment 20001911 PARAMETER Experiment Name: At_Drought_Reproduction_P Parameter: Timepoint (day) Value: 10
  misc_feature: MA Experiment 20001911 PARAMETER Experiment Name: At_Drought_Reproduction_P Parameter: Tissue Value: Flowers
  misc_feature: MA Experiment 20001911 PARAMETER Experiment Name: At_Drought_Reproduction_P Parameter: Treatment Value: Drought vs. No Drought
aaaataaagatatgatggatctgttactaaaacaaagtcgctttattcagatctgaagaagaagaagaagaagaagaaacatagttgaagtctctgttaatatgtcttcaacaacaacagattctacagaattgcaaaatctgatcaaactgtttcaaaattgcgaaactcagcctcgtcaacattttcctgcaaaatcttcagctgtattagtttgtctataccaagaacaaagagaagacaaaaacgagctacgcgtaatcttaaccaaacgctccactactctctcttctcatcctggggaagtagcattgcctggaggaaaaagagaccaagaagataaagatgacatagctactgcgttgagagaagctcgtgaagagatcggtttagatccttctcttgttacaatcatttctgttcttgaaccatttgttaacaagaagggaatgtcggtagcaccagttatcggtattctacacgataagaaagcgtttaatccgttaccaaatccagctgaagtggaagagatctttgatgtgccattagagatgttcctcaaggacaagaacaggcgagcagaggaacgagagcatgaaggagagagatatcttcttcagtactttgattactattccgaagataaagagagaaactttaccatatgggcactcactgctggtattctgatcagagttgcctccattgtttatcagagattaccgaagtttcaagaacgtaagccgagtttctggaatcagcctaactgattcttgacttgatctgattgagaaaaatgaaactttcatgtataataagcgatacaaatcgaatcttctttaaatgtgtttcaagaatctatctttactcc

SEQ ID NO: 21540 - protein, 222 aa, Arabidopsis thaliana
  peptide (1)..(222): Ceres Seq. ID no. 12561956
  misc_feature (32)..(170): Pfam Name: NUDIX domain Pfam Description: NUDIX domain
  misc_feature (27)..(204): Homolog of NCBI NO: 23470438 NR Description: hypothetical protein [Pseudomonas syringae pv.
  misc_feature (22)..(219): Homolog of NCBI NO: 23059149 NR Description: hypothetical protein [Pseudomonas fluorescens
  misc_feature (29)..(221): Homolog of NCBI NO: 40253324 NR Description: putative phosphohydrolase
  misc_feature (22)..(216): Homolog of NCBI NO: 18403412 NR Description: expressed protein
  misc_feature (29)..(217): Homolog of NCBI NO: 10764850 NR Description: F1K23.5 [Arabidopsis thaliana]
  misc_feature (29)..(217): Homolog of NCBI NO: 26450576 NR Description: unknown protein [Arabidopsis thaliana]
  misc_feature (29)..(217): Homolog of NCBI NO: 30690557 NR Description: MutT/nudix family protein [Arabidopsis thaliana]
  misc_feature (29)..(217): Homolog of NCBI NO: 18396900 NR Description: Expressed protein
  misc_feature (1)..(222): Homolog of NCBI NO: 21553389 NR Description: unknown [Arabidopsis thaliana]
  misc_feature (1)..(222): Homolog of NCBI NO: 15242543 NR Description: putative protein
MSSTTTDSTELQNLIKLFQNCETQPRQHFPAKSSAVLVCLYQEQREDKNELRVILTKRSTTLSSHPGEVALPGGKRDQEDKDDIATALREAREEIGLDPSLVTIISVLEPFVNKKGMSVAPVIGILHDKKAFNPLPNPAEVEEIFDVPLEMFLKDKNRRAEEREHEGERYLLQYFDYYSEDKERNFTIWALTAGILIRVASIVYQRLPKFQERKPSFWNQPN

SEQ ID NO: 21541 - DNA, 719 bp, Arabidopsis thaliana
  misc_feature (1)..(719): Ceres Seq. ID no. 12329455
  misc_feature: MA Experiment ID: 108434 Result: Up-regulated in Transcription
  misc_feature: MA Experiment 108434 PARAMETER Experiment Name: At_Root_Tips_cDNA_P Parameter: Tissue Value: Root Tips
  misc_feature: MA Experiment ID: 108435 Result: Up-regulated in Transcription
  misc_feature: MA Experiment 108435 PARAMETER Experiment Name: At_stm_Mutants_cDNA_P Parameter: Plant Line Value: wt Landsburg vs stm
  misc_feature: MA Experiment 108435 PARAMETER Experiment Name: At_stm_Mutants_cDNA_P Parameter: Tissue Value: Shoot Apical Meristem Region
  misc_feature: MA Experiment ID: 108461 Result: Down-regulated in Transcription
  misc_feature: MA Experiment 108461 PARAMETER Experiment Name: At_Germinating_Seeds_cDNA_P Parameter: Age (day) Value: 1 vs. 0
  misc_feature: MA Experiment 108461 PARAMETER Experiment Name: At_Germinating_Seeds_cDNA_P Parameter: Tissue Value: Germinating Seeds
  misc_feature: MA Experiment ID: 108462 Result: Down-regulated in Transcription
  misc_feature: MA Experiment 108462 PARAMETER Experiment Name: At_Germinating_Seeds_cDNA_P Parameter: Age (day) Value: 2 vs. 0
  misc_feature: MA Experiment 108462 PARAMETER Experiment Name: At_Germinating_Seeds_cDNA_P Parameter: Tissue Value: Germinating Seeds
  misc_feature: MA Experiment ID: 108463 Result: Down-regulated in Transcription
  misc_feature: MA Experiment 108463 PARAMETER Experiment Name: At_Germinating_Seeds_cDNA_P Parameter: Age (day) Value: 3 vs. 0
  misc_feature: MA Experiment 108463 PARAMETER Experiment Name: At_Germinating_Seeds_cDNA_P Parameter: Tissue Value: Germinating Seeds
  misc_feature: MA Experiment ID: 108464 Result: Down-regulated in Transcription
  misc_feature: MA Experiment 108464 PARAMETER Experiment Name: At_Germinating_Seeds_cDNA_P Parameter: Age (day) Value: 4 vs. 0
  misc_feature: MA Experiment 108464 PARAMETER Experiment Name: At_Germinating_Seeds_cDNA_P Parameter: Tissue Value: Germinating Seeds
  misc_feature: MA Experiment ID: 108488 Result: Up-regulated in Transcription
  misc_feature: MA Experiment ID: 108572 Result: Down-regulated in Transcription
  misc_feature: MA Experiment 108572 PARAMETER Experiment Name: At_Drought_cDNA_P Parameter: Timepoint (hr) Value: 1
  misc_feature: MA Experiment 108572 PARAMETER Experiment Name: At_Drought_cDNA_P Parameter: Tissue Value: Aerial
  misc_feature: MA Experiment 108572 PARAMETER Experiment Name: At_Drought_cDNA_P Parameter: Treatment Value: Drought vs. No Drought
  misc_feature: MA Experiment ID: 108573 Result: Down-regulated in Transcription
  misc_feature: MA Experiment 108573 PARAMETER Experiment Name: At_Drought_cDNA_P Parameter: Timepoint (hr) Value: 6
  misc_feature: MA Experiment 108573 PARAMETER Experiment Name: At_Drought_cDNA_P Parameter: Tissue Value: Aerial
  misc_feature: MA Experiment 108573 PARAMETER Experiment Name: At_Drought_cDNA_P Parameter: Treatment Value: Drought vs. No Drought
  misc_feature: MA Experiment ID: 108579 Result: Up-regulated in Transcription
  misc_feature: MA Experiment 108579 PARAMETER Experiment Name: At_4deg_Cold_cDNA_P Parameter: Temperature (deg C) Value: 4 vs. 22
  misc_feature: MA Experiment 108579 PARAMETER Experiment Name: At_4deg_Cold_cDNA_P Parameter: Timepoint (hr) Value: 6
  misc_feature: MA Experiment 108579 PARAMETER Experiment Name: At_4deg_Cold_cDNA_P Parameter: Tissue Value: Aerial
  misc_feature: MA Experiment ID: 108607 Result: Down-regulated in Transcription
  misc_feature: MA Experiment 108607 PARAMETER Experiment Name: At_100uM_ABA_cDNA_P Parameter: Timepoint (hr) Value: 4
  misc_feature: MA Experiment 108607 PARAMETER Experiment Name: At_100uM_ABA_cDNA_P Parameter: Tissue Value: Aerial
  misc_feature: MA Experiment 108607 PARAMETER Experiment Name: At_100uM_ABA_cDNA_P Parameter: Treatment Value: 100uM ABA vs. No Treatment
  misc_feature: MA Experiment ID: 20000111 Result: Up-regulated in Transcription
  misc_feature: MA Experiment 20000111 PARAMETER Experiment Name: At_42deg_Heat_cDNA_P Parameter: Temperature (deg C) Value: 42 vs. 22
  misc_feature: MA Experiment 20000111 PARAMETER Experiment Name: At_42deg_Heat_cDNA_P Parameter: Timepoint (hr) Value: 6
  misc_feature: MA Experiment 20000111 PARAMETER Experiment Name: At_42deg_Heat_cDNA_P Parameter: Tissue Value: Aerial
  misc_feature: MA Experiment ID: 20000113 Result: Up-regulated in Transcription
  misc_feature: MA Experiment 20000113 PARAMETER Experiment Name: At_42deg_Heat_cDNA_P Parameter: Temperature (deg C) Value: 42 vs. 22
  misc_feature: MA Experiment 20000113 PARAMETER Experiment Name: At_42deg_Heat_cDNA_P Parameter: Timepoint (hr) Value: 8
  misc_feature: MA Experiment 20000113 PARAMETER Experiment Name: At_42deg_Heat_cDNA_P Parameter: Tissue Value: Aerial
  misc_feature: MA Experiment ID: 20000179 Result: Down-regulated in Transcription
  misc_feature: MA Experiment 20000179 PARAMETER Experiment Name: At_Germinating_Seeds_P Parameter: Age (hr) Value: 6 vs. 0
  misc_feature: MA Experiment 20000179 PARAMETER Experiment Name: At_Germinating_Seeds_P Parameter: Tissue Value: Germinating Seeds
  misc_feature: MA Experiment ID: 20000180 Result: Down-regulated in Transcription
  misc_feature: MA Experiment 20000180 PARAMETER Experiment Name: At_Germinating_Seeds_P Parameter: Age (hr) Value: 24 vs. 0
  misc_feature: MA Experiment 20000180 PARAMETER Experiment Name: At_Germinating_Seeds_P Parameter: Tissue Value: Germinating Seeds
  misc_feature: MA Experiment ID: 20001557 Result: Up-regulated in Transcription
  misc_feature: MA Experiment 20001557 PARAMETER Experiment Name: At_Drought_Soil_Dry_P Parameter: Age (day) Value: 27
  misc_feature: MA Experiment 20001557 PARAMETER Experiment Name: At_Drought_Soil_Dry_P Parameter: Organism Value: A. thaliana
  misc_feature: MA Experiment 20001557 PARAMETER Experiment Name: At_Drought_Soil_Dry_P Parameter: Plant Line Value: WS
  misc_feature: MA Experiment 20001557 PARAMETER Experiment Name: At_Drought_Soil_Dry_P Parameter: Post Timepoint (hr) Value: 3
  misc_feature: MA Experiment 20001557 PARAMETER Experiment Name: At_Drought_Soil_Dry_P Parameter: Post-Treatment Value: Re-Water vs. No Drought
  misc_feature: MA Experiment 20001557 PARAMETER Experiment Name: At_Drought_Soil_Dry_P Parameter: Timepoint (day) Value: 13
  misc_feature: MA Experiment 20001557 PARAMETER Experiment Name: At_Drought_Soil_Dry_P Parameter: Treatment Value: Drought vs. No Drought
  misc_feature: MA Experiment ID: 20001558 Result: Up-regulated in Transcription
  misc_feature: MA Experiment 20001558 PARAMETER Experiment Name: At_Drought_Soil_Dry_P Parameter: Age (day) Value: 27
  misc_feature: MA Experiment 20001558 PARAMETER Experiment Name: At_Drought_Soil_Dry_P Parameter: Organism Value: A. thaliana
  misc_feature: MA Experiment 20001558 PARAMETER Experiment Name: At_Drought_Soil_Dry_P Parameter: Plant Line Value: WS
  misc_feature: MA Experiment 20001558 PARAMETER Experiment Name: At_Drought_Soil_Dry_P Parameter: Post Timepoint (hr) Value: 6
  misc_feature: MA Experiment 20001558 PARAMETER Experiment Name: At_Drought_Soil_Dry_P Parameter: Post-Treatment Value: Re-Water vs. No Drought
  misc_feature: MA Experiment 20001558 PARAMETER Experiment Name: At_Drought_Soil_Dry_P Parameter: Timepoint (day) Value: 13
  misc_feature: MA Experiment 20001558 PARAMETER Experiment Name: At_Drought_Soil_Dry_P Parameter: Treatment Value: Drought vs. No Drought
  misc_feature: MA Experiment ID: 20001560 Result: Up-regulated in Transcription
  misc_feature: MA Experiment 20001560 PARAMETER Experiment Name: At_Drought_Soil_Dry_P Parameter: Age (day) Value: 28
  misc_feature: MA Experiment 20001560 PARAMETER Experiment Name: At_Drought_Soil_Dry_P Parameter: Organism Value: A. thaliana
  misc_feature: MA Experiment 20001560 PARAMETER Experiment Name: At_Drought_Soil_Dry_P Parameter: Plant Line Value: WS
  misc_feature: MA Experiment 20001560 PARAMETER Experiment Name: At_Drought_Soil_Dry_P Parameter: Post Timepoint (hr) Value: None
  misc_feature: MA Experiment 20001560 PARAMETER Experiment Name: At_Drought_Soil_Dry_P Parameter: Post-Treatment Value: None
  misc_feature: MA Experiment 20001560 PARAMETER Experiment Name: At_Drought_Soil_Dry_P Parameter: Timepoint (day) Value: 14
  misc_feature: MA Experiment 20001560 PARAMETER Experiment Name: At_Drought_Soil_Dry_P Parameter: Treatment Value: Drought vs. No Drought
  misc_feature: MA Experiment ID: 20001757 Result: Up-regulated in Transcription
  misc_feature: MA Experiment 20001757 PARAMETER Experiment Name: At_50mM_NH4NO3_L-to-H_P Parameter: Timepoint (hr) Value: 6
  misc_feature: MA Experiment 20001757 PARAMETER Experiment Name: At_50mM_NH4NO3_L-to-H_P Parameter: Tissue Value: Leaf
  misc_feature: MA Experiment 20001757 PARAMETER Experiment Name: At_50mM_NH4NO3_L-to-H_P Parameter: Treatment Value: 50mM NH4NO3 vs 100mM Mannitol
aagcctaagttatcattcagaatattcaagctgagaaagtcgtagcctctaaaaccctaatcctctctgaaaccctagacatcgcagctgaaaatgaccggagaagtcgtcaaccctaaagcgtatccgcttgcagattctcagttatcgataacaattcttgacctcgttcaacaagctactaactacaagcagctcaagaagggtgctaatgaagctacgaagactcttaatcgtggaatctccgagtttgttgtcatggctgcagatgctgagcctctagagattcttcttcatcttcccctacttgctgaggataagaatgttccttatgtctttgtgccttcaaagcaagccttgggaagagcctgtggtgtgactagacctgttatcgcttgttcagtcacatctaacgaagctagtcaattgaaatcacagattcaacatctcaaggatgctattgagaagcttctgatctaaggcattctctgaattgattgctcggtatgatgggtctccgcgaatgggaaggctttgactgaagttttgtttaggcaactaccaaatcaaaaaccgtccattattctactatcttctcttcaagtttgtaacgtaattcacttttctgcaacttggtttcttaagaatttgtgttggtttctggttttggtttgtagcgaatcattgtgttatttataagaacttgttttgatatctat

SEQ ID NO: 21542 - protein, 128 aa, Arabidopsis thaliana
  peptide (1)..(128): Ceres Seq. ID no. 12329456
  misc_feature (20)..(114): Pfam Name: Ribosomal protein L7Ae/L30e/S12e/Gadd45 family Pfam Description: Ribosomal protein L7Ae/L30e/S12e/Gadd45 family
  misc_feature (6)..(128): Homolog of NCBI NO: 28302201 NR Description: Similar to NHP2 non-histone chromosome protein
  misc_feature (1)..(128): Homolog of NCBI NO: 38174386 NR Description: Unknown (protein for MGC:75724) [Silurana
  misc_feature (6)..(128): Homolog of NCBI NO: 37530712 NR Description: putative ribosomal protein L7Ae-like
  misc_feature (1)..(108): Homolog of NCBI NO: 25295061 NR Description: Ribosomal protein L7Ae-like (partial)
  misc_feature (1)..(128): Homolog of NCBI NO: 15235416 NR Description: Ribosomal protein L7Ae -like
  misc_feature (1)..(128): Homolog of NCBI NO: 21592866 NR Description: Ribosomal protein L7Ae-like [Arabidopsis thaliana]
  misc_feature (1)..(46): Homolog of NCBI NO: 30687670 NR Description: ribosomal protein L7Ae family [Arabidopsis
  misc_feature (42)..(128): Homolog of NCBI NO: 30687670 NR Description: ribosomal protein L7Ae family [Arabidopsis
  misc_feature (1)..(128): Homolog of NCBI NO: 15236127 NR Description: Ribosomal protein L7Ae - like; protein id:
  misc_feature (1)..(128): Homolog of NCBI NO: 15241276 NR Description: ribosomal protein L7Ae-like
MTGEVVNPKAYPLADSQLSITILDLVQQATNYKQLKKGANEATKTLNRGISEFVVMAADAEPLEILLHLPLLAEDKNVPYVFVPSKQALGRACGVTRPVIACSVTSNEASQLKSQIQHLKDAIEKLLI

SEQ ID NO: 21543 - protein, 73 aa, Arabidopsis thaliana
  peptide (1)..(73): Ceres Seq. ID no. 12329457
  misc_feature (1)..(59): Pfam Name: Ribosomal protein L7Ae/L30e/S12e/Gadd45 family Pfam Description: Ribosomal protein L7Ae/L30e/S12e/Gadd45 family
  misc_feature (1)..(73): Homolog of NCBI NO: 17535189 NR Description: Ribosomal protein L7Ae/L30e/S12e/Gadd45 family
  misc_feature (1)..(73): Homolog of NCBI NO: 28302201 NR Description: Similar to NHP2 non-histone chromosome protein
  misc_feature (1)..(73): Homolog of NCBI NO: 38174386 NR Description: Unknown (protein for MGC:75724) [Silurana
  misc_feature (1)..(73): Homolog of NCBI NO: 37530712 NR Description: putative ribosomal protein L7Ae-like
  misc_feature (1)..(53): Homolog of NCBI NO: 25295061 NR Description: Ribosomal protein L7Ae-like (partial)
  misc_feature (1)..(73): Homolog of NCBI NO: 15235416 NR Description: Ribosomal protein L7Ae -like
  misc_feature (1)..(73): Homolog of NCBI NO: 21592866 NR Description: Ribosomal protein L7Ae-like [Arabidopsis thaliana]
  misc_feature (1)..(73): Homolog of NCBI NO: 30687670 NR Description: ribosomal protein L7Ae family [Arabidopsis
  misc_feature (1)..(73): Homolog of NCBI NO: 15236127 NR Description: Ribosomal protein L7Ae - like; protein id:
  misc_feature (1)..(73): Homolog of NCBI NO: 15241276 NR Description: ribosomal protein L7Ae-like
MAADAEPLEILLHLPLLAEDKNVPYVFVPSKQALGRACGVTRPVIACSVTSNEASQLKSQIQHLKDAIEKLLI

SEQ ID NO: 21544 - DNA, 1018 bp, Arabidopsis thaliana
  misc_feature (1)..(1018): Ceres Seq. ID no. 12602461
  misc_feature: MA Experiment ID: 108434 Result: Down-regulated in Transcription
  misc_feature: MA Experiment 108434 PARAMETER Experiment Name: At_Root_Tips_cDNA_P Parameter: Tissue Value: Root Tips
  misc_feature: MA Experiment ID: 108462 Result: Up-regulated in Transcription
  misc_feature: MA Experiment 108462 PARAMETER Experiment Name: At_Germinating_Seeds_cDNA_P Parameter: Age (day) Value: 2 vs. 0
  misc_feature: MA Experiment 108462 PARAMETER Experiment Name: At_Germinating_Seeds_cDNA_P Parameter: Tissue Value: Germinating Seeds
  misc_feature: MA Experiment ID: 108464 Result: Up-regulated in Transcription
  misc_feature: MA Experiment 108464 PARAMETER Experiment Name: At_Germinating_Seeds_cDNA_P Parameter: Age (day) Value: 4 vs. 0
  misc_feature: MA Experiment 108464 PARAMETER Experiment Name: At_Germinating_Seeds_cDNA_P Parameter: Tissue Value: Germinating Seeds
  misc_feature: MA Experiment ID: 108488 Result: Down-regulated in Transcription
  misc_feature: MA Experiment ID: 108577 Result: Down-regulated in Transcription
  misc_feature: MA Experiment 108577 PARAMETER Experiment Name: At_42deg_Heat_cDNA_P Parameter: Temperature (deg C) Value: 42 vs. 22
  misc_feature: MA Experiment 108577 PARAMETER Experiment Name: At_42deg_Heat_cDNA_P Parameter: Timepoint (hr) Value: 6
  misc_feature: MA Experiment 108577 PARAMETER Experiment Name: At_42deg_Heat_cDNA_P Parameter: Tissue Value: Aerial
  misc_feature: MA Experiment ID: 108595 Result: Up-regulated in Transcription
  misc_feature: MA Experiment 108595 PARAMETER Experiment Name: At_Ler-pi_Ovule_cDNA_P Parameter: Plant Line Value: null
  misc_feature: MA Experiment ID: 108608 Result: Up-regulated in Transcription
  misc_feature: MA Experiment 108608 PARAMETER Experiment Name: At_100uM_ABA_cDNA_P Parameter: Timepoint (hr) Value: 1
  misc_feature: MA Experiment 108608 PARAMETER Experiment Name: At_100uM_ABA_cDNA_P Parameter: Tissue Value: Aerial
  misc_feature: MA Experiment 108608 PARAMETER Experiment Name: At_100uM_ABA_cDNA_P Parameter: Treatment Value: 100uM ABA vs. No Treatment
  misc_feature: MA Experiment ID: 20000069 Result: Up-regulated in Transcription
  misc_feature: MA Experiment 20000069 PARAMETER Experiment Name: At_100uM_ABA_Mutants_cDNA_P Parameter: Plant Line Value: CS23
  misc_feature: MA Experiment 20000069 PARAMETER Experiment Name: At_100uM_ABA_Mutants_cDNA_P Parameter: Timepoint (hr) Value: 6
  misc_feature: MA Experiment 20000069 PARAMETER Experiment Name: At_100uM_ABA_Mutants_cDNA_P Parameter: Tissue Value: Aerial
  misc_feature: MA Experiment 20000069 PARAMETER Experiment Name: At_100uM_ABA_Mutants_cDNA_P Parameter: Treatment Value: 100uM ABA vs. No Treatment
  misc_feature: MA Experiment ID: 20000070 Result: Up-regulated in Transcription
  misc_feature: MA Experiment 20000070 PARAMETER Experiment Name: At_100uM_ABA_Mutants_cDNA_P Parameter: Plant Line Value: CS24
  misc_feature: MA Experiment 20000070 PARAMETER Experiment Name: At_100uM_ABA_Mutants_cDNA_P Parameter: Timepoint (hr) Value: 6
  misc_feature: MA Experiment 20000070 PARAMETER Experiment Name: At_100uM_ABA_Mutants_cDNA_P Parameter: Tissue Value: Aerial
  misc_feature: MA Experiment 20000070 PARAMETER Experiment Name: At_100uM_ABA_Mutants_cDNA_P Parameter: Treatment Value: 100uM ABA vs. No Treatment
  misc_feature: MA Experiment ID: 20000071 Result: Up-regulated in Transcription
  misc_feature: MA Experiment 20000071 PARAMETER Experiment Name: At_100uM_ABA_Mutants_cDNA_P Parameter: Plant Line Value: CS8104
  misc_feature: MA Experiment 20000071 PARAMETER Experiment Name: At_100uM_ABA_Mutants_cDNA_P Parameter: Timepoint (hr) Value: 6
  misc_feature: MA Experiment 20000071 PARAMETER Experiment Name: At_100uM_ABA_Mutants_cDNA_P Parameter: Tissue Value: Aerial
  misc_feature: MA Experiment 20000071 PARAMETER Experiment Name: At_100uM_ABA_Mutants_cDNA_P Parameter: Treatment Value: 100uM ABA vs. No Treatment
  misc_feature: MA Experiment ID: 20000086 Result: Up-regulated in Transcription
  misc_feature: MA Experiment 20000086 PARAMETER Experiment Name: At_100uM_ABA_Mutants_cDNA_P Parameter: Plant Line Value: CS22
  misc_feature: MA Experiment 20000086 PARAMETER Experiment Name: At_100uM_ABA_Mutants_cDNA_P Parameter: Timepoint (hr) Value: 6
  misc_feature: MA Experiment 20000086 PARAMETER Experiment Name: At_100uM_ABA_Mutants_cDNA_P Parameter: Tissue Value: Aerial
  misc_feature: MA Experiment 20000086 PARAMETER Experiment Name: At_100uM_ABA_Mutants_cDNA_P Parameter: Treatment Value: 100uM ABA vs. No Treatment
  misc_feature: MA Experiment ID: 20000087 Result: Up-regulated in Transcription
  misc_feature: MA Experiment 20000087 PARAMETER Experiment Name: At_100uM_ABA_Mutants_cDNA_P Parameter: Plant Line Value: WS
  misc_feature: MA Experiment 20000087 PARAMETER Experiment Name: At_100uM_ABA_Mutants_cDNA_P Parameter: Timepoint (hr) Value: 6
  misc_feature: MA Experiment 20000087 PARAMETER Experiment Name: At_100uM_ABA_Mutants_cDNA_P Parameter: Tissue Value: Aerial
  misc_feature: MA Experiment 20000087 PARAMETER Experiment Name: At_100uM_ABA_Mutants_cDNA_P Parameter: Treatment Value: 100uM ABA vs. No Treatment
  misc_feature: MA Experiment ID: 20000088 Result: Up-regulated in Transcription
  misc_feature: MA Experiment 20000088 PARAMETER Experiment Name: At_100uM_ABA_Mutants_cDNA_P Parameter: Plant Line Value: Landsberg
  misc_feature: MA Experiment 20000088 PARAMETER Experiment Name: At_100uM_ABA_Mutants_cDNA_P Parameter: Timepoint (hr) Value: 6
  misc_feature: MA Experiment 20000088 PARAMETER Experiment Name: At_100uM_ABA_Mutants_cDNA_P Parameter: Tissue Value: Aerial
  misc_feature: MA Experiment 20000088 PARAMETER Experiment Name: At_100uM_ABA_Mutants_cDNA_P Parameter: Treatment Value: 100uM ABA vs. No Treatment
  misc_feature: MA Experiment ID: 20000117 Result: Up-regulated in Transcription
  misc_feature: MA Experiment 20000117 PARAMETER Experiment Name: At_100uM_ABA_Mutants_cDNA_P Parameter: Plant Line Value: Columbia
  misc_feature: MA Experiment 20000117 PARAMETER Experiment Name: At_100uM_ABA_Mutants_cDNA_P Parameter: Timepoint (hr) Value: 6
  misc_feature: MA Experiment 20000117 PARAMETER Experiment Name: At_100uM_ABA_Mutants_cDNA_P Parameter: Tissue Value: Aerial
  misc_feature: MA Experiment 20000117 PARAMETER Experiment Name: At_100uM_ABA_Mutants_cDNA_P Parameter: Treatment Value: 100uM ABA vs. No Treatment
  misc_feature: MA Experiment ID: 20000166 Result: Up-regulated in Transcription
  misc_feature: MA Experiment 20000166 PARAMETER Experiment Name: At_100uM_ABA_P Parameter: Age (day) Value: 14
  misc_feature: MA Experiment 20000166 PARAMETER Experiment Name: At_100uM_ABA_P Parameter: Organism Value: A. thaliana
  misc_feature: MA Experiment 20000166 PARAMETER Experiment Name: At_100uM_ABA_P Parameter: Plant Line Value: WS
  misc_feature: MA Experiment 20000166 PARAMETER Experiment Name: At_100uM_ABA_P Parameter: Timepoint (hr) Value: 1
  misc_feature: MA Experiment 20000166 PARAMETER Experiment Name: At_100uM_ABA_P Parameter: Tissue Value: Aerial
  misc_feature: MA Experiment 20000166 PARAMETER Experiment Name: At_100uM_ABA_P Parameter: Treatment Value: 100uM ABA vs. No Treatment
  misc_feature: MA Experiment ID: 20000180 Result: Up-regulated in Transcription
  misc_feature: MA Experiment 20000180 PARAMETER Experiment Name: At_Germinating_Seeds_P Parameter: Age (hr) Value: 24 vs. 0
  misc_feature: MA Experiment 20000180 PARAMETER Experiment Name: At_Germinating_Seeds_P Parameter: Tissue Value: Germinating Seeds
  misc_feature: MA Experiment ID: 20000182 Result: Up-regulated in Transcription
  misc_feature: MA Experiment 20000182 PARAMETER Experiment Name: At_2mM_SA_P Parameter: Age (day) Value: 14
  misc_feature: MA Experiment 20000182 PARAMETER Experiment Name: At_2mM_SA_P Parameter: Organism Value: A. thaliana
  misc_feature: MA Experiment 20000182 PARAMETER Experiment Name: At_2mM_SA_P Parameter: Plant Line Value: WS
  misc_feature: MA Experiment 20000182 PARAMETER Experiment Name: At_2mM_SA_P Parameter: Timepoint (hr) Value: 6
  misc_feature: MA Experiment 20000182 PARAMETER Experiment Name: At_2mM_SA_P Parameter: Tissue Value: Aerial
  misc_feature: MA Experiment 20000182 PARAMETER Experiment Name: At_2mM_SA_P Parameter: Treatment Value: 2mM SA vs. No Treatment
  misc_feature: MA Experiment ID: 20000184 Result: Down-regulated in Transcription
  misc_feature: MA Experiment 20000184 PARAMETER Experiment Name: At_Shoots__P Parameter: Age (day) Value: 7
  misc_feature: MA Experiment 20000184 PARAMETER Experiment Name: At_Shoots__P Parameter: Tissue Value: Shoots vs. Whole Plant
  misc_feature: MA Experiment ID: 20000224 Result: Down-regulated in Transcription
  misc_feature: MA Experiment ID: 20000234 Result: Down-regulated in Transcription
  misc_feature: MA Experiment 20000234 PARAMETER Experiment Name: At_Siliques_P Parameter: Age (day) Value: 21
  misc_feature: MA Experiment 20000234 PARAMETER Experiment Name: At_Siliques_P Parameter: Organism Value: A. thaliana
  misc_feature: MA Experiment 20000234 PARAMETER Experiment Name: At_Siliques_P Parameter: Plant Line Value: WS
  misc_feature: MA Experiment 20000234 PARAMETER Experiment Name: At_Siliques_P Parameter: Tissue Value: Less Than 5mm Siliques vs. Whole Plant
  misc_feature: MA Experiment ID: 20000265 Result: Down-regulated in Transcription
  misc_feature: MA Experiment 20000265 PARAMETER Experiment Name: At_Open_Flower_P Parameter: Age (day) Value: 21
  misc_feature: MA Experiment 20000265 PARAMETER Experiment Name: At_Open_Flower_P Parameter: Plant Line Value: WS
  misc_feature: MA Experiment 20000265 PARAMETER Experiment Name: At_Open_Flower_P Parameter: Tissue Value: Closed Flower vs. Whole Plant
  misc_feature: MA Experiment ID: 20000267 Result: Up-regulated in Transcription
  misc_feature: MA Experiment 20000267 PARAMETER Experiment Name: At_Drought_P Parameter: Age (day) Value: 7
  misc_feature: MA Experiment 20000267 PARAMETER Experiment Name: At_Drought_P Parameter: Organism Value: A. thaliana
  misc_feature: MA Experiment 20000267 PARAMETER Experiment Name: At_Drought_P Parameter: Plant Line Value: WS
  misc_feature: MA Experiment 20000267 PARAMETER Experiment Name: At_Drought_P Parameter: Timepoint (hr) Value: 6
  misc_feature: MA Experiment 20000267 PARAMETER Experiment Name: At_Drought_P Parameter: Tissue Value: Whole Plant
  misc_feature: MA Experiment 20000267 PARAMETER Experiment Name: At_Drought_P Parameter: Treatment Value: Drought vs. No Drought
  misc_feature: MA Experiment ID: 20000268 Result: Up-regulated in Transcription
  misc_feature: MA Experiment 20000268 PARAMETER Experiment Name: At_100mM_NaCl__P Parameter: Age (day) Value: 14
  misc_feature: MA Experiment 20000268 PARAMETER Experiment Name: At_100mM_NaCl__P Parameter: Organism Value: A. thaliana
  misc_feature: MA Experiment 20000268 PARAMETER Experiment Name: At_100mM_NaCl__P Parameter: Plant Line Value: WS
  misc_feature: MA Experiment 20000268 PARAMETER Experiment Name: At_100mM_NaCl__P Parameter: Timepoint (hr) Value: 6
  misc_feature: MA Experiment 20000268 PARAMETER Experiment Name: At_100mM_NaCl__P Parameter: Tissue Value: Whole Plant
  misc_feature: MA Experiment 20000268 PARAMETER Experiment Name: At_100mM_NaCl__P Parameter: Treatment Value: 100mM NaCl vs. No Treatment
  misc_feature: MA Experiment ID: 20000286 Result: Down-regulated in Transcription
  misc_feature: MA Experiment 20000286 PARAMETER Experiment Name: At_Open_Flower_P Parameter: Age (day) Value: 21
  misc_feature: MA Experiment 20000286 PARAMETER Experiment Name: At_Open_Flower_P Parameter: Plant Line Value: WS
  misc_feature: MA Experiment 20000286 PARAMETER Experiment Name: At_Open_Flower_P Parameter: Tissue Value: Half Open vs. Whole Plant
  misc_feature: MA Experiment ID: 20000436 Result: Up-regulated in Transcription
  misc_feature: MA Experiment 20000436 PARAMETER Experiment Name: At_Drought_P Parameter: Age (day) Value: 7
  misc_feature: MA Experiment 20000436 PARAMETER Experiment Name: At_Drought_P Parameter: Organism Value: A. thaliana
  misc_feature: MA Experiment 20000436 PARAMETER Experiment Name: At_Drought_P Parameter: Plant Line Value: WS
  misc_feature: MA Experiment 20000436 PARAMETER Experiment Name: At_Drought_P Parameter: Timepoint (hr) Value: 12
  misc_feature: MA Experiment 20000436 PARAMETER Experiment Name: At_Drought_P Parameter: Tissue Value: Whole Plant
  misc_feature: MA Experiment 20000436 PARAMETER Experiment Name: At_Drought_P Parameter: Treatment Value: Drought vs. No Drought
  misc_feature: MA Experiment ID: 20000437 Result: Up-regulated in Transcription
  misc_feature: MA Experiment 20000437 PARAMETER Experiment Name: At_Drought_P Parameter: Age (day) Value: 8
  misc_feature: MA Experiment 20000437 PARAMETER Experiment Name: At_Drought_P Parameter: Organism Value: A. thaliana
  misc_feature: MA Experiment 20000437 PARAMETER Experiment Name: At_Drought_P Parameter: Plant Line Value: WS
  misc_feature: MA Experiment 20000437 PARAMETER Experiment Name: At_Drought_P Parameter: Timepoint (hr) Value: 24
  misc_feature: MA Experiment 20000437 PARAMETER Experiment Name: At_Drought_P Parameter: Tissue Value: Whole Plant
  misc_feature: MA Experiment 20000437 PARAMETER Experiment Name: At_Drought_P Parameter: Treatment Value: Drought vs. No Drought
  misc_feature: MA Experiment ID: 20000438 Result: Down-regulated in Transcription
  misc_feature: MA Experiment 20000438 PARAMETER Experiment Name: At_Shoots__P Parameter: Age (day) Value: 14
  misc_feature: MA Experiment 20000438 PARAMETER Experiment Name: At_Shoots__P Parameter: Tissue Value: Shoots vs. Whole Plant
  misc_feature: MA Experiment ID: 20000439 Result: Down-regulated in Transcription
  misc_feature: MA Experiment 20000439 PARAMETER Experiment Name: At_Roots__P Parameter: Age (day) Value: 14 vs. 21
  misc_feature: MA Experiment 20000439 PARAMETER Experiment Name: At_Roots__P Parameter: Organism Value: A. thaliana
  misc_feature: MA Experiment 20000439 PARAMETER Experiment Name: At_Roots__P Parameter: Tissue Value: Roots vs. Whole Plant
  misc_feature: MA Experiment ID: 20000451 Result: Down-regulated in Transcription
  misc_feature: MA Experiment 20000451 PARAMETER Experiment Name: At_CS6879_Shoots-Roots_P Parameter: Age (day) Value: 14
  misc_feature: MA Experiment 20000451 PARAMETER Experiment Name: At_CS6879_Shoots-Roots_P Parameter: Organism Value: A. thaliana
  misc_feature: MA Experiment 20000451 PARAMETER Experiment Name: At_CS6879_Shoots-Roots_P Parameter: Plant Line Value: CS6879 vs. WS
  misc_feature: MA Experiment 20000451 PARAMETER Experiment Name: At_CS6879_Shoots-Roots_P Parameter: Tissue Value: Roots
  misc_feature: MA Experiment ID: 20000495 Result: Down-regulated in Transcription
  misc_feature: MA Experiment 20000495 PARAMETER Experiment Name: At_Guard_Cells_P Parameter: Harvest Date Value: 8/2/2002
  misc_feature: MA Experiment 20000495 PARAMETER Experiment Name: At_Guard_Cells_P Parameter: Organism Value: A. thaliana
  misc_feature: MA Experiment 20000495 PARAMETER Experiment Name: At_Guard_Cells_P Parameter: Tissue Value: Guard Cells vs. Leaves
  misc_feature: MA Experiment ID: 20001451 Result: Up-regulated in Transcription
  misc_feature: MA Experiment 20001451 PARAMETER Experiment Name: At_Far-red-induction_P Parameter: Age (day) Value: 7
  misc_feature: MA Experiment 20001451 PARAMETER Experiment Name: At_Far-red-induction_P Parameter: Light Value: Far-red vs. White
  misc_feature: MA Experiment 20001451 PARAMETER Experiment Name: At_Far-red-induction_P Parameter: Organism Value: A. thaliana
  misc_feature: MA Experiment 20001451 PARAMETER Experiment Name: At_Far-red-induction_P Parameter: Plant Line Value: Columbia
  misc_feature: MA Experiment 20001451 PARAMETER Experiment Name: At_Far-red-induction_P Parameter: Timepoint (hr) Value: 24
  misc_feature: MA Experiment 20001451 PARAMETER Experiment Name: At_Far-red-induction_P Parameter: Tissue Value: Whole Plant
  misc_feature: MA Experiment ID: 20001556 Result: Down-regulated in Transcription
  misc_feature: MA Experiment 20001556 PARAMETER Experiment Name: At_Drought_Soil_Dry_P Parameter: Age (day) Value: 26
  misc_feature: MA Experiment 20001556 PARAMETER Experiment Name: At_Drought_Soil_Dry_P Parameter: Organism Value: A. thaliana
  misc_feature: MA Experiment 20001556 PARAMETER Experiment Name: At_Drought_Soil_Dry_P Parameter: Plant Line Value: WS
  misc_feature: MA Experiment 20001556 PARAMETER Experiment Name: At_Drought_Soil_Dry_P Parameter: Post Timepoint (hr) Value: None
  misc_feature: MA Experiment 20001556 PARAMETER Experiment Name: At_Drought_Soil_Dry_P Parameter: Post-Treatment Value: None
  misc_feature: MA Experiment 20001556 PARAMETER Experiment Name: At_Drought_Soil_Dry_P Parameter: Timepoint (day) Value: 12
  misc_feature: MA Experiment 20001556 PARAMETER Experiment Name: At_Drought_Soil_Dry_P Parameter: Treatment Value: Drought vs. No Drought
  misc_feature: MA Experiment ID: 20001557 Result: Down-regulated in Transcription
  misc_feature: MA Experiment 20001557 PARAMETER Experiment Name: At_Drought_Soil_Dry_P Parameter: Age (day) Value: 27
  misc_feature: MA Experiment 20001557 PARAMETER Experiment Name: At_Drought_Soil_Dry_P Parameter: Organism Value: A. thaliana
  misc_feature: MA Experiment 20001557 PARAMETER Experiment Name: At_Drought_Soil_Dry_P Parameter: Plant Line Value: WS
  misc_feature: MA Experiment 20001557 PARAMETER Experiment Name: At_Drought_Soil_Dry_P Parameter: Post Timepoint (hr) Value: 3
  misc_feature: MA Experiment 20001557 PARAMETER Experiment Name: At_Drought_Soil_Dry_P Parameter: Post-Treatment Value: Re-Water vs. No Drought
  misc_feature: MA Experiment 20001557 PARAMETER Experiment Name: At_Drought_Soil_Dry_P Parameter: Timepoint (day) Value: 13
  misc_feature: MA Experiment 20001557 PARAMETER Experiment Name: At_Drought_Soil_Dry_P Parameter: Treatment Value: Drought vs. No Drought
  misc_feature: MA Experiment ID: 20001558 Result: Down-regulated in Transcription
  misc_feature: MA Experiment 20001558 PARAMETER Experiment Name: At_Drought_Soil_Dry_P Parameter: Age (day) Value: 27
  misc_feature: MA Experiment 20001558 PARAMETER Experiment Name: At_Drought_Soil_Dry_P Parameter: Organism Value: A. thaliana
  misc_feature: MA Experiment 20001558 PARAMETER Experiment Name: At_Drought_Soil_Dry_P Parameter: Plant Line Value: WS
  misc_feature: MA Experiment 20001558 PARAMETER Experiment Name: At_Drought_Soil_Dry_P Parameter: Post Timepoint (hr) Value: 6
  misc_feature: MA Experiment 20001558 PARAMETER Experiment Name: At_Drought_Soil_Dry_P Parameter: Post-Treatment Value: Re-Water vs. No Drought
  misc_feature: MA Experiment 20001558 PARAMETER Experiment Name: At_Drought_Soil_Dry_P Parameter: Timepoint (day) Value: 13
  misc_feature: MA Experiment 20001558 PARAMETER Experiment Name: At_Drought_Soil_Dry_P Parameter: Treatment Value: Drought vs. No Drought
  misc_feature: MA Experiment ID: 20001560 Result: Down-regulated in Transcription
  misc_feature: MA Experiment 20001560 PARAMETER Experiment Name: At_Drought_Soil_Dry_P Parameter: Age (day) Value: 28
  misc_feature: MA Experiment 20001560 PARAMETER Experiment Name: At_Drought_Soil_Dry_P Parameter: Organism Value: A. thaliana
  misc_feature: MA Experiment 20001560 PARAMETER Experiment Name: At_Drought_Soil_Dry_P Parameter: Plant Line Value: WS
  misc_feature: MA Experiment 20001560 PARAMETER Experiment Name: At_Drought_Soil_Dry_P Parameter: Post Timepoint (hr) Value: None
  misc_feature: MA Experiment 20001560 PARAMETER Experiment Name: At_Drought_Soil_Dry_P Parameter: Post-Treatment Value: None
  misc_feature: MA Experiment 20001560 PARAMETER Experiment Name: At_Drought_Soil_Dry_P Parameter: Timepoint (day) Value: 14
  misc_feature: MA Experiment 20001560 PARAMETER Experiment Name: At_Drought_Soil_Dry_P Parameter: Treatment Value: Drought vs. No Drought
ataattagatctatgtttttaaattgcaaaaaaaaagtgtacaaagagcgtgaaatccgcggtggcttggacccctcccgagtcctcaacacgatataagacactttcttctctaatctccatcacctcttattttcatctgcttttgaatttcaaaccttcacataaaaaaaatacttttgaatccgtgtttcattcatcgaatctttttccgataactatggctgaggaaatcaagaatgttcctgaacaggaggtgccaaaggtagcaacagaggaatcatcggcagaggttacagatcgtggattgttcgatttcttgggaaagaagaaagacgaaacaaaaccagaggagactccgatcgcttcagagtttgagcagaaggttcatatttcagagccggagccagaggttaaacacgaaagtcttcttgaaaagcttcaccgaagcgacagttcttctagctcctcaagtgaggaagaaggttcagatggtgagaagaggaagaagaagaaggagaagaagaagccaactactgaagttgaggtaaaggaggaagagaagaaagggtttatggagaagttgaaagagaagcttcctggacacaagaaacctgaagacggttcagccgtcgctgcggcaccggtggttgttcctcctcctgtggaagaagcgcatccagtggagaagaaagggattcttgagaagattaaggagaagcttccaggataccaccctaagaccaccgtagaggaggagaagaaagataaagaataagaagattatcattaaagatattaagaataatgatggttgatttgctttgtttttttttttttttattgtgatgattgatcatcttttgcttttgtgatgtgtaagtttgttggcttttttgttgattacaatttcttattttctcttgtatatggtttttaaaaacaaaagatctcaaggtattttaatggtatgaatattttcatttgattaagtgatatggatgatataattttatgt

SEQ ID NO: 21545 - protein, 185 aa, Arabidopsis thaliana [sequence omitted]

SEQ ID NO: 21546 - DNA, 2920 bp, Arabidopsis thaliana
  misc_feature (1)..(2920): Ceres Seq. ID no. 12600069
  misc_feature: MA Experiment ID: 20000111 Result: Down-regulated in Transcription
  misc_feature: MA Experiment 20000111 PARAMETER Experiment Name: At_42deg_Heat_cDNA_P Parameter: Temperature (deg C) Value: 42 vs. 22
  misc_feature: MA Experiment 20000111 PARAMETER Experiment Name: At_42deg_Heat_cDNA_P Parameter: Timepoint (hr) Value: 6
  misc_feature: MA Experiment 20000111 PARAMETER Experiment Name: At_42deg_Heat_cDNA_P Parameter: Tissue Value: Aerial
  misc_feature: MA Experiment ID: 20000112 Result: Down-regulated in Transcription
  misc_feature: MA Experiment 20000112 PARAMETER Experiment Name: At_42deg_Heat_cDNA_P Parameter: Temperature (deg C) Value: 42 vs. 22
  misc_feature: MA Experiment 20000112 PARAMETER Experiment Name: At_42deg_Heat_cDNA_P Parameter: Timepoint (hr) Value: 2
  misc_feature: MA Experiment 20000112 PARAMETER Experiment Name: At_42deg_Heat_cDNA_P Parameter: Tissue Value: Aerial
  misc_feature: MA Experiment ID: 20000113 Result: Down-regulated in Transcription
  misc_feature: MA Experiment 20000113 PARAMETER Experiment Name: At_42deg_Heat_cDNA_P Parameter: Temperature (deg C) Value: 42 vs. 22
  misc_feature: MA Experiment 20000113 PARAMETER Experiment Name: At_42deg_Heat_cDNA_P Parameter: Timepoint (hr) Value: 8
  misc_feature: MA Experiment 20000113 PARAMETER Experiment Name: At_42deg_Heat_cDNA_P Parameter: Tissue Value: Aerial
ccctctctttctcatctctctgcgcctaacgtcgcttacggaagaagacgaaaattttgaacagaagctctctctctctatctctctatctctctatctctaacgctattcgatgtgcgtaaattagggttcttcactcgtcggatctgattgtatattgtgaaaatctcagatctcagatctcttatctaacaccgttgcgtgtcttcgtttccttctgattttgaaggaggtgaagcaaagtcgggagctgtacatttccgctttcatgttctgtgttgaatccgaattctctccacattagttgtttttacagatctccgaagttggctcctcaaagaagatcacagcgcctcatgggcggccaaatgcagcaaaacaatgctgcggctgcgacggcgctttacgatggggctttacccactaatgacgcaggagatgcagtcatggcacggtggcttcaatccgctggtttgcagcatttggcgtctcctgttgcttctacaggcaatgatcagcgtcacctcccaaaccttctcatgcagggttatggagctcagactgctgaagagaaacaaagactgttccaactaatgagaaatctcaattttaatggggagtcgacttctgaatcatatacaccaactgctcacacatcagcagctatgccctcttcggaaggatttttttcacctgagttcagaggtgattttggagcaggattattggatcttcatgcaatggatgatacagagcttctatctgagcatgtgattaccgaaccctttgagccgtcacctttcatgcctagtgtaaataaagaatttgaagaagactataatttggcagctaatcgtcaacagcggcaacagacagaagctgaacctttgggtttattgcctaaaagtgataaagaaaataacagtgtagccaagattaaagtagtggtaaggaaaagacccctaaacaagaaagaaacagctaaaaaggaggaggatgtcgtgacggtatctgataattctttgactgtccatgagcccagagtgaaggttgatttgactgcttatgtggaaaagcatgagttctgctttgatgctgttctagatgaggatgtttcaaatgacgaggtgtatcgggccacaattgagccaataattcccattattttccagagaactaaagctacatgctttgcatatggccaaacaggtagtggtaagacatttacaatgaaaccattacctatacgagcagttgaagatcttatgaggttgttgcgtcaaccagtatacagcaatcagaggtttaaattgtggctcagctattttgagatatatggtggaaagctgttcgatcttctcagtgagagaaagaaactttgcatgcgagaagatggtagacagcaagtttgcattgttggcctgcaagaatatgaagtttcagatgtacaaattgtaaaggattttatcgagaaaggaaatgccgaaaggagcacaggttcaactggagcaaatgaggaatcttctagatcgcatgccatcctacagcttgttgtaaaaaagcatgttgaggtaaaagacactagacggaggaataatgatagtaatgaattgcctgggaaagttgtgggaaagatttctttcattgaccttgctggcagtgaaagaggtgcagacaccacagacaatgatcgccagacaaggattgaaggcgcagaaatcaacaagagtctcttggctcttaaggaatgtatacgtgcactggacaatgaccagctacatataccatttcgtggaagcaaactaacggaagtgctccgtgactcatttgttggaaactcaagaacggtgatgatttcctgcatctctccaaatgcaggatcgtgtgaacataccctcaatactctaagatatgctgatcgagtcaaaagtctatctaaaagtggaaatagcaagaaagatcaaactgcgaattcaatgcctccggttaataaggatcctttgttgggcccaaatgatgtagaagatgtctttgagcctccacaggaagtgaatgtaccagaaaccaggaggagggtggtcgagaaggacagcaacagcagtacgtcgggtattgacttcagacagcctacaaattatcgagaggaaagtggaatcccatcattctcaatggacaagggaagatcagagccgaacagttcttttgctggctccactagtcagagaaacaacatttcttcatatccccaagaaacttcagaccgtgaagagaaagtaaagaaagtgtcaccacctcgtgggaaagggttgcgggaagaaaaaccagacagaccacaaaattggtctaaaagagatgtcagttcgtcggatatccctaccttgacaaattttagacagaacgcaagtgaaactgcttcaaggcaatatgaaaccgcttcaaggcaatatgaaaccgacccttcgcttgatgaaaacctcgatgcactgcttgaggaagaagaagctctgattgcagcgcacagaaaagaaattgaggatacaatggagattgttcgcgaggaaatgaaacttctagcggaggtggaccaaccgggaagcatgatagaaaactatgtgacgcaactgagctttgtgttgtcccggaaagcagcagggctagtcagtcttcaagccaggcttgctcggttccaacaccgtctcaaggaacaagaaatactgagccgtaagagagttcctcggtagttggtagaagaaggaaaaccaaaagtgtggtgttgtttaagtgtgaaaggttggttgggtgatctcttcttatatatgacaaagaatgacagaaatgtccttcatgtttgtgaatttgggcatttctttccttttatttttgaatctttattataaagttataccttttgtgtttctta

SEQ ID NO: 21547 - protein, 794 aa, Arabidopsis thaliana
  peptide (1)..(794): Ceres Seq. ID no. 12600070
  misc_feature (92)..(550): Homolog of NCBI NO: 34912848 NR Description: kinesin-like protein [Oryza sativa (japonica
  misc_feature (704)..(787): Homolog of NCBI NO: 18401002 NR Description: kinesin-like protein TBK5, putative
  misc_feature (704)..(787): Homolog of NCBI NO: 9294452 NR Description: contains similarity to kinesin heavy
  misc_feature (86)..(635): Homolog of NCBI NO: 18401002 NR Description: kinesin-like protein TBK5, putative
  misc_feature (86)..(635): Homolog of NCBI NO: 9294452 NR Description: contains similarity to kinesin heavy
  misc_feature (662)..(787): Homolog of NCBI NO: 13536983 NR Description: BY-2 kinesin-like protein 10 [Nicotiana tabacum]
  misc_feature (7)..(541): Homolog of NCBI NO: 13536983 NR Description: BY-2 kinesin-like protein 10 [Nicotiana tabacum]
  misc_feature (25)..(52): Homolog of NCBI NO: 34897620 NR Description: kinesin-like protein [Oryza sativa]
  misc_feature (57)..(404): Homolog of NCBI NO: 34897620 NR Description: kinesin-like protein [Oryza sativa]
  misc_feature (424)..(794): Homolog of NCBI NO: 34897620 NR Description: kinesin-like protein [Oryza sativa]
  misc_feature (424)..(794): Homolog of NCBI NO: 34897620 NR Description: kinesin-like protein [Oryza sativa]
  misc_feature (92)..(550): Homolog of NCBI NO: 34912848 NR Description: kinesin-like protein [Oryza sativa (japonica
  misc_feature (704)..(787): Homolog of NCBI NO: 18401002 NR Description: kinesin-like protein TBK5, putative
  misc_feature (704)..(787): Homolog of NCBI NO: 9294452 NR Description: contains similarity to kinesin heavy
  misc_feature (86)..(635): Homolog of NCBI NO: 18401002 NR Description: kinesin-like protein TBK5, putative
  misc_feature (86)..(635): Homolog of NCBI NO: 9294452 NR Description: contains similarity to kinesin heavy
  misc_feature (662)..(787): Homolog of NCBI NO: 13536983 NR Description: BY-2 kinesin-like protein 10 [Nicotiana tabacum]
  misc_feature (7)..(541): Homolog of NCBI NO: 13536983 NR Description: BY-2 kinesin-like protein 10 [Nicotiana tabacum]
  misc_feature (25)..(52): Homolog of NCBI NO: 34897620 NR Description: kinesin-like protein [Oryza sativa]
  misc_feature (57)..(404): Homolog of NCBI NO: 34897620 NR Description: kinesin-like protein [Oryza sativa]
MGGQMQQNNAAAATALYDGALPTNDAGDAVMARWLQSAGLQHLASPVASTGNDQRHLPNLLMQGYGAQTAEEKQRLFQLMRNLNFNGESTSESYTPTAHTSAAMPSSEGFFSPEFRGDFGAGLLDLHAMDDTELLSEHVITEPFEPSPFMPSVNKEFEEDYNLAANRQQRQQTEAEPLGLLPKSDKENNSVAKIKVVVRKRPLNKKETAKKEEDVVTVSDNSLTVHEPRVKVDLTAYVEKHEFCFDAVLDEDVSNDEVYRATIEPIIPIIFQRTKATCFAYGQTGSGKTFTMKPLPIRAVEDLMRLLRQPVYSNQRFKLWLSYFEIYGGKLFDLLSERKKLCMREDGRQQVCIVGLQEYEVSDVQIVKDFIEKGNAERSTGSTGANEESSRSHAILQLVVKKHVEVKDTRRRNNDSNELPGKVVGKISFIDLAGSERGADTTDNDRQTRIEGAEINKSLLALKECIRALDNDQLHIPFRGSKLTEVLRDSFVGNSRTVMISCISPNAGSCEHTLNTLRYADRVKSLSKSGNSKKDQTANSMPPVNKDPLLGPNDVEDVFEPPQEVNVPETRRRVVEKDSNSSTSGIDFRQPTNYREESGIPSFSMDKGRSEPNSSFAGSTSQRNNISSYPQETSDREEKVKKVSPPRGKGLREEKPDRPQNWSKRDVSSSDIPTLTNFRQNASETASRQYETASRQYETDPSLDENLDALLEEEEALIAAHRKEIEDTMEIVREEMKLLAEVDQPGSMIENYVTQLSFVLSRKAAGLVSLQARLARFQHRLKEQEILSRKRVPR

SEQ ID NO: 21548 - protein, 790 aa, Arabidopsis thaliana
  peptide (1)..(790): Ceres Seq. ID no. 12600071
  misc_feature (88)..(546): Homolog of NCBI NO: 34912848 NR Description: kinesin-like protein [Oryza sativa (japonica
  misc_feature (700)..(783): Homolog of NCBI NO: 18401002 NR Description: kinesin-like protein TBK5, putative
  misc_feature (700)..(783): Homolog of NCBI NO: 9294452 NR Description: contains similarity to kinesin heavy
  misc_feature (82)..(631): Homolog of NCBI NO: 18401002 NR Description: kinesin-like protein TBK5, putative
  misc_feature (82)..(631): Homolog of NCBI NO: 9294452 NR Description: contains similarity to kinesin heavy
  misc_feature (658)..(783): Homolog of NCBI NO: 13536983 NR Description: BY-2 kinesin-like protein 10 [Nicotiana tabacum]
  misc_feature (3)..(537): Homolog of NCBI NO: 13536983 NR Description: BY-2 kinesin-like protein 10 [Nicotiana tabacum]
  misc_feature (21)..(48): Homolog of NCBI NO: 34897620 NR Description: kinesin-like protein [Oryza sativa]
  misc_feature (53)..(400): Homolog of NCBI NO: 34897620 NR Description: kinesin-like protein [Oryza sativa]
  misc_feature (420)..(790): Homolog of NCBI NO: 34897620 NR Description: kinesin-like protein [Oryza sativa]
  misc_feature (88)..(546): Homolog of NCBI NO: 34912848 NR Description: kinesin-like protein [Oryza sativa (japonica
  misc_feature (700)..(783): Homolog of NCBI NO: 18401002 NR Description: kinesin-like protein TBK5, putative
  misc_feature (700)..(783): Homolog of NCBI NO: 9294452 NR Description: contains similarity to kinesin heavy
  misc_feature (82)..(631): Homolog of NCBI NO: 18401002 NR Description: kinesin-like protein TBK5, putative
  misc_feature (82)..(631): Homolog of NCBI NO: 9294452 NR Description: contains similarity to kinesin heavy
  misc_feature (658)..(783): Homolog of NCBI NO: 13536983 NR Description: BY-2 kinesin-like protein 10 [Nicotiana tabacum]
  misc_feature (3)..(537): Homolog of NCBI NO: 13536983 NR Description: BY-2 kinesin-like protein 10 [Nicotiana tabacum]
  misc_feature (21)..(48): Homolog of NCBI NO: 34897620 NR Description: kinesin-like protein [Oryza sativa]
  misc_feature (53)..(400): Homolog of NCBI NO: 34897620 NR Description: kinesin-like protein [Oryza sativa]
  misc_feature (420)..(790): Homolog of NCBI NO: 34897620 NR Description: kinesin-like protein [Oryza sativa]
MQQNNAAAATALYDGALPTNDAGDAVMARWLQSAGLQHLASPVASTGNDQRHLPNLLMQGYGAQTAEEKQRLFQLMRNLNFNGESTSESYTPTAHTSAAMPSSEGFFSPEFRGDFGAGLLDLHAMDDTELLSEHVITEPFEPSPFMPSVNKEFEEDYNLAANRQQRQQTEAEPLGLLPKSDKENNSVAKIKVVVRKRPLNKKETAKKEEDVVTVSDNSLTVHEPRVKVDLTAYVEKHEFCFDAVLDEDVSNDEVYRATIEPIIPIIFQRTKATCFAYGQTGSGKTFTMKPLPIRAVEDLMRLLRQPVYSNQRFKLWLSYFEIYGGKLFDLLSERKKLCMREDGRQQVCIVGLQEYEVSDVQIVKDFIEKGNAERSTGSTGANEESSRSHAILQLVVKKHVEVKDTRRRNNDSNELPGKVVGKISFIDLAGSERGADTTDNDRQTRIEGAEINKSLLALKECIRALDNDQLHIPFRGSKLTEVLRDSFVGNSRTVMISCISPNAGSCEHTLNTLRYADRVKSLSKSGNSKKDQTANSMPPVNKDPLLGPNDVEDVFEPPQEVNVPETRRRVVEKDSNSSTSGIDFRQPTNYREESGIPSFSMDKGRSEPNSSFAGSTSQRNNISSYPQETSDREEKVKKVSPPRGKGLREEKPDRPQNWSKRDVSSSDIPTLTNFRQNASETASRQYETASRQYETDPSLDENLDALLEEEEALIAAHRKEIEDTMEIVREEMKLLAEVDQPGSMIENYVTQLSFVLSRKAAGLVSLQARLARFQHRLKEQEILSRKRVPR

SEQ ID NO: 21549 - protein, 764 aa, Arabidopsis thaliana
  peptide (1)..(764): Ceres Seq. ID no. 12600072
  misc_feature (62)..(520): Homolog of NCBI NO: 34912848 NR Description: kinesin-like protein [Oryza sativa (japonica
  misc_feature (674)..(757): Homolog of NCBI NO: 18401002 NR Description: kinesin-like protein TBK5, putative
  misc_feature (674)..(757): Homolog of NCBI NO: 9294452 NR Description: contains similarity to kinesin heavy
  misc_feature (56)..(605): Homolog of NCBI NO: 18401002 NR Description: kinesin-like protein TBK5, putative
  misc_feature (56)..(605): Homolog of NCBI NO: 9294452 NR Description: contains similarity to kinesin heavy
  misc_feature (632)..(757): Homolog of NCBI NO: 13536983 NR Description: BY-2 kinesin-like protein 10 [Nicotiana tabacum]
  misc_feature (1)..(511): Homolog of NCBI NO: 13536983 NR Description: BY-2 kinesin-like protein 10 [Nicotiana tabacum]
  misc_feature (1)..(22): Homolog of NCBI NO: 34897620 NR Description: kinesin-like protein [Oryza sativa]
  misc_feature (27)..(374): Homolog of NCBI NO: 34897620 NR Description: kinesin-like protein [Oryza sativa]
  misc_feature (394)..(764): Homolog of NCBI NO: 34897620 NR Description: kinesin-like protein [Oryza sativa]
  misc_feature (62)..(520): Homolog of NCBI NO: 34912848 NR Description: kinesin-like protein [Oryza sativa (japonica
  misc_feature (674)..(757): Homolog of NCBI NO: 18401002 NR Description: kinesin-like protein TBK5, putative
  misc_feature (674)..(757): Homolog of NCBI NO: 9294452 NR Description: contains similarity to kinesin heavy
  misc_feature (56)..(605): Homolog of NCBI NO: 18401002 NR Description: kinesin-like protein TBK5, putative
  misc_feature (56)..(605): Homolog of NCBI NO: 9294452 NR Description: contains similarity to kinesin heavy
  misc_feature (632)..(757): Homolog of NCBI NO: 13536983 NR Description: BY-2 kinesin-like protein 10 [Nicotiana tabacum]
  misc_feature (1)..(511): Homolog of NCBI NO: 13536983 NR Description: BY-2 kinesin-like protein 10 [Nicotiana tabacum]
  misc_feature (1)..(22): Homolog of NCBI NO: 34897620 NR Description: kinesin-like protein [Oryza sativa]
  misc_feature (27)..(374): Homolog of NCBI NO: 34897620 NR Description: kinesin-like protein [Oryza sativa]
  misc_feature (394)..(764): Homolog of NCBI NO: 34897620 NR Description: kinesin-like protein [Oryza sativa]
MARWLQSAGLQHLASPVASTGNDQRHLPNLLMQGYGAQTAEEKQRLFQLMRNLNFNGESTSESYTPTAHTSAAMPSSEGFFSPEFRGDFGAGLLDLHAMDDTELLSEHVITEPFEPSPFMPSVNKEFEEDYNLAANRQQRQQTEAEPLGLLPKSDKENNSVAKIKVVVRKRPLNKKETAKKEEDVVTVSDNSLTVHEPRVKVDLTAYVEKHEFCFDAVLDEDVSNDEVYRATIEPIIPIIFQRTKATCFAYGQTGSGKTFTMKPLPIRAVEDLMRLLRQPVYSNQRFKLWLSYFEIYGGKLFDLLSERKKLCMREDGRQQVCIVGLQEYEVSDVQIVKDFIEKGNAERSTGSTGANEESSRSHAILQLVVKKHVEVKDTRRRNNDSNELPGKVVGKISFIDLAGSERGADTTDNDRQTRIEGAEINKSLLALKECIRALDNDQLHIPFRGSKLTEVLRDSFVGNSRTVMISCISPNAGSCEHTLNTLRYADRVKSLSKSGNSKKDQTANSMPPVNKDPLLGPNDVEDVFEPPQEVNVPETRRRVVEKDSNSSTSGIDFRQPTNYREESGIPSFSMDKGRSEPNSSFAGSTSQRNNISSYPQETSDREEKVKKVSPPRGKGLREEKPDRPQNWSKRDVSSSDIPTLTNFRQNASETASRQYETASRQYETDPSLDENLDALLEEEEALIAAHRKEIEDTMEIVREEMKLLAEVDQPGSMIENYVTQLSFVLSRKAAGLVSLQARLARFQHRLKEQEILSRKRVPR

SEQ ID NO: 21550 - DNA, 844 bp, Arabidopsis thaliana
  misc_feature (1)..(844): Ceres Seq. ID no. 12604767
  misc_feature: MA Experiment ID: 108434 Result: Up-regulated in Transcription
  misc_feature: MA Experiment 108434 PARAMETER Experiment Name: At_Root_Tips_cDNA_P Parameter: Tissue Value: Root Tips
  misc_feature: MA Experiment ID: 108462 Result: Down-regulated in Transcription
  misc_feature: MA Experiment 108462 PARAMETER Experiment Name: At_Germinating_Seeds_cDNA_P Parameter: Age (day) Value: 2 vs. 0
  misc_feature: MA Experiment 108462 PARAMETER Experiment Name: At_Germinating_Seeds_cDNA_P Parameter: Tissue Value: Germinating Seeds
  misc_feature: MA Experiment ID: 108463 Result: Down-regulated in Transcription
  misc_feature: MA Experiment 108463 PARAMETER Experiment Name: At_Germinating_Seeds_cDNA_P Parameter: Age (day) Value: 3 vs. 0
  misc_feature: MA Experiment 108463 PARAMETER Experiment Name: At_Germinating_Seeds_cDNA_P Parameter: Tissue Value: Germinating Seeds
  misc_feature: MA Experiment ID: 108464 Result: Down-regulated in Transcription
  misc_feature: MA Experiment 108464 PARAMETER Experiment Name: At_Germinating_Seeds_cDNA_P Parameter: Age (day) Value: 4 vs. 0
  misc_feature: MA Experiment 108464 PARAMETER Experiment Name: At_Germinating_Seeds_cDNA_P Parameter: Tissue Value: Germinating Seeds
  misc_feature: MA Experiment ID: 108488 Result: Up-regulated in Transcription
  misc_feature: MA Experiment ID: 108573 Result: Down-regulated in Transcription
  misc_feature: MA Experiment 108573 PARAMETER Experiment Name: At_Drought_cDNA_P Parameter: Timepoint (hr) Value: 6
  misc_feature: MA Experiment 108573 PARAMETER Experiment Name: At_Drought_cDNA_P Parameter: Tissue Value: Aerial
  misc_feature: MA Experiment 108573 PARAMETER Experiment Name: At_Drought_cDNA_P Parameter: Treatment Value: Drought vs. No Drought
  misc_feature: MA Experiment ID: 20000112 Result: Down-regulated in Transcription
  misc_feature: MA Experiment 20000112 PARAMETER Experiment Name: At_42deg_Heat_cDNA_P Parameter: Temperature (deg C) Value: 42 vs. 22
  misc_feature: MA Experiment 20000112 PARAMETER Experiment Name: At_42deg_Heat_cDNA_P Parameter: Timepoint (hr) Value: 2
  misc_feature: MA Experiment 20000112 PARAMETER Experiment Name: At_42deg_Heat_cDNA_P Parameter: Tissue Value: Aerial
  misc_feature: MA Experiment ID: 20000113 Result: Down-regulated in Transcription
  misc_feature: MA Experiment 20000113 PARAMETER Experiment Name: At_42deg_Heat_cDNA_P Parameter: Temperature (deg C) Value: 42 vs. 22
  misc_feature: MA Experiment 20000113 PARAMETER Experiment Name: At_42deg_Heat_cDNA_P Parameter: Timepoint (hr) Value: 8
  misc_feature: MA Experiment 20000113 PARAMETER Experiment Name: At_42deg_Heat_cDNA_P Parameter: Tissue Value: Aerial
  misc_feature: MA Experiment ID: 20000495 Result: Up-regulated in Transcription
  misc_feature: MA Experiment 20000495 PARAMETER Experiment Name: At_Guard_Cells_P Parameter: Harvest Date Value: 8/2/2002
  misc_feature: MA Experiment 20000495 PARAMETER Experiment Name: At_Guard_Cells_P Parameter: Organism Value: A. thaliana
  misc_feature: MA Experiment 20000495 PARAMETER Experiment Name: At_Guard_Cells_P Parameter: Tissue Value: Guard Cells vs. Leaves
  misc_feature: MA Experiment ID: 20000794 Result: Down-regulated in Transcription
  misc_feature: MA Experiment 20000794 PARAMETER Experiment Name: At_Petals_P Parameter: Age (day) Value: 23-25 days
  misc_feature: MA Experiment 20000794 PARAMETER Experiment Name: At_Petals_P Parameter: Plant Line Value: WS
  misc_feature: MA Experiment 20000794 PARAMETER Experiment Name: At_Petals_P Parameter: Tissue Value: Petals vs. Whole plant
  misc_feature: MA Experiment ID: 20001451 Result: Up-regulated in Transcription
  misc_feature: MA Experiment 20001451 PARAMETER Experiment Name: At_Far-red-induction_P Parameter: Age (day) Value: 7
  misc_feature: MA Experiment 20001451 PARAMETER Experiment Name: At_Far-red-induction_P Parameter: Light Value: Far-red vs. White
  misc_feature: MA Experiment 20001451 PARAMETER Experiment Name: At_Far-red-induction_P Parameter: Organism Value: A. thaliana
  misc_feature: MA Experiment 20001451 PARAMETER Experiment Name: At_Far-red-induction_P Parameter: Plant Line Value: Columbia
  misc_feature: MA Experiment 20001451 PARAMETER Experiment Name: At_Far-red-induction_P Parameter: Timepoint (hr) Value: 24
  misc_feature: MA Experiment 20001451 PARAMETER Experiment Name: At_Far-red-induction_P Parameter: Tissue Value: Whole Plant
  misc_feature: MA Experiment ID: 20001557 Result: Up-regulated in Transcription
  misc_feature: MA Experiment 20001557 PARAMETER Experiment Name: At_Drought_Soil_Dry_P Parameter: Age (day) Value: 27
  misc_feature: MA Experiment 20001557 PARAMETER Experiment Name: At_Drought_Soil_Dry_P Parameter: Organism Value: A. thaliana
  misc_feature: MA Experiment 20001557 PARAMETER Experiment Name: At_Drought_Soil_Dry_P Parameter: Plant Line Value: WS
  misc_feature: MA Experiment 20001557 PARAMETER Experiment Name: At_Drought_Soil_Dry_P Parameter: Post Timepoint (hr) Value: 3
  misc_feature: MA Experiment 20001557 PARAMETER Experiment Name: At_Drought_Soil_Dry_P Parameter: Post-Treatment Value: Re-Water vs. No Drought
  misc_feature: MA Experiment 20001557 PARAMETER Experiment Name: At_Drought_Soil_Dry_P Parameter: Timepoint (day) Value: 13
  misc_feature: MA Experiment 20001557 PARAMETER Experiment Name: At_Drought_Soil_Dry_P Parameter: Treatment Value: Drought vs. No Drought
  misc_feature: MA Experiment ID: 20001558 Result: Up-regulated in Transcription
  misc_feature: MA Experiment 20001558 PARAMETER Experiment Name: At_Drought_Soil_Dry_P Parameter: Age (day) Value: 27
  misc_feature: MA Experiment 20001558 PARAMETER Experiment Name: At_Drought_Soil_Dry_P Parameter: Organism Value: A. thaliana
  misc_feature: MA Experiment 20001558 PARAMETER Experiment Name: At_Drought_Soil_Dry_P Parameter: Plant Line Value: WS
  misc_feature: MA Experiment 20001558 PARAMETER Experiment Name: At_Drought_Soil_Dry_P Parameter: Post Timepoint (hr) Value: 6
  misc_feature: MA Experiment 20001558 PARAMETER Experiment Name: At_Drought_Soil_Dry_P Parameter: Post-Treatment Value: Re-Water vs. No Drought
  misc_feature: MA Experiment 20001558 PARAMETER Experiment Name: At_Drought_Soil_Dry_P Parameter: Timepoint (day) Value: 13
  misc_feature: MA Experiment 20001558 PARAMETER Experiment Name: At_Drought_Soil_Dry_P Parameter: Treatment Value: Drought vs. No Drought
  misc_feature: MA Experiment ID: 20001560 Result: Up-regulated in Transcription
  misc_feature: MA Experiment 20001560 PARAMETER Experiment Name: At_Drought_Soil_Dry_P Parameter: Age (day) Value: 28
  misc_feature: MA Experiment 20001560 PARAMETER Experiment Name: At_Drought_Soil_Dry_P Parameter: Organism Value: A. thaliana
  misc_feature: MA Experiment 20001560 PARAMETER Experiment Name: At_Drought_Soil_Dry_P Parameter: Plant Line Value: WS
  misc_feature: MA Experiment 20001560 PARAMETER Experiment Name: At_Drought_Soil_Dry_P Parameter: Post Timepoint (hr) Value: None
  misc_feature: MA Experiment 20001560 PARAMETER Experiment Name: At_Drought_Soil_Dry_P Parameter: Post-Treatment Value: None
  misc_feature: MA Experiment 20001560 PARAMETER Experiment Name: At_Drought_Soil_Dry_P Parameter: Timepoint (day) Value: 14
  misc_feature: MA Experiment 20001560 PARAMETER Experiment Name: At_Drought_Soil_Dry_P Parameter: Treatment Value: Drought vs. No Drought
  misc_feature: MA Experiment ID: 20001757 Result: Up-regulated in Transcription
  misc_feature: MA Experiment 20001757 PARAMETER Experiment Name: At_50mM_NH4NO3_L-to-H_P Parameter: Timepoint (hr) Value: 6
  misc_feature: MA Experiment 20001757 PARAMETER Experiment Name: At_50mM_NH4NO3_L-to-H_P Parameter: Tissue Value: Leaf
  misc_feature: MA Experiment 20001757 PARAMETER Experiment Name: At_50mM_NH4NO3_L-to-H_P Parameter: Treatment Value: 50mM NH4NO3 vs 100mM Mannitol
ctaaatatttaaagctttccttcaccagcattgtattgcctccctggaacaccgaagctctggattaacctattttcaccttctaaggttcttcgtcgttcttattgatctgtgaagatgtattcgggtcagaacaagatccacaaggataagggtgttgcaccaacagagtttgaagagcaagttactcaggctttgtttgacttggagaacaccaaccaggagttgaaaagcgagttgaaagatctctacattaaccaagctgttcagatggatatttctggcaaccgcaaagctgttgtgatctacgttccattcaggctgaggaaagctttccgcaagattcatcttcgtctggtcagagagcttgagaagaagttcagtggaaaagatgtgatctttgttgctaccagaagaatcatgcgcccaccaaagaaaggctcagctgttcagagaccacgcaacagaactcttacttctgtccatgaagccatgctcgaggatgtcgcttaccctgctgagattgtaggaaagagaaccagataccgtcttgatggcaccaagatcatgaaggtatttttggatagtaagctaaagaacgacactgagtacaagctggagacaatggtgggtgtgtacaggaaacttacagggaaagatgtagttttcgagtacccagtcatagaagcttgaagagatgaatgtttgtttcattcttttttgtcggatagagagcttttgattctgtttgggagtaaaactctttgcaaagattttgttatttcagcatttcgcaatctcttcttcaaagttcgatttatcgatacaattcttttttcctacc

SEQ ID NO: 21551 - protein, 191 aa, Arabidopsis thaliana
  peptide (1)..(191): Ceres Seq. ID no. 12604768
  misc_feature (4)..(191): Pfam Name: Ribosomal protein S7e Pfam Description: Ribosomal protein S7e
  misc_feature (1)..(187): Homolog of NCBI NO: 15294025 NR Description: 40S ribosomal protein S7 [Ictalurus punctatus]
  misc_feature (1)..(190): Homolog of NCBI NO: 4588906 NR Description: ribosomal protein S7 [Secale cereale]
  misc_feature (1)..(190): Homolog of NCBI NO: 14787424 NR Description: Ribosomal protein S7 [Hordeum vulgare subsp.
  misc_feature (1)..(190): Homolog of NCBI NO: 22671664 NR Description: ribosomal protein S7 [Oryza sativa (japonica
  misc_feature (1)..(191): Homolog of NCBI NO: 15221972 NR Description: 40S ribosomal protein S7 homolog, putative
  misc_feature (1)..(190): Homolog of NCBI NO: 20139964 NR Description: 40S ribosomal protein S7
  misc_feature (1)..(188): Homolog of NCBI NO: 15237278 NR Description: 40S ribosomal protein S7-like
  misc_feature (1)..(188): Homolog of NCBI NO: 21592413 NR Description: 40S ribosomal protein S7-like [Arabidopsis
  misc_feature (1)..(190): Homolog of NCBI NO: 20139962 NR Description: 40S ribosomal protein S7
  misc_feature (1)..(191): Homolog of NCBI NO: 15232926 NR Description: putative 40S ribosomal protein
MYSGQNKIHKDKGVAPTEFEEQVTQALFDLENTNQELKSELKDLYINQAVQMDISGNRKAVVIYVPFRLRKAFRKIHLRLVRELEKKFSGKDVIFVATRRIMRPPKKGSAVQRPRNRTLTSVHEAMLEDVAYPAEIVGKRTRYRLDGTKIMKVFLDSKLKNDTEYKLETMVGVYRKLTGKDVVFEYPVIEA

SEQ ID NO: 21552 - protein, 140 aa, Arabidopsis thaliana
  peptide (1)..(140): Ceres Seq. ID no. 12604769
  misc_feature (1)..(140): Pfam Name: Ribosomal protein S7e Pfam Description: Ribosomal protein S7e
  misc_feature (1)..(136): Homolog of NCBI NO: 15294025 NR Description: 40S ribosomal protein S7 [Ictalurus punctatus]
  misc_feature (1)..(139): Homolog of NCBI NO: 4588906 NR Description: ribosomal protein S7 [Secale cereale]
  misc_feature (1)..(139): Homolog of NCBI NO: 14787424 NR Description: Ribosomal protein S7 [Hordeum vulgare subsp.
  misc_feature (1)..(139): Homolog of NCBI NO: 22671664 NR Description: ribosomal protein S7 [Oryza sativa (japonica
  misc_feature (1)..(140): Homolog of NCBI NO: 15221972 NR Description: 40S ribosomal protein S7 homolog, putative
  misc_feature (1)..(139): Homolog of NCBI NO: 20139964 NR Description: 40S ribosomal protein S7
  misc_feature (1)..(137): Homolog of NCBI NO: 15237278 NR Description: 40S ribosomal protein S7-like
  misc_feature (1)..(137): Homolog of NCBI NO: 21592413 NR Description: 40S ribosomal protein S7-like [Arabidopsis
  misc_feature (1)..(139): Homolog of NCBI NO: 20139962 NR Description: 40S ribosomal protein S7
  misc_feature (1)..(140): Homolog of NCBI NO: 15232926 NR Description: putative 40S ribosomal protein
MDISGNRKAVVIYVPFRLRKAFRKIHLRLVRELEKKFSGKDVIFVATRRIMRPPKKGSAVQRPRNRTLTSVHEAMLEDVAYPAEIVGKRTRYRLDGTKIMKVFLDSKLKNDTEYKLETMVGVYRKLTGKDVVFEYPVIEA

SEQ ID NO: 21553 - DNA, 1399 bp, Arabidopsis thaliana
  misc_feature (1)..(1399): Ceres Seq. ID no. 12641203
  misc_feature: MA Experiment ID: 20000169 Result: Up-regulated in Transcription
  misc_feature: MA Experiment 20000169 PARAMETER Experiment Name: At_100uM_ABA_P Parameter: Age (day) Value: 14
  misc_feature: MA Experiment 20000169 PARAMETER Experiment Name: At_100uM_ABA_P Parameter: Organism Value: A. thaliana
  misc_feature: MA Experiment 20000169 PARAMETER Experiment Name: At_100uM_ABA_P Parameter: Plant Line Value: WS
  misc_feature: MA Experiment 20000169 PARAMETER Experiment Name: At_100uM_ABA_P Parameter: Timepoint (hr) Value: 6
  misc_feature: MA Experiment 20000169 PARAMETER Experiment Name: At_100uM_ABA_P Parameter: Tissue Value: Aerial
  misc_feature: MA Experiment 20000169 PARAMETER Experiment Name: At_100uM_ABA_P Parameter: Treatment Value: 100uM ABA vs. No Treatment
  misc_feature: MA Experiment ID: 20000179 Result: Up-regulated in Transcription
  misc_feature: MA Experiment 20000179 PARAMETER Experiment Name: At_Germinating_Seeds_P Parameter: Age (hr) Value: 6 vs. 0
  misc_feature: MA Experiment 20000179 PARAMETER Experiment Name: At_Germinating_Seeds_P Parameter: Tissue Value: Germinating Seeds
  misc_feature: MA Experiment ID: 20000180 Result: Up-regulated in Transcription
  misc_feature: MA Experiment 20000180 PARAMETER Experiment Name: At_Germinating_Seeds_P Parameter: Age (hr) Value: 24 vs. 0
  misc_feature: MA Experiment 20000180 PARAMETER Experiment Name: At_Germinating_Seeds_P Parameter: Tissue Value: Germinating Seeds
  misc_feature: MA Experiment ID: 20000182 Result: Up-regulated in Transcription
  misc_feature: MA Experiment 20000182 PARAMETER Experiment Name: At_2mM_SA_P Parameter: Age (day) Value: 14
  misc_feature: MA Experiment 20000182 PARAMETER Experiment Name: At_2mM_SA_P Parameter: Organism Value: A. thaliana
  misc_feature: MA Experiment 20000182 PARAMETER Experiment Name: At_2mM_SA_P Parameter: Plant Line Value: WS
  misc_feature: MA Experiment 20000182 PARAMETER Experiment Name: At_2mM_SA_P Parameter: Timepoint (hr) Value: 6
  misc_feature: MA Experiment 20000182 PARAMETER Experiment Name: At_2mM_SA_P Parameter: Tissue Value: Aerial
  misc_feature: MA Experiment 20000182 PARAMETER Experiment Name: At_2mM_SA_P Parameter: Treatment Value: 2mM SA vs. No Treatment
  misc_feature: MA Experiment ID: 20000234 Result: Down-regulated in Transcription
  misc_feature: MA Experiment 20000234 PARAMETER Experiment Name: At_Siliques_P Parameter: Age (day) Value: 21
  misc_feature: MA Experiment 20000234 PARAMETER Experiment Name: At_Siliques_P Parameter: Organism Value: A. thaliana
  misc_feature: MA Experiment 20000234 PARAMETER Experiment Name: At_Siliques_P Parameter: Plant Line Value: WS
  misc_feature: MA Experiment 20000234 PARAMETER Experiment Name: At_Siliques_P Parameter: Tissue Value: Less Than 5mm Siliques vs. Whole Plant
  misc_feature: MA Experiment ID: 20000286 Result: Down-regulated in Transcription
  misc_feature: MA Experiment 20000286 PARAMETER Experiment Name: At_Open_Flower_P Parameter: Age (day) Value: 21
  misc_feature: MA Experiment 20000286 PARAMETER Experiment Name: At_Open_Flower_P Parameter: Plant Line Value: WS
  misc_feature: MA Experiment 20000286 PARAMETER Experiment Name: At_Open_Flower_P Parameter: Tissue Value: Half Open vs. Whole Plant
  misc_feature: MA Experiment ID: 20000453 Result: Up-regulated in Transcription
  misc_feature: MA Experiment 20000453 PARAMETER Experiment Name: At_100uM_ABA_P Parameter: Age (day) Value: 15
  misc_feature: MA Experiment 20000453 PARAMETER Experiment Name: At_100uM_ABA_P Parameter: Organism Value: A. thaliana
  misc_feature: MA Experiment 20000453 PARAMETER Experiment Name: At_100uM_ABA_P Parameter: Plant Line Value: WS
  misc_feature: MA Experiment 20000453 PARAMETER Experiment Name: At_100uM_ABA_P Parameter: Timepoint (hr) Value: 24
  misc_feature: MA Experiment 20000453 PARAMETER Experiment Name: At_100uM_ABA_P Parameter: Tissue Value: Aerial
  misc_feature: MA Experiment 20000453 PARAMETER Experiment Name: At_100uM_ABA_P Parameter: Treatment Value: 100uM ABA vs. No Treatment
  misc_feature: MA Experiment ID: 20000709 Result: Down-regulated in Transcription
  misc_feature: MA Experiment 20000709 PARAMETER Experiment Name: At_15mM_NH4NO3_L-to-H_P Parameter: Age (hr) Value: 14
  misc_feature: MA Experiment 20000709 PARAMETER Experiment Name: At_15mM_NH4NO3_L-to-H_P Parameter: Organism Value: A. thaliana
  misc_feature: MA Experiment 20000709 PARAMETER Experiment Name: At_15mM_NH4NO3_L-to-H_P Parameter: Plant Line Value: WS
  misc_feature: MA Experiment 20000709 PARAMETER Experiment Name: At_15mM_NH4NO3_L-to-H_P Parameter: Timepoint (hr) Value: 4
  misc_feature: MA Experiment 20000709 PARAMETER Experiment Name: At_15mM_NH4NO3_L-to-H_P Parameter: Tissue Value: Aerial
  misc_feature: MA Experiment 20000709 PARAMETER Experiment Name: At_15mM_NH4NO3_L-to-H_P Parameter: Treatment Value: 15mM NH4NO3 vs. 30mM Mannitol
  misc_feature: MA Experiment ID: 20000794 Result: Up-regulated in Transcription
  misc_feature: MA Experiment 20000794 PARAMETER Experiment Name: At_Petals_P Parameter: Age (day) Value: 23-25 days
  misc_feature: MA Experiment 20000794 PARAMETER Experiment Name: At_Petals_P Parameter: Plant Line Value: WS
  misc_feature: MA Experiment 20000794 PARAMETER Experiment Name: At_Petals_P Parameter: Tissue Value: Petals vs. Whole plant
  misc_feature: MA Experiment ID: 20001554 Result: Up-regulated in Transcription
  misc_feature: MA Experiment 20001554 PARAMETER Experiment Name: At_Drought_Soil_Dry_P Parameter: Age (day) Value: 21
  misc_feature: MA Experiment 20001554 PARAMETER Experiment Name: At_Drought_Soil_Dry_P Parameter: Organism Value: A. thaliana
  misc_feature: MA Experiment 20001554 PARAMETER Experiment Name: At_Drought_Soil_Dry_P Parameter: Plant Line Value: WS
  misc_feature: MA Experiment 20001554 PARAMETER Experiment Name: At_Drought_Soil_Dry_P Parameter: Post Timepoint (hr) Value: None
  misc_feature: MA Experiment 20001554 PARAMETER Experiment Name: At_Drought_Soil_Dry_P Parameter: Post-Treatment Value: None
  misc_feature: MA Experiment 20001554 PARAMETER Experiment Name: At_Drought_Soil_Dry_P Parameter: Timepoint (day) Value: 7
  misc_feature: MA Experiment 20001554 PARAMETER Experiment Name: At_Drought_Soil_Dry_P Parameter: Treatment Value: Drought vs. No Drought
  misc_feature: MA Experiment ID: 20001557 Result: Down-regulated in Transcription
  misc_feature: MA Experiment 20001557 PARAMETER Experiment Name: At_Drought_Soil_Dry_P Parameter: Age (day) Value: 27
  misc_feature: MA Experiment 20001557 PARAMETER Experiment Name: At_Drought_Soil_Dry_P Parameter: Organism Value: A. thaliana
  misc_feature: MA Experiment 20001557 PARAMETER Experiment Name: At_Drought_Soil_Dry_P Parameter: Plant Line Value: WS
  misc_feature: MA Experiment 20001557 PARAMETER Experiment Name: At_Drought_Soil_Dry_P Parameter: Post Timepoint (hr) Value: 3
  misc_feature: MA Experiment 20001557 PARAMETER Experiment Name: At_Drought_Soil_Dry_P Parameter: Post-Treatment Value: Re-Water vs. No Drought
  misc_feature: MA Experiment 20001557 PARAMETER Experiment Name: At_Drought_Soil_Dry_P Parameter: Timepoint (day) Value: 13
  misc_feature: MA Experiment 20001557 PARAMETER Experiment Name: At_Drought_Soil_Dry_P Parameter: Treatment Value: Drought vs. No Drought
  misc_feature: MA Experiment ID: 20001558 Result: Down-regulated in Transcription
  misc_feature: MA Experiment 20001558 PARAMETER Experiment Name: At_Drought_Soil_Dry_P Parameter: Age (day) Value: 27
  misc_feature: MA Experiment 20001558 PARAMETER Experiment Name: At_Drought_Soil_Dry_P Parameter: Organism Value: A. thaliana
  misc_feature: MA Experiment 20001558 PARAMETER Experiment Name: At_Drought_Soil_Dry_P Parameter: Plant Line Value: WS
  misc_feature: MA Experiment 20001558 PARAMETER Experiment Name: At_Drought_Soil_Dry_P Parameter: Post Timepoint (hr) Value: 6
  misc_feature: MA Experiment 20001558 PARAMETER Experiment Name: At_Drought_Soil_Dry_P Parameter: Post-Treatment Value: Re-Water vs. No Drought
  misc_feature: MA Experiment 20001558 PARAMETER Experiment Name: At_Drought_Soil_Dry_P Parameter: Timepoint (day) Value: 13
  misc_feature: MA Experiment 20001558 PARAMETER Experiment Name: At_Drought_Soil_Dry_P Parameter: Treatment Value: Drought vs. No Drought
  misc_feature: MA Experiment ID: 20001560 Result: Down-regulated in Transcription
  misc_feature: MA Experiment 20001560 PARAMETER Experiment Name: At_Drought_Soil_Dry_P Parameter: Age (day) Value: 28
  misc_feature: MA Experiment 20001560 PARAMETER Experiment Name: At_Drought_Soil_Dry_P Parameter: Organism Value: A. thaliana
  misc_feature: MA Experiment 20001560 PARAMETER Experiment Name: At_Drought_Soil_Dry_P Parameter: Plant Line Value: WS
  misc_feature: MA Experiment 20001560 PARAMETER Experiment Name: At_Drought_Soil_Dry_P Parameter: Post Timepoint (hr) Value: None
  misc_feature: MA Experiment 20001560 PARAMETER Experiment Name: At_Drought_Soil_Dry_P Parameter: Post-Treatment Value: None
  misc_feature: MA Experiment 20001560 PARAMETER Experiment Name: At_Drought_Soil_Dry_P Parameter: Timepoint (day) Value: 14
  misc_feature: MA Experiment 20001560 PARAMETER Experiment Name: At_Drought_Soil_Dry_P Parameter: Treatment Value: Drought vs. No Drought
acaatctatcgagctaaaacactgaagcagacattagcgttgagaaaaaaaaaaaagtaagaacgagagagagaaagccatgtctgcgaaaacaatcctatcatcagtagttttggtggttctcgtcgccgcatcagcagcggctaatatcggattcgatgagtcaaacccgatccgaatggtctccgatggtctccgggaggtagaagaatctgtttcccagatcttaggtcaatctcgtcacgttctctctttcgctcgcttcactcaccgatatggtaaaaagtatcagaacgtggaggagatgaagcttcgattctcgattttcaaggagaatcttgatttgatcagatccaccaacaagaaaggcttatcttacaaactcggtgttaatcaatttgctgatttgacatggcaagagtttcaaaggaccaagcttggtgctgctcagaactgctctgccactttaaagggcagccacaaggtcacagaagcagctcttcctgaaacaaaagactggagagaagatggtatcgttagtccggtcaaagatcagggaggttgtggatcttgctggacattcagcacaactggagctcttgaggcagcttaccatcaggcatttggaaaaggaatttctctctctgagcaacagcttgtggattgtgctggagctttcaataactatggttgcaatggtggccttccttctcaagcctttgaatacatcaaatccaacggtggcctcgacacagagaaagcttatccttataccggtaaagatgaaacctgcaaattttcagctgaaaacgttggtgtacaagtcctcaactcagtcaacattactctgggtgctgaagatgaactgaagcatgcggttggattggtacggccagtaagcatagcatttgaggttatacactcgttccggctttacaagagtggagtttacactgatagtcactgtggaagtactccaatggatgtgaaccacgcggttttggccgttggttatggagttgaagacggtgtaccatattggcttattaagaactcatggggagcggattggggcgacaaaggttacttcaagatggagatggggaagaacatgtgtggtattgctacatgtgcatcataccccgttgtggcttgagatgatcagcgaatgtggttggtcaattatcaaattacgaaatgttcacgtatttattggattaagacattacgtaaaagttgggacttgggaatgcatatggtttatgcttgttgtaacataaaaaggtctgttaatatgtacaaaataaagccaaaactatagacgacaaatttataatattttcatgttaaatttatgaacataaattgatttagatcaaagtagtttcgttcttgatcc

SEQ ID NO: 21554 - protein, 358 aa, Arabidopsis thaliana
  peptide (1)..(358): Ceres Seq. ID no. 12641204
  misc_feature (141)..(356): Pfam Name: Papain family cysteine protease Pfam Description: Papain family cysteine protease
  misc_feature (9)..(358): Homolog of NCBI NO: 14422331 NR Description: early leaf senescence abundant cysteine protease
  misc_feature (9)..(358): Homolog of NCBI NO: 7435779 NR Description: cysteine proteinase (EC 3.4.22.-) - garden pea
  misc_feature (6)..(358): Homolog of NCBI NO: 2677828 NR Description: cysteine protease [Prunus armeniaca]
  misc_feature (6)..(358): Homolog of NCBI NO: 28192371 NR Description: NTCP23-like cysteine proteinase [Nicotiana
  misc_feature (6)..(358): Homolog of NCBI NO: 8347420 NR Description: cysteine protease [Nicotiana tabacum]
  misc_feature (1)..(346): Homolog of NCBI NO: 11265612 NR Description: cysteine proteinase (EC 3.4.22.-) F18N11.70
  misc_feature (1)..(358): Homolog of NCBI NO: 18407961 NR Description: cysteine proteinase AALP, putative
  misc_feature (1)..(358): Homolog of NCBI NO: 18141289 NR Description: senescence-associated cysteine protease [Brassica
  misc_feature (1)..(358): Homolog of NCBI NO: 23397070 NR Description: putative cysteine proteinase AALP [Arabidopsis
  misc_feature (1)..(358): Homolog of NCBI NO: 18424347 NR Description: cysteine proteinase AALP
MSAKTILSSVVLVVLVAASAAANIGFDESNPIRMVSDGLREVEESVSQILGQSRHVLSFARFTHRYGKKYQNVEEMKLRFSIFKENLDLIRSTNKKGLSYKLGVNQFADLTWQEFQRTKLGAAQNCSATLKGSHKVTEAALPETKDWREDGIVSPVKDQGGCGSCWTFSTTGALEAAYHQAFGKGISLSEQQLVDCAGAFNNYGCNGGLPSQAFEYIKSNGGLDTEKAYPYTGKDETCKFSAENVGVQVLNSVNITLGAEDELKHAVGLVRPVSIAFEVIHSFRLYKSGVYTDSHCGSTPMDVNHAVLAVGYGVEDGVPYWLIKNSWGADWGDKGYFKMEMGKNMCGIATCASYPVVA

SEQ ID NO: 21555 - protein, 325 aa, Arabidopsis thaliana
  peptide (1)..(325): Ceres Seq. ID no. 12641205
  misc_feature (108)..(323): Pfam Name: Papain family cysteine protease Pfam Description: Papain family cysteine protease
  misc_feature (1)..(325): Homolog of NCBI NO: 14422331 NR Description: early leaf senescence abundant cysteine protease
  misc_feature (1)..(325): Homolog of NCBI NO: 7435779 NR Description: cysteine proteinase (EC 3.4.22.-) - garden pea
  misc_feature (1)..(325): Homolog of NCBI NO: 2677828 NR Description: cysteine protease [Prunus armeniaca]
  misc_feature (1)..(325): Homolog of NCBI NO: 28192371 NR Description: NTCP23-like cysteine proteinase [Nicotiana
  misc_feature (1)..(325): Homolog of NCBI NO: 8347420 NR Description: cysteine protease [Nicotiana tabacum]
  misc_feature (1)..(313): Homolog of NCBI NO: 11265612 NR Description: cysteine proteinase (EC 3.4.22.-) F18N11.70
  misc_feature (1)..(325): Homolog of NCBI NO: 18407961 NR Description: cysteine proteinase AALP, putative
  misc_feature (1)..(325): Homolog of NCBI NO: 18141289 NR Description: senescence-associated cysteine protease [Brassica
  misc_feature (1)..(325): Homolog of NCBI NO: 23397070 NR Description: putative cysteine proteinase AALP [Arabidopsis
  misc_feature (1)..(325): Homolog of NCBI NO: 18424347 NR Description: cysteine proteinase AALP
MVSDGLREVEESVSQILGQSRHVLSFARFTHRYGKKYQNVEEMKLRFSIFKENLDLIRSTNKKGLSYKLGVNQFADLTWQEFQRTKLGAAQNCSATLKGSHKVTEAALPETKDWREDGIVSPVKDQGGCGSCWTFSTTGALEAAYHQAFGKGISLSEQQLVDCAGAFNNYGCNGGLPSQAFEYIKSNGGLDTEKAYPYTGKDETCKFSAENVGVQVLNSVNITLGAEDELKHAVGLVRPVSIAFEVIHSFRLYKSGVYTDSHCGSTPMDVNHAVLAVGYGVEDGVPYWLIKNSWGADWGDKGYFKMEMGKNMCGIATCASYPVVA

SEQ ID NO: 21556 - protein, 283 aa, Arabidopsis thaliana
  peptide (1)..(283): Ceres Seq. ID no. 12641206
  misc_feature (66)..(281): Pfam Name: Papain family cysteine protease Pfam Description: Papain family cysteine protease
  misc_feature (1)..(283): Homolog of NCBI NO: 14422331 NR Description: early leaf senescence abundant cysteine protease
  misc_feature (1)..(283): Homolog of NCBI NO: 7435779 NR Description: cysteine proteinase (EC 3.4.22.-) - garden pea
  misc_feature (1)..(283): Homolog of NCBI NO: 2677828 NR Description: cysteine protease [Prunus armeniaca]
  misc_feature (1)..(283): Homolog of NCBI NO: 28192371 NR Description: NTCP23-like cysteine proteinase [Nicotiana
  misc_feature (1)..(283): Homolog of NCBI NO: 8347420 NR Description: cysteine protease [Nicotiana tabacum]
  misc_feature (1)..(271): Homolog of NCBI NO: 11265612 NR Description: cysteine proteinase (EC 3.4.22.-) F18N11.70
  misc_feature (1)..(283): Homolog of NCBI NO: 18407961 NR Description: cysteine proteinase AALP, putative
  misc_feature (1)..(283): Homolog of NCBI NO: 18141289 NR Description: senescence-associated cysteine protease [Brassica
  misc_feature (1)..(283): Homolog of NCBI NO: 23397070 NR Description: putative cysteine proteinase AALP [Arabidopsis
  misc_feature (1)..(283): Homolog of NCBI NO: 18424347 NR Description: cysteine proteinase AALP
MKLRFSIFKENLDLIRSTNKKGLSYKLGVNQFADLTWQEFQRTKLGAAQNCSATLKGSHKVTEAALPETKDWREDGIVSPVKDQGGCGSCWTFSTTGALEAAYHQAFGKGISLSEQQLVDCAGAFNNYGCNGGLPSQAFEYIKSNGGLDTEKAYPYTGKDETCKFSAENVGVQVLNSVNITLGAEDELKHAVGLVRPVSIAFEVIHSFRLYKSGVYTDSHCGSTPMDVNHAVLAVGYGVEDGVPYWLIKNSWGADWGDKGYFKMEMGKNMCGIATCASYPVVA

SEQ ID NO: 21557 - DNA, 1212 bp, Arabidopsis thaliana
  misc_feature (1)..(1212): Ceres Seq. ID no. 12333915
  misc_feature: MA Experiment ID: 108462 Result: Down-regulated in Transcription
  misc_feature: MA Experiment 108462 PARAMETER Experiment Name: At_Germinating_Seeds_cDNA_P Parameter: Age (day) Value: 2 vs. 0
  misc_feature: MA Experiment 108462 PARAMETER Experiment Name: At_Germinating_Seeds_cDNA_P Parameter: Tissue Value: Germinating Seeds
  misc_feature: MA Experiment ID: 108463 Result: Down-regulated in Transcription
  misc_feature: MA Experiment 108463 PARAMETER Experiment Name: At_Germinating_Seeds_cDNA_P Parameter: Age (day) Value: 3 vs. 0
  misc_feature: MA Experiment 108463 PARAMETER Experiment Name: At_Germinating_Seeds_cDNA_P Parameter: Tissue Value: Germinating Seeds
  misc_feature: MA Experiment ID: 108464 Result: Down-regulated in Transcription
  misc_feature: MA Experiment 108464 PARAMETER Experiment Name: At_Germinating_Seeds_cDNA_P Parameter: Age (day) Value: 4 vs. 0
  misc_feature: MA Experiment 108464 PARAMETER Experiment Name: At_Germinating_Seeds_cDNA_P Parameter: Tissue Value: Germinating Seeds
  misc_feature: MA Experiment ID: 108577 Result: Down-regulated in Transcription
  misc_feature: MA Experiment 108577 PARAMETER Experiment Name: At_42deg_Heat_cDNA_P Parameter: Temperature (deg C) Value: 42 vs. 22
  misc_feature: MA Experiment 108577 PARAMETER Experiment Name: At_42deg_Heat_cDNA_P Parameter: Timepoint (hr) Value: 6
  misc_feature: MA Experiment 108577 PARAMETER Experiment Name: At_42deg_Heat_cDNA_P Parameter: Tissue Value: Aerial
  misc_feature: MA Experiment ID: 20000113 Result: Down-regulated in Transcription
  misc_feature: MA Experiment 20000113 PARAMETER Experiment Name: At_42deg_Heat_cDNA_P Parameter: Temperature (deg C) Value: 42 vs. 22
  misc_feature: MA Experiment 20000113 PARAMETER Experiment Name: At_42deg_Heat_cDNA_P Parameter: Timepoint (hr) Value: 8
  misc_feature: MA Experiment 20000113 PARAMETER Experiment Name: At_42deg_Heat_cDNA_P Parameter: Tissue Value: Aerial
gaaaaagcgttcgaccaaaagatcagaacaaagcgaaggcggattttctggattctcgacggccggagattcatggcgacggctaacggagcaaagagtccgtcgagtatgggccctaaggttttgttttattccatattgctcacacttcagtacggagcccagcctctgatctccaaacgctgcatcagaaaggatgttattgtaacttcatctgttttgacgtgcgagattgttaaggtcatatgtgctctgattctcatggcaagaaatggtagtttgaagggattagcaaaagagtggacgttgatgggatccttgacagcatcaggacttcctgcagccatatatgcactgcagaacagtttgctgcagatctcatacaggagtcttgattccttgacattttcaattctgaatcagacgaaaatctttttcacagcattctttactttcataatactaaggcagaagcaatcaattctacaaataggagccttgtgtctattgatcatggcagcagtccttctaagtgttggtgaaggctctaacaaagattcaagcggcattaatgcggatcaaaagctgttttatggaattatcccggtcttggcagcctctgtcctgtcgggtttagcctcttctctgtgtcaatgggcttctcaggtcaagaagcattcatcatacttaatgacggttgaaatgtctatcgttggaagcctctgtttattagtaagtactcttaaatctccagatggtgaagcgattaaaaaatatggcttctttcatggttggactgctttaacactggtcccagtaataagcaatgctcttggtgggattcttgttggcctagttacatcacatgccggtggtgtaagaaagggatttgtgattgtgtcggcattacttgtgacggcgctacttcaatttgcgtttgaaggaaaaccgccatcatcgtattgcctagttgctcttcctcttgtgatgagtagtatctcaatgtaccagaaatacccatacattgacaagaagaagaagaaggtgtaagaaaaaggttccattcagagaatagctgctagtgctaagtacaacaatgagatatcttaatgccattattattaactaagtagatgatagtgtgattcttggagcattcaaaagactttgtagtatatttacattcaaagatggaatgagtccaattgagac

SEQ ID NO: 21558 - protein, 349 aa, Arabidopsis thaliana
  peptide (1)..(349): Ceres Seq. ID no. 12333916
  misc_feature (92)..(305): Pfam Name: Nucleotide-sugar transporter Pfam Description: Nucleotide-sugar transporter
  misc_feature (45)..(336): Homolog of NCBI NO: 21450281 NR Description: RIKEN cDNA 2310050P13 [Mus musculus]
  misc_feature (33)..(347): Homolog of NCBI NO: 39593097 NR Description: Hypothetical protein CBG09317 [Caenorhabditis
  misc_feature (33)..(347): Homolog of NCBI NO: 38176083 NR Description: Hypothetical protein ZC250.3 [Caenorhabditis
  misc_feature (45)..(336): Homolog of NCBI NO: 37725001 NR Description: solute carrier family 35 member 3 [Bos taurus]
  misc_feature (40)..(336): Homolog of NCBI NO: 22204205 NR Description: SI:bZ30I22.3 (novel protein similar to vertebrate
  misc_feature (45)..(336): Homolog of NCBI NO: 6136120 NR Description: UDP N-acetylglucosamine transporter (Golgi
  misc_feature (45)..(336): Homolog of NCBI NO: 6912668 NR Description: solute carrier family 35 (UDP-N-acetylglucosamine
  misc_feature (88)..(349): Homolog of NCBI NO: 8843764 NR Description: gene_id:MXK3.23~ref|NP_036375.1~similar to
  misc_feature (25)..(349): Homolog of NCBI NO: 18086579 NR Description: AT5g65000/MXK3_23 [Arabidopsis thaliana]
  misc_feature (25)..(349): Homolog of NCBI NO: 18424900 NR Description: putative protein
EKAFDQKIRTKRRRIFWILDGRRFMATANGAKSPSSMGPKVLFYSILLTLQYGAQPLISKRCIRKDVIVTSSVLTCEIVKVICALILMARNGSLKGLAKEWTLMGSLTASGLPAAIYALQNSLLQISYRSLDSLTFSILNQTKIFFTAFFTFIILRQKQSILQIGALCLLIMAAVLLSVGEGSNKDSSGINADQKLFYGIIPVLAASVLSGLASSLCQWASQVKKHSSYLMTVEMSIVGSLCLLVSTLKSPDGEAIKKYGFFHGWTALTLVPVISNALGGILVGLVTSHAGGVRKGFVIVSALLVTALLQFAFEGKPPSSYCLVALPLVMSSISMYQKYPYIDKKKKKV

SEQ ID NO: 21559 - protein, 325 aa, Arabidopsis thaliana
  peptide (1)..(325): Ceres Seq. ID no. 12333917
  misc_feature (68)..(281): Pfam Name: Nucleotide-sugar transporter Pfam Description: Nucleotide-sugar transporter
  misc_feature (21)..(312): Homolog of NCBI NO: 6912668 NR Description: solute carrier family 35 (UDP-N-acetylglucosamine
  misc_feature (64)..(325): Homolog of NCBI NO: 8843764 NR Description: gene_id:MXK3.23~ref|NP_036375.1~similar to
  misc_feature (21)..(312): Homolog of NCBI NO: 21450281 NR Description: RIKEN cDNA 2310050P13 [Mus musculus]
  misc_feature (9)..(323): Homolog of NCBI NO: 38176083 NR Description: Hypothetical protein ZC250.3 [Caenorhabditis
  misc_feature (16)..(312): Homolog of NCBI NO: 22204205 NR Description: SI:bZ30I22.3 (novel protein similar to vertebrate
  misc_feature (21)..(312): Homolog of NCBI NO: 6136120 NR Description: UDP N-acetylglucosamine transporter (Golgi
  misc_feature (21)..(312): Homolog of NCBI NO: 37725001 NR Description: solute carrier family 35 member 3 [Bos taurus]
  misc_feature (9)..(323): Homolog of NCBI NO: 39593097 NR Description: Hypothetical protein CBG09317 [Caenorhabditis
  misc_feature (1)..(325): Homolog of NCBI NO: 18086579 NR Description: AT5g65000/MXK3_23 [Arabidopsis thaliana]
  misc_feature (1)..(325): Homolog of NCBI NO: 18424900 NR Description: putative protein
MATANGAKSPSSMGPKVLFYSILLTLQYGAQPLISKRCIRKDVIVTSSVLTCEIVKVICALILMARNGSLKGLAKEWTLMGSLTASGLPAAIYALQNSLLQISYRSLDSLTFSILNQTKIFFTAFFTFIILRQKQSILQIGALCLLIMAAVLLSVGEGSNKDSSGINADQKLFYGIIPVLAASVLSGLASSLCQWASQVKKHSSYLMTVEMSIVGSLCLLVSTLKSPDGEAIKKYGFFHGWTALTLVPVISNALGGILVGLVTSHAGGVRKGFVIVSALLVTALLQFAFEGKPPSSYCLVALPLVMSSISMYQKYPYIDKKKKKV

SEQ ID NO: 21560 - protein, 313 aa, Arabidopsis thaliana
  peptide (1)..(313): Ceres Seq. ID no. 12333918
  misc_feature (56)..(269): Pfam Name: Nucleotide-sugar transporter Pfam Description: Nucleotide-sugar transporter
  misc_feature (9)..(300): Homolog of NCBI NO: 21450281 NR Description: RIKEN cDNA 2310050P13 [Mus musculus]
  misc_feature (1)..(311): Homolog of NCBI NO: 39593097 NR Description: Hypothetical protein CBG09317 [Caenorhabditis
  misc_feature (1)..(311): Homolog of NCBI NO: 38176083 NR Description: Hypothetical protein ZC250.3 [Caenorhabditis
  misc_feature (9)..(300): Homolog of NCBI NO: 37725001 NR Description: solute carrier family 35 member 3 [Bos taurus]
  misc_feature (4)..(300): Homolog of NCBI NO: 22204205 NR Description: SI:bZ30I22.3 (novel protein similar to vertebrate
  misc_feature (9)..(300): Homolog of NCBI NO: 6136120 NR Description: UDP N-acetylglucosamine transporter (Golgi
  misc_feature (9)..(300): Homolog of NCBI NO: 6912668 NR Description: solute carrier family 35 (UDP-N-acetylglucosamine
  misc_feature (52)..(313): Homolog of NCBI NO: 8843764 NR Description: gene_id:MXK3.23~ref|NP_036375.1~similar to
  misc_feature (1)..(313): Homolog of NCBI NO: 18086579 NR Description: AT5g65000/MXK3_23 [Arabidopsis thaliana]
  misc_feature (1)..(313): Homolog of NCBI NO: 18424900 NR Description: putative protein
MGPKVLFYSILLTLQYGAQPLISKRCIRKDVIVTSSVLTCEIVKVICALILMARNGSLKGLAKEWTLMGSLTASGLPAAIYALQNSLLQISYRSLDSLTFSILNQTKIFFTAFFTFIILRQKQSILQIGALCLLIMAAVLLSVGEGSNKDSSGINADQKLFYGIIPVLAASVLSGLASSLCQWASQVKKHSSYLMTVEMSIVGSLCLLVSTLKSPDGEAIKKYGFFHGWTALTLVPVISNALGGILVGLVTSHAGGVRKGFVIVSALLVTALLQFAFEGKPPSSYCLVALPLVMSSISMYQKYPYIDKKKKKV

SEQ ID NO: 21561 - DNA, 1224 bp, Arabidopsis thaliana
  misc_feature (1)..(1224): Ceres Seq. ID no. 13621991
  misc_feature: MA Experiment ID: 108434 Result: Down-regulated in Transcription
  misc_feature: MA Experiment 108434 PARAMETER Experiment Name: At_Root_Tips_cDNA_P Parameter: Tissue Value: Root Tips
  misc_feature: MA Experiment ID: 108462 Result: Up-regulated in Transcription
  misc_feature: MA Experiment 108462 PARAMETER Experiment Name: At_Germinating_Seeds_cDNA_P Parameter: Age (day) Value: 2 vs. 0
  misc_feature: MA Experiment 108462 PARAMETER Experiment Name: At_Germinating_Seeds_cDNA_P Parameter: Tissue Value: Germinating Seeds
  misc_feature: MA Experiment ID: 108463 Result: Up-regulated in Transcription
  misc_feature: MA Experiment 108463 PARAMETER Experiment Name: At_Germinating_Seeds_cDNA_P Parameter: Age (day) Value: 3 vs. 0
  misc_feature: MA Experiment 108463 PARAMETER Experiment Name: At_Germinating_Seeds_cDNA_P Parameter: Tissue Value: Germinating Seeds
  misc_feature: MA Experiment ID: 108464 Result: Up-regulated in Transcription
  misc_feature: MA Experiment 108464 PARAMETER Experiment Name: At_Germinating_Seeds_cDNA_P Parameter: Age (day) Value: 4 vs. 0
  misc_feature: MA Experiment 108464 PARAMETER Experiment Name: At_Germinating_Seeds_cDNA_P Parameter: Tissue Value: Germinating Seeds
  misc_feature: MA Experiment ID: 108569 Result: Up-regulated in Transcription
  misc_feature: MA Experiment 108569 PARAMETER Experiment Name: At_0.001%_MeJA__cDNA_P Parameter: Timepoint (hr) Value: 6
  misc_feature: MA Experiment 108569 PARAMETER Experiment Name: At_0.001%_MeJA__cDNA_P Parameter: Tissue Value: Aerial
  misc_feature: MA Experiment 108569 PARAMETER Experiment Name: At_0.001%_MeJA__cDNA_P Parameter: Treatment Value: 0.001% MeJA vs. No Treatment
  misc_feature: MA Experiment ID: 108573 Result: Up-regulated in Transcription
  misc_feature: MA Experiment 108573 PARAMETER Experiment Name: At_Drought_cDNA_P Parameter: Timepoint (hr) Value: 6
  misc_feature: MA Experiment 108573 PARAMETER Experiment Name: At_Drought_cDNA_P Parameter: Tissue Value: Aerial
  misc_feature: MA Experiment 108573 PARAMETER Experiment Name: At_Drought_cDNA_P Parameter: Treatment Value: Drought vs. No Drought
  misc_feature: MA Experiment ID: 108577 Result: Up-regulated in Transcription
  misc_feature: MA Experiment 108577 PARAMETER Experiment Name: At_42deg_Heat_cDNA_P Parameter: Temperature (deg C) Value: 42 vs. 22
  misc_feature: MA Experiment 108577 PARAMETER Experiment Name: At_42deg_Heat_cDNA_P Parameter: Timepoint (hr) Value: 6
  misc_feature: MA Experiment 108577 PARAMETER Experiment Name: At_42deg_Heat_cDNA_P Parameter: Tissue Value: Aerial
  misc_feature: MA Experiment ID: 108594 Result: Down-regulated in Transcription
  misc_feature: MA Experiment 108594 PARAMETER Experiment Name: At_Ler-rhl_Root_cDNA_P Parameter: Plant Line Value: null
  misc_feature: MA Experiment ID: 108595 Result: Down-regulated in Transcription
  misc_feature: MA Experiment 108595 PARAMETER Experiment Name: At_Ler-pi_Ovule_cDNA_P Parameter: Plant Line Value: null
  misc_feature: MA Experiment ID: 108605 Result: Up-regulated in Transcription
  misc_feature: MA Experiment 108605 PARAMETER Experiment Name: At_100uM_ABA_cDNA_P Parameter: Timepoint (hr) Value: 6
  misc_feature: MA Experiment 108605 PARAMETER Experiment Name: At_100uM_ABA_cDNA_P Parameter: Tissue Value: Aerial
  misc_feature: MA Experiment 108605 PARAMETER Experiment Name: At_100uM_ABA_cDNA_P Parameter: Treatment Value: 100uM ABA vs. No Treatment
  misc_feature: MA Experiment ID: 108668 Result: Up-regulated in Transcription
  misc_feature: MA Experiment 108668 PARAMETER Experiment Name: At_2mM_SA_cDNA_P Parameter: Plant Line Value: WS
  misc_feature: MA Experiment 108668 PARAMETER Experiment Name: At_2mM_SA_cDNA_P Parameter: Timepoint (hr) Value: 6
  misc_feature: MA Experiment 108668 PARAMETER Experiment Name: At_2mM_SA_cDNA_P Parameter: Treatment Value: 2mM SA vs. No Treatment
  misc_feature: MA Experiment ID: 20000089 Result: Down-regulated in Transcription
  misc_feature: MA Experiment ID: 20000090 Result: Down-regulated in Transcription
  misc_feature: MA Experiment ID: 20000113 Result: Up-regulated in Transcription
  misc_feature: MA Experiment 20000113 PARAMETER Experiment Name: At_42deg_Heat_cDNA_P Parameter: Temperature (deg C) Value: 42 vs. 22
  misc_feature: MA Experiment 20000113 PARAMETER Experiment Name: At_42deg_Heat_cDNA_P Parameter: Timepoint (hr) Value: 8
  misc_feature: MA Experiment 20000113 PARAMETER Experiment Name: At_42deg_Heat_cDNA_P Parameter: Tissue Value: Aerial
  misc_feature: MA Experiment ID: 20000169 Result: Up-regulated in Transcription
  misc_feature: MA Experiment 20000169 PARAMETER Experiment Name: At_100uM_ABA_P Parameter: Age (day) Value: 14
  misc_feature: MA Experiment 20000169 PARAMETER Experiment Name: At_100uM_ABA_P Parameter: Organism Value: A. thaliana
  misc_feature: MA Experiment 20000169 PARAMETER Experiment Name: At_100uM_ABA_P Parameter: Plant Line Value: WS
  misc_feature: MA Experiment 20000169 PARAMETER Experiment Name: At_100uM_ABA_P Parameter: Timepoint (hr) Value: 6
  misc_feature: MA Experiment 20000169 PARAMETER Experiment Name: At_100uM_ABA_P Parameter: Tissue Value: Aerial
  misc_feature: MA Experiment 20000169 PARAMETER Experiment Name: At_100uM_ABA_P Parameter: Treatment Value: 100uM ABA vs. No Treatment
  misc_feature: MA Experiment ID: 20000180 Result: Up-regulated in Transcription
  misc_feature: MA Experiment 20000180 PARAMETER Experiment Name: At_Germinating_Seeds_P Parameter: Age (hr) Value: 24 vs. 0
  misc_feature: MA Experiment 20000180 PARAMETER Experiment Name: At_Germinating_Seeds_P Parameter: Tissue Value: Germinating Seeds
  misc_feature: MA Experiment ID: 20000182 Result: Up-regulated in Transcription
  misc_feature: MA Experiment 20000182 PARAMETER Experiment Name: At_2mM_SA_P Parameter: Age (day) Value: 14
  misc_feature: MA Experiment 20000182 PARAMETER Experiment Name: At_2mM_SA_P Parameter: Organism Value: A. thaliana
  misc_feature: MA Experiment 20000182 PARAMETER Experiment Name: At_2mM_SA_P Parameter: Plant Line Value: WS
  misc_feature: MA Experiment 20000182 PARAMETER Experiment Name: At_2mM_SA_P Parameter: Timepoint (hr) Value: 6
  misc_feature: MA Experiment 20000182 PARAMETER Experiment Name: At_2mM_SA_P Parameter: Tissue Value: Aerial
  misc_feature: MA Experiment 20000182 PARAMETER Experiment Name: At_2mM_SA_P Parameter: Treatment Value: 2mM SA vs. No Treatment
  misc_feature: MA Experiment ID: 20000234 Result: Down-regulated in Transcription
  misc_feature: MA Experiment 20000234 PARAMETER Experiment Name: At_Siliques_P Parameter: Age (day) Value: 21
  misc_feature: MA Experiment 20000234 PARAMETER Experiment Name: At_Siliques_P Parameter: Organism Value: A. thaliana
  misc_feature: MA Experiment 20000234 PARAMETER Experiment Name: At_Siliques_P Parameter: Plant Line Value: WS
  misc_feature: MA Experiment 20000234 PARAMETER Experiment Name: At_Siliques_P Parameter: Tissue Value: Less Than 5mm Siliques vs. Whole Plant
  misc_feature: MA Experiment ID: 20000451 Result: Down-regulated in Transcription
  misc_feature: MA Experiment 20000451 PARAMETER Experiment Name: At_CS6879_Shoots-Roots_P Parameter: Age (day) Value: 14
  misc_feature: MA Experiment 20000451 PARAMETER Experiment Name: At_CS6879_Shoots-Roots_P Parameter: Organism Value: A. thaliana
  misc_feature: MA Experiment 20000451 PARAMETER Experiment Name: At_CS6879_Shoots-Roots_P Parameter: Plant Line Value: CS6879 vs. WS
  misc_feature: MA Experiment 20000451 PARAMETER Experiment Name: At_CS6879_Shoots-Roots_P Parameter: Tissue Value: Roots
  misc_feature: MA Experiment ID: 20000506 Result: Up-regulated in Transcription
  misc_feature: MA Experiment 20000506 PARAMETER Experiment Name: At_Wounding_P Parameter: Organism Value: A. thaliana
  misc_feature: MA Experiment 20000506 PARAMETER Experiment Name: At_Wounding_P Parameter: Plant Line Value: WS
  misc_feature: MA Experiment 20000506 PARAMETER Experiment Name: At_Wounding_P Parameter: Timepoint (hr) Value: 6
  misc_feature: MA Experiment 20000506 PARAMETER Experiment Name: At_Wounding_P Parameter: Tissue Value: Aerial
  misc_feature: MA Experiment 20000506 PARAMETER Experiment Name: At_Wounding_P Parameter: Treatment Value: Wounding vs. No Wounding
  misc_feature: MA Experiment ID: 20001247 Result: Up-regulated in Transcription
  misc_feature: MA Experiment 20001247 PARAMETER Experiment Name: At_Far-red-induction_P Parameter: Age (day) Value: 7
  misc_feature: MA Experiment 20001247 PARAMETER Experiment Name: At_Far-red-induction_P Parameter: Light Value: Far-red vs. White
  misc_feature: MA Experiment 20001247 PARAMETER Experiment Name: At_Far-red-induction_P Parameter: Organism Value: A. thaliana
  misc_feature: MA Experiment 20001247 PARAMETER Experiment Name: At_Far-red-induction_P Parameter: Plant Line Value: Columbia
  misc_feature: MA Experiment 20001247 PARAMETER Experiment Name: At_Far-red-induction_P Parameter: Timepoint (hr) Value: 1
  misc_feature: MA Experiment 20001247 PARAMETER Experiment Name: At_Far-red-induction_P Parameter: Tissue Value: Whole Plant
  misc_feature: MA Experiment ID: 20001450 Result: Up-regulated in Transcription
  misc_feature: MA Experiment 20001450 PARAMETER Experiment Name: At_Far-red-induction_P Parameter: Age (day) Value: 7
  misc_feature: MA Experiment 20001450 PARAMETER Experiment Name: At_Far-red-induction_P Parameter: Light Value: Far-red vs. White
  misc_feature: MA Experiment 20001450 PARAMETER Experiment Name: At_Far-red-induction_P Parameter: Organism Value: A. thaliana
  misc_feature: MA Experiment 20001450 PARAMETER Experiment Name: At_Far-red-induction_P Parameter: Plant Line Value: Columbia
  misc_feature: MA Experiment 20001450 PARAMETER Experiment Name: At_Far-red-induction_P Parameter: Timepoint (hr) Value: 8
  misc_feature: MA Experiment 20001450 PARAMETER Experiment Name: At_Far-red-induction_P Parameter: Tissue Value: Whole Plant
  misc_feature: MA Experiment ID: 20001556 Result: Down-regulated in Transcription
  misc_feature: MA Experiment 20001556 PARAMETER Experiment Name: At_Drought_Soil_Dry_P Parameter: Age (day) Value: 26
  misc_feature: MA Experiment 20001556 PARAMETER Experiment Name: At_Drought_Soil_Dry_P Parameter: Organism Value: A. thaliana
  misc_feature: MA Experiment 20001556 PARAMETER Experiment Name: At_Drought_Soil_Dry_P Parameter: Plant Line Value: WS
  misc_feature: MA Experiment 20001556 PARAMETER Experiment Name: At_Drought_Soil_Dry_P Parameter: Post Timepoint (hr) Value: None
  misc_feature: MA Experiment 20001556 PARAMETER Experiment Name: At_Drought_Soil_Dry_P Parameter: Post-Treatment Value: None
  misc_feature: MA Experiment 20001556 PARAMETER Experiment Name: At_Drought_Soil_Dry_P Parameter: Timepoint (day) Value: 12
  misc_feature: MA Experiment 20001556 PARAMETER Experiment Name: At_Drought_Soil_Dry_P Parameter: Treatment Value: Drought vs. No Drought
  misc_feature: MA Experiment ID: 20001559 Result: Down-regulated in Transcription
  misc_feature: MA Experiment 20001559 PARAMETER Experiment Name: At_Drought_Soil_Dry_P Parameter: Age (day) Value: 28
  misc_feature: MA Experiment 20001559 PARAMETER Experiment Name: At_Drought_Soil_Dry_P Parameter: Organism Value: A. thaliana
  misc_feature: MA Experiment 20001559 PARAMETER Experiment Name: At_Drought_Soil_Dry_P Parameter: Plant Line Value: WS
  misc_feature: MA Experiment 20001559 PARAMETER Experiment Name: At_Drought_Soil_Dry_P Parameter: Post Timepoint (hr) Value: 29
  misc_feature: MA Experiment 20001559 PARAMETER Experiment Name: At_Drought_Soil_Dry_P Parameter: Post-Treatment Value: Re-Water vs. No Drought
  misc_feature: MA Experiment 20001559 PARAMETER Experiment Name: At_Drought_Soil_Dry_P Parameter: Timepoint (day) Value: 14
  misc_feature: MA Experiment 20001559 PARAMETER Experiment Name: At_Drought_Soil_Dry_P Parameter: Treatment Value: Drought vs. No Drought
  misc_feature: MA Experiment ID: 20001905 Result: Down-regulated in Transcription
  misc_feature: MA Experiment 20001905 PARAMETER Experiment Name: At_Drought_Reproduction_P Parameter: Age (day) Value: 40
  misc_feature: MA Experiment 20001905 PARAMETER Experiment Name: At_Drought_Reproduction_P Parameter: Organism Value: A. thaliana
  misc_feature: MA Experiment 20001905 PARAMETER Experiment Name: At_Drought_Reproduction_P Parameter: Plant Line Value: WS
  misc_feature: MA Experiment 20001905 PARAMETER Experiment Name: At_Drought_Reproduction_P Parameter: Timepoint (day) Value: 10
  misc_feature: MA Experiment 20001905 PARAMETER Experiment Name: At_Drought_Reproduction_P Parameter: Tissue Value: Rosettes
  misc_feature: MA Experiment 20001905 PARAMETER Experiment Name: At_Drought_Reproduction_P Parameter: Treatment Value: Drought vs. No Drought
  misc_feature: MA Experiment ID: 20001907 Result: Down-regulated in Transcription
  misc_feature: MA Experiment 20001907 PARAMETER Experiment Name: At_Drought_Reproduction_P Parameter: Age (day) Value: 37
  misc_feature: MA Experiment 20001907 PARAMETER Experiment Name: At_Drought_Reproduction_P Parameter: Organism Value: A. thaliana
  misc_feature: MA Experiment 20001907 PARAMETER Experiment Name: At_Drought_Reproduction_P Parameter: Plant Line Value: WS
  misc_feature: MA Experiment 20001907 PARAMETER Experiment Name: At_Drought_Reproduction_P Parameter: Timepoint (day) Value: 7
  misc_feature: MA Experiment 20001907 PARAMETER Experiment Name: At_Drought_Reproduction_P Parameter: Tissue Value: Siliques
  misc_feature: MA Experiment 20001907 PARAMETER Experiment Name: At_Drought_Reproduction_P Parameter: Treatment Value: Drought vs. No Drought
  misc_feature: MA Experiment ID: 20001908 Result: Down-regulated in Transcription
  misc_feature: MA Experiment 20001908 PARAMETER Experiment Name: At_Drought_Reproduction_P Parameter: Age (day) Value: 40
  misc_feature: MA Experiment 20001908 PARAMETER Experiment Name: At_Drought_Reproduction_P Parameter: Organism Value: A. thaliana
  misc_feature: MA Experiment 20001908 PARAMETER Experiment Name: At_Drought_Reproduction_P Parameter: Plant Line Value: WS
  misc_feature: MA Experiment 20001908 PARAMETER Experiment Name: At_Drought_Reproduction_P Parameter: Timepoint (day) Value: 10
  misc_feature: MA Experiment 20001908 PARAMETER Experiment Name: At_Drought_Reproduction_P Parameter: Tissue Value: Siliques
  misc_feature: MA Experiment 20001908 PARAMETER Experiment Name: At_Drought_Reproduction_P Parameter: Treatment Value: Drought vs. No Drought
agaaaacattactgataaaactacaaaaatagctggaatggagcattcaaaactctgtccaaagtccaaacggttaaattatcactgacccaatccaataattagatttatttaagaagaagaagaagaaaaaaaacagagctttacaatttctctctacagagatcgaagatatggaaggcaaggaagaagacgttagagttggagctaacaagttcccggagagacaaccaatcggaacatcagctcagagtgacaaggactacaaggaaccaccaccagctccgtttttcgaacctggtgagctttcttcatggtctttttggagagctgggatcgctgagttcatcgctacttttctctttctctacatcactgtcttgactgttatgggagtgaaaaggtcaccgaacatgtgtgcttccgtcggaatccaaggaatcgcttgggctttcggtggtatgatatttgccttagtctactgtaccgctggtatctccggtggacacatcaacccagcggttacttttggtctgttcttagcccggaagctgtcgcttactagagctctgtactacatagtgatgcagtgcttgggagctatctgtggtgctggagtggttaaagggttccagcctaagcaataccaggctctaggaggaggagctaacactgtggctcatggttacaccaagggaagtggtcttggagctgagatcattggcacattcgttcttgtatacacagtcttctcagcaactgacgccaagagaaatgctcgtgactctcatgtccctattcttgcaccactcccaatcgggtttgcggttttcttggttcacttggcaaccatcccaatcactggcacaggcatcaacccagctagaagccttggagctgcaatcatctacaacaaagaccattcctgggatgaccactgggtgttttgggttggccccttcattgaagctgcacttgctgctctttaccatgtggttgtcatcagagccatccccttcaagtccagaagctaagtaaaaacaagacatcaagtcctctggtttctggccttgtccttagttgcttctatagttctattgttgatctactacatgtatgtgtgcaatgtgtttatctatgtgccctcttaatgcaatatttgtaaacaaggaagaagttccaaaggagaattatttgcaaattatgatgtttaacatgtttatt

SEQ ID NO: 21562 - protein, 286 aa, Arabidopsis thaliana
  peptide (1)..(286): Ceres Seq. ID no. 13621992
  misc_feature (44)..(273): Pfam Name: Major intrinsic protein Pfam Description: Major intrinsic protein
  misc_feature (1)..(286): Homolog of NCBI NO: 7209556 NR Description: plasma membrane aquaporin 1b [Raphanus sativus]
  misc_feature (1)..(286): Homolog of NCBI NO: 4467357 NR Description: PIP1b protein [Arabidopsis thaliana]
  misc_feature (1)..(286): Homolog of NCBI NO: 1199804 NR Description: transmembrane channel protein [Brassica oleracea]
  misc_feature (1)..(286): Homolog of NCBI NO: 10799095 NR Description: aquaporin PIP1b2 [Brassica oleracea]
  misc_feature (1)..(286): Homolog of NCBI NO: 15225913 NR Description: plasma membrane intrinsic protein 1B [Arabidopsis
  misc_feature (1)..(286): Homolog of NCBI NO: 10799093 NR Description: aquaporin PIP1b1 [Brassica oleracea]
  misc_feature (1)..(286): Homolog of NCBI NO: 21594059 NR Description: plasma membrane intrinsic protein 1a [Arabidopsis
  misc_feature (1)..(286): Homolog of NCBI NO: 3551131 NR Description: plasma membrane aquaporin (PAQ1) [Raphanus
  misc_feature (1)..(286): Homolog of NCBI NO: 472873 NR Description: plasma membrane intrinsic protein 1a [Arabidopsis
  misc_feature (1)..(286): Homolog of NCBI NO: 15233109 NR Description: plasma membrane intrinsic protein 1A [Arabidopsis
MEGKEEDVRVGANKFPERQPIGTSAQSDKDYKEPPPAPFFEPGELSSWSFWRAGIAEFIATFLFLYITVLTVMGVKRSPNMCASVGIQGIAWAFGGMIFALVYCTAGISGGHINPAVTFGLFLARKLSLTRALYYIVMQCLGAICGAGVVKGFQPKQYQALGGGANTVAHGYTKGSGLGAEIIGTFVLVYTVFSATDAKRNARDSHVPILAPLPIGFAVFLVHLATIPITGTGINPARSLGAAIIYNKDHSWDDHWVFWVGPFIEAALAALYHVVVIRAIPFKSRS

SEQ ID NO: 21563 - protein, 214 aa, Arabidopsis thaliana
  peptide (1)..(214): Ceres Seq. ID no. 13621993
  misc_feature (1)..(201): Pfam Name: Major intrinsic protein Pfam Description: Major intrinsic protein
  misc_feature (1)..(214): Homolog of NCBI NO: 7209556 NR Description: plasma membrane aquaporin 1b [Raphanus sativus]
  misc_feature (1)..(214): Homolog of NCBI NO: 4467357 NR Description: PIP1b protein [Arabidopsis thaliana]
  misc_feature (1)..(214): Homolog of NCBI NO: 1199804 NR Description: transmembrane channel protein [Brassica oleracea]
  misc_feature (1)..(214): Homolog of NCBI NO: 10799095 NR Description: aquaporin PIP1b2 [Brassica oleracea]
  misc_feature (1)..(214): Homolog of NCBI NO: 15225913 NR Description: plasma membrane intrinsic protein 1B [Arabidopsis
  misc_feature (1)..(214): Homolog of NCBI NO: 10799093 NR Description: aquaporin PIP1b1 [Brassica oleracea]
  misc_feature (1)..(214): Homolog of NCBI NO: 21594059 NR Description: plasma membrane intrinsic protein 1a [Arabidopsis
  misc_feature (1)..(214): Homolog of NCBI NO: 3551131 NR Description: plasma membrane aquaporin (PAQ1) [Raphanus
  misc_feature (1)..(214): Homolog of NCBI NO: 472873 NR Description: plasma membrane intrinsic protein 1a [Arabidopsis
  misc_feature (1)..(214): Homolog of NCBI NO: 15233109 NR Description: plasma membrane intrinsic protein 1A [Arabidopsis
MGVKRSPNMCASVGIQGIAWAFGGMIFALVYCTAGISGGHINPAVTFGLFLARKLSLTRALYYIVMQCLGAICGAGVVKGFQPKQYQALGGGANTVAHGYTKGSGLGAEIIGTFVLVYTVFSATDAKRNARDSHVPILAPLPIGFAVFLVHLATIPITGTGINPARSLGAAIIYNKDHSWDDHWVFWVGPFIEAALAALYHVVVIRAIPFKSRS

SEQ ID NO: 21564 - protein, 206 aa, Arabidopsis thaliana
  peptide (1)..(206): Ceres Seq. ID no. 13621994
  misc_feature (1)..(193): Pfam Name: Major intrinsic protein Pfam Description: Major intrinsic protein
  misc_feature (1)..(206): Homolog of NCBI NO: 7209556 NR Description: plasma membrane aquaporin 1b [Raphanus sativus]
  misc_feature (1)..(206): Homolog of NCBI NO: 4467357 NR Description: PIP1b protein [Arabidopsis thaliana]
  misc_feature (1)..(206): Homolog of NCBI NO: 1199804 NR Description: transmembrane channel protein [Brassica oleracea]
  misc_feature (1)..(206): Homolog of NCBI NO: 10799095 NR Description: aquaporin PIP1b2 [Brassica oleracea]
  misc_feature (1)..(206): Homolog of NCBI NO: 15225913 NR Description: plasma membrane intrinsic protein 1B [Arabidopsis
  misc_feature (1)..(206): Homolog of NCBI NO: 10799093 NR Description: aquaporin PIP1b1 [Brassica oleracea]
  misc_feature (1)..(206): Homolog of NCBI NO: 21594059 NR Description: plasma membrane intrinsic protein 1a [Arabidopsis
  misc_feature (1)..(206): Homolog of NCBI NO: 3551131 NR Description: plasma membrane aquaporin (PAQ1) [Raphanus
  misc_feature (1)..(206): Homolog of NCBI NO: 472873 NR Description: plasma membrane intrinsic protein 1a [Arabidopsis
  misc_feature (1)..(206): Homolog of NCBI NO: 15233109 NR Description: plasma membrane intrinsic protein 1A [Arabidopsis
MCASVGIQGIAWAFGGMIFALVYCTAGISGGHINPAVTFGLFLARKLSLTRALYYIVMQCLGAICGAGVVKGFQPKQYQALGGGANTVAHGYTKGSGLGAEIIGTFVLVYTVFSATDAKRNARDSHVPILAPLPIGFAVFLVHLATIPITGTGINPARSLGAAIIYNKDHSWDDHWVFWVGPFIEAALAALYHVVVIRAIPFKSRS

SEQ ID NO: 21565 - DNA, 1190 bp, Arabidopsis thaliana
  misc_feature (1)..(1190): Ceres Seq. ID no. 12333877
  misc_feature: MA Experiment ID: 108434 Result: Down-regulated in Transcription
  misc_feature: MA Experiment 108434 PARAMETER Experiment Name: At_Root_Tips_cDNA_P Parameter: Tissue Value: Root Tips
  misc_feature: MA Experiment ID: 108561 Result: Up-regulated in Transcription
  misc_feature: MA Experiment 108561 PARAMETER Experiment Name: At_100uM_ABA_cDNA_P Parameter: Timepoint (hr) Value: 6
  misc_feature: MA Experiment 108561 PARAMETER Experiment Name: At_100uM_ABA_cDNA_P Parameter: Tissue Value: Aerial
  misc_feature: MA Experiment 108561 PARAMETER Experiment Name: At_100uM_ABA_cDNA_P Parameter: Treatment Value: 100uM ABA vs. No Treatment
  misc_feature: MA Experiment ID: 108574 Result: Up-regulated in Transcription
  misc_feature: MA Experiment 108574 PARAMETER Experiment Name: At_Wounding__cDNA_P Parameter: Timepoint (hr) Value: 1
  misc_feature: MA Experiment 108574 PARAMETER Experiment Name: At_Wounding__cDNA_P Parameter: Tissue Value: Aerial
  misc_feature: MA Experiment 108574 PARAMETER Experiment Name: At_Wounding__cDNA_P Parameter: Treatment Value: Wounding vs. No Wounding
  misc_feature: MA Experiment ID: 108579 Result: Up-regulated in Transcription
  misc_feature: MA Experiment 108579 PARAMETER Experiment Name: At_4deg_Cold_cDNA_P Parameter: Temperature (deg C) Value: 4 vs. 22
  misc_feature: MA Experiment 108579 PARAMETER Experiment Name: At_4deg_Cold_cDNA_P Parameter: Timepoint (hr) Value: 6
  misc_feature: MA Experiment 108579 PARAMETER Experiment Name: At_4deg_Cold_cDNA_P Parameter: Tissue Value: Aerial
  misc_feature: MA Experiment ID: 108585 Result: Up-regulated in Transcription
  misc_feature: MA Experiment 108585 PARAMETER Experiment Name: At_5mM_NaNP_cDNA_P Parameter: Timepoint (hr) Value: 6
  misc_feature: MA Experiment 108585 PARAMETER Experiment Name: At_5mM_NaNP_cDNA_P Parameter: Tissue Value: Aerial
  misc_feature: MA Experiment 108585 PARAMETER Experiment Name: At_5mM_NaNP_cDNA_P Parameter: Treatment Value: null
  misc_feature: MA Experiment ID: 108594 Result: Down-regulated in Transcription
  misc_feature: MA Experiment 108594 PARAMETER Experiment Name: At_Ler-rhl_Root_cDNA_P Parameter: Plant Line Value: null
  misc_feature: MA Experiment ID: 108605 Result: Up-regulated in Transcription
  misc_feature: MA Experiment 108605 PARAMETER Experiment Name: At_100uM_ABA_cDNA_P Parameter: Timepoint (hr) Value: 6
  misc_feature: MA Experiment 108605 PARAMETER Experiment Name: At_100uM_ABA_cDNA_P Parameter: Tissue Value: Aerial
  misc_feature: MA Experiment 108605 PARAMETER Experiment Name: At_100uM_ABA_cDNA_P Parameter: Treatment Value: 100uM ABA vs. No Treatment
  misc_feature: MA Experiment ID: 108607 Result: Up-regulated in Transcription
  misc_feature: MA Experiment 108607 PARAMETER Experiment Name: At_100uM_ABA_cDNA_P Parameter: Timepoint (hr) Value: 4
  misc_feature: MA Experiment 108607 PARAMETER Experiment Name: At_100uM_ABA_cDNA_P Parameter: Tissue Value: Aerial
  misc_feature: MA Experiment 108607 PARAMETER Experiment Name: At_100uM_ABA_cDNA_P Parameter: Treatment Value: 100uM ABA vs. No Treatment
  misc_feature: MA Experiment ID: 20000069 Result: Up-regulated in Transcription
  misc_feature: MA Experiment 20000069 PARAMETER Experiment Name: At_100uM_ABA_Mutants_cDNA_P Parameter: Plant Line Value: CS23
  misc_feature: MA Experiment 20000069 PARAMETER Experiment Name: At_100uM_ABA_Mutants_cDNA_P Parameter: Timepoint (hr) Value: 6
  misc_feature: MA Experiment 20000069 PARAMETER Experiment Name: At_100uM_ABA_Mutants_cDNA_P Parameter: Tissue Value: Aerial
  misc_feature: MA Experiment 20000069 PARAMETER Experiment Name: At_100uM_ABA_Mutants_cDNA_P Parameter: Treatment Value: 100uM ABA vs. No Treatment
  misc_feature: MA Experiment ID: 20000070 Result: Up-regulated in Transcription
  misc_feature: MA Experiment 20000070 PARAMETER Experiment Name: At_100uM_ABA_Mutants_cDNA_P Parameter: Plant Line Value: CS24
  misc_feature: MA Experiment 20000070 PARAMETER Experiment Name: At_100uM_ABA_Mutants_cDNA_P Parameter: Timepoint (hr) Value: 6
  misc_feature: MA Experiment 20000070 PARAMETER Experiment Name: At_100uM_ABA_Mutants_cDNA_P Parameter: Tissue Value: Aerial
  misc_feature: MA Experiment 20000070 PARAMETER Experiment Name: At_100uM_ABA_Mutants_cDNA_P Parameter: Treatment Value: 100uM ABA vs. No Treatment
  misc_feature: MA Experiment ID: 20000071 Result: Up-regulated in Transcription
  misc_feature: MA Experiment 20000071 PARAMETER Experiment Name: At_100uM_ABA_Mutants_cDNA_P Parameter: Plant Line Value: CS8104
  misc_feature: MA Experiment 20000071 PARAMETER Experiment Name: At_100uM_ABA_Mutants_cDNA_P Parameter: Timepoint (hr) Value: 6
  misc_feature: MA Experiment 20000071 PARAMETER Experiment Name: At_100uM_ABA_Mutants_cDNA_P Parameter: Tissue Value: Aerial
  misc_feature: MA Experiment 20000071 PARAMETER Experiment Name: At_100uM_ABA_Mutants_cDNA_P Parameter: Treatment Value: 100uM ABA vs. No Treatment
  misc_feature: MA Experiment ID: 20000072 Result: Up-regulated in Transcription
  misc_feature: MA Experiment 20000072 PARAMETER Experiment Name: At_100uM_ABA_Mutants_cDNA_P Parameter: Plant Line Value: CS8105
  misc_feature: MA Experiment 20000072 PARAMETER Experiment Name: At_100uM_ABA_Mutants_cDNA_P Parameter: Timepoint (hr) Value: 6
  misc_feature: MA Experiment 20000072 PARAMETER Experiment Name: At_100uM_ABA_Mutants_cDNA_P Parameter: Tissue Value: Aerial
  misc_feature: MA Experiment 20000072 PARAMETER Experiment Name: At_100uM_ABA_Mutants_cDNA_P Parameter: Treatment Value: 100uM ABA vs. No Treatment
  misc_feature: MA Experiment ID: 20000086 Result: Up-regulated in Transcription
  misc_feature: MA Experiment 20000086 PARAMETER Experiment Name: At_100uM_ABA_Mutants_cDNA_P Parameter: Plant Line Value: CS22
  misc_feature: MA Experiment 20000086 PARAMETER Experiment Name: At_100uM_ABA_Mutants_cDNA_P Parameter: Timepoint (hr) Value: 6
  misc_feature: MA Experiment 20000086 PARAMETER Experiment Name: At_100uM_ABA_Mutants_cDNA_P Parameter: Tissue Value: Aerial
  misc_feature: MA Experiment 20000086 PARAMETER Experiment Name: At_100uM_ABA_Mutants_cDNA_P Parameter: Treatment Value: 100uM ABA vs. No Treatment
  misc_feature: MA Experiment ID: 20000087 Result: Up-regulated in Transcription
  misc_feature: MA Experiment 20000087 PARAMETER Experiment Name: At_100uM_ABA_Mutants_cDNA_P Parameter: Plant Line Value: WS
  misc_feature: MA Experiment 20000087 PARAMETER Experiment Name: At_100uM_ABA_Mutants_cDNA_P Parameter: Timepoint (hr) Value: 6
  misc_feature: MA Experiment 20000087 PARAMETER Experiment Name: At_100uM_ABA_Mutants_cDNA_P Parameter: Tissue Value: Aerial
  misc_feature: MA Experiment 20000087 PARAMETER Experiment Name: At_100uM_ABA_Mutants_cDNA_P Parameter: Treatment Value: 100uM ABA vs. No Treatment
  misc_feature: MA Experiment ID: 20000088 Result: Up-regulated in Transcription
  misc_feature: MA Experiment 20000088 PARAMETER Experiment Name: At_100uM_ABA_Mutants_cDNA_P Parameter: Plant Line Value: Landsberg
  misc_feature: MA Experiment 20000088 PARAMETER Experiment Name: At_100uM_ABA_Mutants_cDNA_P Parameter: Timepoint (hr) Value: 6
  misc_feature: MA Experiment 20000088 PARAMETER Experiment Name: At_100uM_ABA_Mutants_cDNA_P Parameter: Tissue Value: Aerial
  misc_feature: MA Experiment 20000088 PARAMETER Experiment Name: At_100uM_ABA_Mutants_cDNA_P Parameter: Treatment Value: 100uM ABA vs. No Treatment
  misc_feature: MA Experiment ID: 20000111 Result: Down-regulated in Transcription
  misc_feature: MA Experiment 20000111 PARAMETER Experiment Name: At_42deg_Heat_cDNA_P Parameter: Temperature (deg C) Value: 42 vs. 22
  misc_feature: MA Experiment 20000111 PARAMETER Experiment Name: At_42deg_Heat_cDNA_P Parameter: Timepoint (hr) Value: 6
  misc_feature: MA Experiment 20000111 PARAMETER Experiment Name: At_42deg_Heat_cDNA_P Parameter: Tissue Value: Aerial
  misc_feature: MA Experiment ID: 20000113 Result: Down-regulated in Transcription
  misc_feature: MA Experiment 20000113 PARAMETER Experiment Name: At_42deg_Heat_cDNA_P Parameter: Temperature (deg C) Value: 42 vs. 22
  misc_feature: MA Experiment 20000113 PARAMETER Experiment Name: At_42deg_Heat_cDNA_P Parameter: Timepoint (hr) Value: 8
  misc_feature: MA Experiment 20000113 PARAMETER Experiment Name: At_42deg_Heat_cDNA_P Parameter: Tissue Value: Aerial
  misc_feature: MA Experiment ID: 20000117 Result: Up-regulated in Transcription
  misc_feature: MA Experiment 20000117 PARAMETER Experiment Name: At_100uM_ABA_Mutants_cDNA_P Parameter: Plant Line Value: Columbia
  misc_feature: MA Experiment 20000117 PARAMETER Experiment Name: At_100uM_ABA_Mutants_cDNA_P Parameter: Timepoint (hr) Value: 6
  misc_feature: MA Experiment 20000117 PARAMETER Experiment Name: At_100uM_ABA_Mutants_cDNA_P Parameter: Tissue Value: Aerial
  misc_feature: MA Experiment 20000117 PARAMETER Experiment Name: At_100uM_ABA_Mutants_cDNA_P Parameter: Treatment Value: 100uM ABA vs. No Treatment
  misc_feature: MA Experiment ID: 20000144 Result: Down-regulated in Transcription
  misc_feature: MA Experiment 20000144 PARAMETER Experiment Name: At_42deg_Heat_cDNA_P Parameter: Temperature (deg C) Value: 42 vs. 22
  misc_feature: MA Experiment 20000144 PARAMETER Experiment Name: At_42deg_Heat_cDNA_P Parameter: Timepoint (hr) Value: 1
  misc_feature: MA Experiment 20000144 PARAMETER Experiment Name: At_42deg_Heat_cDNA_P Parameter: Tissue Value: Aerial
  misc_feature: MA Experiment ID: 20000169 Result: Up-regulated in Transcription
  misc_feature: MA Experiment 20000169 PARAMETER Experiment Name: At_100uM_ABA_P Parameter: Age (day) Value: 14
  misc_feature: MA Experiment 20000169 PARAMETER Experiment Name: At_100uM_ABA_P Parameter: Organism Value: A. thaliana
  misc_feature: MA Experiment 20000169 PARAMETER Experiment Name: At_100uM_ABA_P Parameter: Plant Line Value: WS
  misc_feature: MA Experiment 20000169 PARAMETER Experiment Name: At_100uM_ABA_P Parameter: Timepoint (hr) Value: 6
  misc_feature: MA Experiment 20000169 PARAMETER Experiment Name: At_100uM_ABA_P Parameter: Tissue Value: Aerial
  misc_feature: MA Experiment 20000169 PARAMETER Experiment Name: At_100uM_ABA_P Parameter: Treatment Value: 100uM ABA vs. No Treatment
  misc_feature: MA Experiment ID: 20000173 Result: Down-regulated in Transcription
  misc_feature: MA Experiment 20000173 PARAMETER Experiment Name: At_42deg_Heat_P Parameter: Age (day) Value: 14
  misc_feature: MA Experiment 20000173 PARAMETER Experiment Name: At_42deg_Heat_P Parameter: Organism Value: A. thaliana
  misc_feature: MA Experiment 20000173 PARAMETER Experiment Name: At_42deg_Heat_P Parameter: Plant Line Value: WS
  misc_feature: MA Experiment 20000173 PARAMETER Experiment Name: At_42deg_Heat_P Parameter: Temperature (deg C) Value: 42 vs. 22
  misc_feature: MA Experiment 20000173 PARAMETER Experiment Name: At_42deg_Heat_P Parameter: Timepoint (hr) Value: 6
  misc_feature: MA Experiment 20000173 PARAMETER Experiment Name: At_42deg_Heat_P Parameter: Tissue Value: Aerial
  misc_feature: MA Experiment ID: 20000184 Result: Down-regulated in Transcription
  misc_feature: MA Experiment 20000184 PARAMETER Experiment Name: At_Shoots__P Parameter: Age (day) Value: 7
  misc_feature: MA Experiment 20000184 PARAMETER Experiment Name: At_Shoots__P Parameter: Tissue Value: Shoots vs. Whole Plant
  misc_feature: MA Experiment ID: 20000227 Result: Down-regulated in Transcription
  misc_feature: MA Experiment 20000227 PARAMETER Experiment Name: At_Root-Tips-vs-Tops_P Parameter: Tissue Value: Root Tips vs. Root Tops
  misc_feature: MA Experiment ID: 20000234 Result: Down-regulated in Transcription
  misc_feature: MA Experiment 20000234 PARAMETER Experiment Name: At_Siliques_P Parameter: Age (day) Value: 21
  misc_feature: MA Experiment 20000234 PARAMETER Experiment Name: At_Siliques_P Parameter: Organism Value: A. thaliana
  misc_feature: MA Experiment 20000234 PARAMETER Experiment Name: At_Siliques_P Parameter: Plant Line Value: WS
  misc_feature: MA Experiment 20000234 PARAMETER Experiment Name: At_Siliques_P Parameter: Tissue Value: Less Than 5mm Siliques vs. Whole Plant
  misc_feature: MA Experiment ID: 20000265 Result: Down-regulated in Transcription
  misc_feature: MA Experiment 20000265 PARAMETER Experiment Name: At_Open_Flower_P Parameter: Age (day) Value: 21
  misc_feature: MA Experiment 20000265 PARAMETER Experiment Name: At_Open_Flower_P Parameter: Plant Line Value: WS
  misc_feature: MA Experiment 20000265 PARAMETER Experiment Name: At_Open_Flower_P Parameter: Tissue Value: Closed Flower vs. Whole Plant
  misc_feature: MA Experiment ID: 20000437 Result: Up-regulated in Transcription
  misc_feature: MA Experiment 20000437 PARAMETER Experiment Name: At_Drought_P Parameter: Age (day) Value: 8
  misc_feature: MA Experiment 20000437 PARAMETER Experiment Name: At_Drought_P Parameter: Organism Value: A. thaliana
  misc_feature: MA Experiment 20000437 PARAMETER Experiment Name: At_Drought_P Parameter: Plant Line Value: WS
  misc_feature: MA Experiment 20000437 PARAMETER Experiment Name: At_Drought_P Parameter: Timepoint (hr) Value: 24
  misc_feature: MA Experiment 20000437 PARAMETER Experiment Name: At_Drought_P Parameter: Tissue Value: Whole Plant
  misc_feature: MA Experiment 20000437 PARAMETER Experiment Name: At_Drought_P Parameter: Treatment Value: Drought vs. No Drought
  misc_feature: MA Experiment ID: 20000460 Result: Up-regulated in Transcription
  misc_feature: MA Experiment 20000460 PARAMETER Experiment Name: At_10percent_PEG_P Parameter: Age (day) Value: 12
  misc_feature: MA Experiment 20000460 PARAMETER Experiment Name: At_10percent_PEG_P Parameter: Organism Value: A. thaliana
  misc_feature: MA Experiment 20000460 PARAMETER Experiment Name: At_10percent_PEG_P Parameter: Plant Line Value: WS
  misc_feature: MA Experiment 20000460 PARAMETER Experiment Name: At_10percent_PEG_P Parameter: Timepoint (day) Value: 12
  misc_feature: MA Experiment 20000460 PARAMETER Experiment Name: At_10percent_PEG_P Parameter: Tissue Value: Whole Plant
  misc_feature: MA Experiment 20000460 PARAMETER Experiment Name: At_10percent_PEG_P Parameter: Treatment Value: 10percent PEG vs. No Treatment
  misc_feature: MA Experiment ID: 20000495 Result: Down-regulated in Transcription
  misc_feature: MA Experiment 20000495 PARAMETER Experiment Name: At_Guard_Cells_P Parameter: Harvest Date Value: 8/2/2002
  misc_feature: MA Experiment 20000495 PARAMETER Experiment Name: At_Guard_Cells_P Parameter: Organism Value: A. thaliana
  misc_feature: MA Experiment 20000495 PARAMETER Experiment Name: At_Guard_Cells_P Parameter: Tissue Value: Guard Cells vs. Leaves
  misc_feature: MA Experiment ID: 20000496 Result: Down-regulated in Transcription
  misc_feature: MA Experiment 20000496 PARAMETER Experiment Name: At_Guard_Cells_P Parameter: Harvest Date Value: 7/19/2002
  misc_feature: MA Experiment 20000496 PARAMETER Experiment Name: At_Guard_Cells_P Parameter: Organism Value: Canola
  misc_feature: MA Experiment 20000496 PARAMETER Experiment Name: At_Guard_Cells_P Parameter: Tissue Value: Guard Cells vs. Leaves
  misc_feature: MA Experiment ID: 20001911 Result: Up-regulated in Transcription
  misc_feature: MA Experiment 20001911 PARAMETER Experiment Name: At_Drought_Reproduction_P Parameter: Age (day) Value: 40
  misc_feature: MA Experiment 20001911 PARAMETER Experiment Name: At_Drought_Reproduction_P Parameter: Organism Value: A. thaliana
  misc_feature: MA Experiment 20001911 PARAMETER Experiment Name: At_Drought_Reproduction_P Parameter: Plant Line Value: WS
  misc_feature: MA Experiment 20001911 PARAMETER Experiment Name: At_Drought_Reproduction_P Parameter: Timepoint (day) Value: 10
  misc_feature: MA Experiment 20001911 PARAMETER Experiment Name: At_Drought_Reproduction_P Parameter: Tissue Value: Flowers
  misc_feature: MA Experiment 20001911 PARAMETER Experiment Name: At_Drought_Reproduction_P Parameter: Treatment Value: Drought vs. No Drought
atcacaaccatttctctctctcgtcttcgtcttcttcttcttcaacgttcctctccaaaatcctcagaccaagaaatcatcatggccgtcgatctaatgcgtttccctaagatagatgatcaaacggctattcaggaagctgcatcgcaaggtttacaaagtatggaacatctgatccgtgtcctctctaaccgtcccgaacaacaacacaacgttgactgctccgagatcactgacttcaccgtttctaaattcaaaaccgtcatttctctccttaaccgtactggtcacgctcggttcagacgcggaccggttcactccacttcctctgccgcatctcagaaactacagagtcagatcgttaaaaatactcaacctgaggctccgattgtttctcagccagtgagaacaactacgaatcaccctcaaatcgttcctccaccgtctagtgtaacactcgatttctctaaaccaagcatcttcggcaccaaagctaagagcgccgagctggaattctccaaagaaaacttcagtgtttctttaaactcctcattcatgtcgtcggcgataaccggagacggcagcgtctccaatggaaaaatcttccttgcttctgctccgtcgcagcctgttaactcttccggaaaaccaccgttggctggtcatccttacagaaagagatgtctcgagcatgagcactcagagagtttctccggaaaagtctccggctccgcctacggaaagtgccattgcaagaaaagcaggaaaaatcggatgaagagaaccgtgagagtaccggcgataagtgcaaagatcgccgatattccaccggacgaatattcgtggaggaagtacggacaaaaaccgatcaagggctcaccacacccacgtggttactacaagtgcagtacattcagaggatgtccagcgaggaaacacgtggaacgagcattagatgatccagcgatgcttattgtgacatacgaaggagagcaccgtcataaccaatccgcgatgcaggagaatatttcttcttcaggcattaatgatttagtgtttgcctcggcttgacttttttttgtactatttgttttttgattttttgagtactttagatggattgaaatttgtaaatttttttattaagaaatcaatttaaatagagaaaaattagtggtggtgcaatgttc

SEQ ID NO: 21566 - protein, 356 aa, Arabidopsis thaliana
  peptide (1)..(356): Ceres Seq. ID no. 12333878
  misc_feature (276)..(336): Pfam Name: WRKY DNA -binding domain Pfam Description: WRKY DNA -binding domain
  misc_feature (27)..(63): Homolog of NCBI NO: 4894963 NR Description: DNA-binding protein WRKY3 [Avena sativa]
  misc_feature (129)..(334): Homolog of NCBI NO: 4894963 NR Description: DNA-binding protein WRKY3 [Avena sativa]
  misc_feature (30)..(338): Homolog of NCBI NO: 38568048 NR Description: OSJNBa0065J03.18 [Oryza sativa (japonica
  misc_feature (28)..(342): Homolog of NCBI NO: 4760596 NR Description: DNA-binding protein NtWRKY3 [Nicotiana tabacum]
  misc_feature (28)..(351): Homolog of NCBI NO: 25348152 NR Description: probable WRKY-type DNA binding protein
  misc_feature (28)..(356): Homolog of NCBI NO: 18400580 NR Description: WRKY family transcription factor
  misc_feature (28)..(356): Homolog of NCBI NO: 22329054 NR Description: WRKY family transcription factor
  misc_feature (28)..(356): Homolog of NCBI NO: 21537078 NR Description: putaive DNA-binding protein [Arabidopsis thaliana]
  misc_feature (28)..(356): Homolog of NCBI NO: 16604573 NR Description: putative putaive DNA-binding protein [Arabidopsis
  misc_feature (28)..(356): Homolog of NCBI NO: 30689072 NR Description: WRKY family transcription factor [Arabidopsis
ITTISLSRLRLLLLQRSSPKSSDQEIIMAVDLMRFPKIDDQTAIQEAASQGLQSMEHLIRVLSNRPEQQHNVDCSEITDFTVSKFKTVISLLNRTGHARFRRGPVHSTSSAASQKLQSQIVKNTQPEAPIVSQPVRTTTNHPQIVPPPSSVTLDFSKPSIFGTKAKSAELEFSKENFSVSLNSSFMSSAITGDGSVSNGKIFLASAPSQPVNSSGKPPLAGHPYRKRCLEHEHSESFSGKVSGSAYGKCHCKKSRKNRMKRTVRVPAISAKIADIPPDEYSWRKYGQKPIKGSPHPRGYYKCSTFRGCPARKHVERALDDPAMLIVTYEGEHRHNQSAMQENISSSGINDLVFASA

SEQ ID NO: 21567 - protein, 329 aa, Arabidopsis thaliana
  peptide (1)..(329): Ceres Seq. ID no. 12333879
  misc_feature (249)..(309): Pfam Name: WRKY DNA -binding domain Pfam Description: WRKY DNA -binding domain
  misc_feature (1)..(36): Homolog of NCBI NO: 4894963 NR Description: DNA-binding protein WRKY3 [Avena sativa]
  misc_feature (102)..(307): Homolog of NCBI NO: 4894963 NR Description: DNA-binding protein WRKY3 [Avena sativa]
  misc_feature (3)..(311): Homolog of NCBI NO: 38568048 NR Description: OSJNBa0065J03.18 [Oryza sativa (japonica
  misc_feature (1)..(315): Homolog of NCBI NO: 4760596 NR Description: DNA-binding protein NtWRKY3 [Nicotiana tabacum]
  misc_feature (1)..(324): Homolog of NCBI NO: 25348152 NR Description: probable WRKY-type DNA binding protein
  misc_feature (1)..(329): Homolog of NCBI NO: 18400580 NR Description: WRKY family transcription factor
  misc_feature (1)..(329): Homolog of NCBI NO: 22329054 NR Description: WRKY family transcription factor
  misc_feature (1)..(329): Homolog of NCBI NO: 21537078 NR Description: putaive DNA-binding protein [Arabidopsis thaliana]
  misc_feature (1)..(329): Homolog of NCBI NO: 16604573 NR Description: putative putaive DNA-binding protein [Arabidopsis
  misc_feature (1)..(329): Homolog of NCBI NO: 30689072 NR Description: WRKY family transcription factor [Arabidopsis
MAVDLMRFPKIDDQTAIQEAASQGLQSMEHLIRVLSNRPEQQHNVDCSEITDFTVSKFKTVISLLNRTGHARFRRGPVHSTSSAASQKLQSQIVKNTQPEAPIVSQPVRTTTNHPQIVPPPSSVTLDFSKPSIFGTKAKSAELEFSKENFSVSLNSSFMSSAITGDGSVSNGKIFLASAPSQPVNSSGKPPLAGHPYRKRCLEHEHSESFSGKVSGSAYGKCHCKKSRKNRMKRTVRVPAISAKIADIPPDEYSWRKYGQKPIKGSPHPRGYYKCSTFRGCPARKHVERALDDPAMLIVTYEGEHRHNQSAMQENISSSGINDLVFASA

SEQ ID NO: 21568 - protein, 324 aa, Arabidopsis thaliana
  peptide (1)..(324): Ceres Seq. ID no. 12333880
  misc_feature (244)..(304): Pfam Name: WRKY DNA -binding domain Pfam Description: WRKY DNA -binding domain
  misc_feature (1)..(31): Homolog of NCBI NO: 4894963 NR Description: DNA-binding protein WRKY3 [Avena sativa]
  misc_feature (97)..(302): Homolog of NCBI NO: 4894963 NR Description: DNA-binding protein WRKY3 [Avena sativa]
  misc_feature (1)..(306): Homolog of NCBI NO: 38568048 NR Description: OSJNBa0065J03.18 [Oryza sativa (japonica
  misc_feature (1)..(310): Homolog of NCBI NO: 4760596 NR Description: DNA-binding protein NtWRKY3 [Nicotiana tabacum]
  misc_feature (1)..(319): Homolog of NCBI NO: 25348152 NR Description: probable WRKY-type DNA binding protein
  misc_feature (1)..(324): Homolog of NCBI NO: 18400580 NR Description: WRKY family transcription factor
  misc_feature (1)..(324): Homolog of NCBI NO: 22329054 NR Description: WRKY family transcription factor
  misc_feature (1)..(324): Homolog of NCBI NO: 21537078 NR Description: putaive DNA-binding protein [Arabidopsis thaliana]
  misc_feature (1)..(324): Homolog of NCBI NO: 16604573 NR Description: putative putaive DNA-binding protein [Arabidopsis
  misc_feature (1)..(324): Homolog of NCBI NO: 30689072 NR Description: WRKY family transcription factor [Arabidopsis
MRFPKIDDQTAIQEAASQGLQSMEHLIRVLSNRPEQQHNVDCSEITDFTVSKFKTVISLLNRTGHARFRRGPVHSTSSAASQKLQSQIVKNTQPEAPIVSQPVRTTTNHPQIVPPPSSVTLDFSKPSIFGTKAKSAELEFSKENFSVSLNSSFMSSAITGDGSVSNGKIFLASAPSQPVNSSGKPPLAGHPYRKRCLEHEHSESFSGKVSGSAYGKCHCKKSRKNRMKRTVRVPAISAKIADIPPDEYSWRKYGQKPIKGSPHPRGYYKCSTFRGCPARKHVERALDDPAMLIVTYEGEHRHNQSAMQENISSSGINDLVFASA

SEQ ID NO: 21569 - DNA, 888 bp, Arabidopsis thaliana
  misc_feature (1)..(888): Ceres Seq. ID no. 12333881
  misc_feature: MA Experiment ID: 108434 Result: Down-regulated in Transcription
  misc_feature: MA Experiment 108434 PARAMETER Experiment Name: At_Root_Tips_cDNA_P Parameter: Tissue Value: Root Tips
  misc_feature: MA Experiment ID: 108464 Result: Down-regulated in Transcription
  misc_feature: MA Experiment 108464 PARAMETER Experiment Name: At_Germinating_Seeds_cDNA_P Parameter: Age (day) Value: 4 vs. 0
  misc_feature: MA Experiment 108464 PARAMETER Experiment Name: At_Germinating_Seeds_cDNA_P Parameter: Tissue Value: Germinating Seeds
  misc_feature: MA Experiment ID: 108573 Result: Down-regulated in Transcription
  misc_feature: MA Experiment 108573 PARAMETER Experiment Name: At_Drought_cDNA_P Parameter: Timepoint (hr) Value: 6
  misc_feature: MA Experiment 108573 PARAMETER Experiment Name: At_Drought_cDNA_P Parameter: Tissue Value: Aerial
  misc_feature: MA Experiment 108573 PARAMETER Experiment Name: At_Drought_cDNA_P Parameter: Treatment Value: Drought vs. No Drought
  misc_feature: MA Experiment ID: 108577 Result: Down-regulated in Transcription
  misc_feature: MA Experiment 108577 PARAMETER Experiment Name: At_42deg_Heat_cDNA_P Parameter: Temperature (deg C) Value: 42 vs. 22
  misc_feature: MA Experiment 108577 PARAMETER Experiment Name: At_42deg_Heat_cDNA_P Parameter: Timepoint (hr) Value: 6
  misc_feature: MA Experiment 108577 PARAMETER Experiment Name: At_42deg_Heat_cDNA_P Parameter: Tissue Value: Aerial
  misc_feature: MA Experiment ID: 20000113 Result: Down-regulated in Transcription
  misc_feature: MA Experiment 20000113 PARAMETER Experiment Name: At_42deg_Heat_cDNA_P Parameter: Temperature (deg C) Value: 42 vs. 22
  misc_feature: MA Experiment 20000113 PARAMETER Experiment Name: At_42deg_Heat_cDNA_P Parameter: Timepoint (hr) Value: 8
  misc_feature: MA Experiment 20000113 PARAMETER Experiment Name: At_42deg_Heat_cDNA_P Parameter: Tissue Value: Aerial
  misc_feature: MA Experiment ID: 20000495 Result: Down-regulated in Transcription
  misc_feature: MA Experiment 20000495 PARAMETER Experiment Name: At_Guard_Cells_P Parameter: Harvest Date Value: 8/2/2002
  misc_feature: MA Experiment 20000495 PARAMETER Experiment Name: At_Guard_Cells_P Parameter: Organism Value: A. thaliana
  misc_feature: MA Experiment 20000495 PARAMETER Experiment Name: At_Guard_Cells_P Parameter: Tissue Value: Guard Cells vs. Leaves
  misc_feature: MA Experiment ID: 20001557 Result: Up-regulated in Transcription
  misc_feature: MA Experiment 20001557 PARAMETER Experiment Name: At_Drought_Soil_Dry_P Parameter: Age (day) Value: 27
  misc_feature: MA Experiment 20001557 PARAMETER Experiment Name: At_Drought_Soil_Dry_P Parameter: Organism Value: A. thaliana
  misc_feature: MA Experiment 20001557 PARAMETER Experiment Name: At_Drought_Soil_Dry_P Parameter: Plant Line Value: WS
  misc_feature: MA Experiment 20001557 PARAMETER Experiment Name: At_Drought_Soil_Dry_P Parameter: Post Timepoint (hr) Value: 3
  misc_feature: MA Experiment 20001557 PARAMETER Experiment Name: At_Drought_Soil_Dry_P Parameter: Post-Treatment Value: Re-Water vs. No Drought
  misc_feature: MA Experiment 20001557 PARAMETER Experiment Name: At_Drought_Soil_Dry_P Parameter: Timepoint (day) Value: 13
  misc_feature: MA Experiment 20001557 PARAMETER Experiment Name: At_Drought_Soil_Dry_P Parameter: Treatment Value: Drought vs. No Drought
  misc_feature: MA Experiment ID: 20001560 Result: Up-regulated in Transcription
  misc_feature: MA Experiment 20001560 PARAMETER Experiment Name: At_Drought_Soil_Dry_P Parameter: Age (day) Value: 28
  misc_feature: MA Experiment 20001560 PARAMETER Experiment Name: At_Drought_Soil_Dry_P Parameter: Organism Value: A. thaliana
  misc_feature: MA Experiment 20001560 PARAMETER Experiment Name: At_Drought_Soil_Dry_P Parameter: Plant Line Value: WS
  misc_feature: MA Experiment 20001560 PARAMETER Experiment Name: At_Drought_Soil_Dry_P Parameter: Post Timepoint (hr) Value: None
  misc_feature: MA Experiment 20001560 PARAMETER Experiment Name: At_Drought_Soil_Dry_P Parameter: Post-Treatment Value: None
  misc_feature: MA Experiment 20001560 PARAMETER Experiment Name: At_Drought_Soil_Dry_P Parameter: Timepoint (day) Value: 14
  misc_feature: MA Experiment 20001560 PARAMETER Experiment Name: At_Drought_Soil_Dry_P Parameter: Treatment Value: Drought vs. No Drought
  misc_feature: MA Experiment ID: 20001911 Result: Down-regulated in Transcription
  misc_feature: MA Experiment 20001911 PARAMETER Experiment Name: At_Drought_Reproduction_P Parameter: Age (day) Value: 40
  misc_feature: MA Experiment 20001911 PARAMETER Experiment Name: At_Drought_Reproduction_P Parameter: Organism Value: A. thaliana
  misc_feature: MA Experiment 20001911 PARAMETER Experiment Name: At_Drought_Reproduction_P Parameter: Plant Line Value: WS
  misc_feature: MA Experiment 20001911 PARAMETER Experiment Name: At_Drought_Reproduction_P Parameter: Timepoint (day) Value: 10
  misc_feature: MA Experiment 20001911 PARAMETER Experiment Name: At_Drought_Reproduction_P Parameter: Tissue Value: Flowers
  misc_feature: MA Experiment 20001911 PARAMETER Experiment Name: At_Drought_Reproduction_P Parameter: Treatment Value: Drought vs. No Drought
aaaagcttaaaacagaggatttagcaagagaggatttagcgagagagagacgttgaagaagatgactagtggaggaggatacggagatccgtcgcagaagattgattatgtgttcaaagtggtgttgatcggcgattccgcggttgggaaatcacagatactggctcgttatgctagagacgaattcagtttggattctaaggccaccatcggcgttgagtttcagactcggacgcttgttatcgatcacaagagtgttaaggctcagatctgggataccgccggccaagaacgatacagagcagtaacaagtgcatattaccgaggagcggttggggcgatgttggtgtatgacataaccagacgccaaacctttgaccatatcccaagatggttagaagaactacgtgctcatgcagataagaacattgtgataatccttattgggaacaagtcagatcttgtggatcaacgagctataccgacagaagatgcgaaagaatttgcggagaaagaaggtttgttcttcttggagacatctgcatttaacgcaaccaatgttgagagcgctttctccacggttttgactgagatcttcaacattgtgaacaagaaaagtctggctgcgagtgaagatcaagagaatggtaatcccgggtcgcttgctggtaagaagattgatattgttccaggtcctggtcaagtgataccaaacaagagtaacatgtgttgtaactcttagataaaccaattcaattcttgaatgttacttgataacaacaatatatagatgttttaaagactctgattgggatatttctcctatctagagctgtgtgattcatttgttgcttaatgagcagtttttgtggggttttggggtgttgt

SEQ ID NO: 21570 - protein, 226 aa, Arabidopsis thaliana
  peptide (1)..(226): Ceres Seq. ID no. 12333882
  misc_feature (19)..(180): Pfam Name: Ras family Pfam Description: Ras family
  misc_feature (6)..(226): Homolog of NCBI NO: 3024503 NR Description: RAS-RELATED PROTEIN RAB11C
  misc_feature (1)..(226): Homolog of NCBI NO: 7438430 NR Description: GTP-binding protein - garden pea
  misc_feature (6)..(226): Homolog of NCBI NO: 3024505 NR Description: RAS-RELATED PROTEIN RAB11D
  misc_feature (1)..(226): Homolog of NCBI NO: 3024500 NR Description: RAS-RELATED PROTEIN RAB11A
  misc_feature (1)..(226): Homolog of NCBI NO: 15238392 NR Description: GTP-binding protein, putative
MTSGGGYGDPSQKIDYVFKVVLIGDSAVGKSQILARYARDEFSLDSKATIGVEFQTRTLVIDHKSVKAQIWDTAGQERYRAVTSAYYRGAVGAMLVYDITRRQTFDHIPRWLEELRAHADKNIVIILIGNKSDLVDQRAIPTEDAKEFAEKEGLFFLETSAFNATNVESAFSTVLTEIFNIVNKKSLAASEDQENGNPGSLAGKKIDIVPGPGQVIPNKSNMCCNS

SEQ ID NO: 21571 - protein, 133 aa, Arabidopsis thaliana
  peptide (1)..(133): Ceres Seq. ID no. 12333883
  misc_feature (1)..(87): Pfam Name: Ras family Pfam Description: Ras family
  misc_feature (1)..(133): Homolog of NCBI NO: 3024503 NR Description: RAS-RELATED PROTEIN RAB11C
  misc_feature (1)..(133): Homolog of NCBI NO: 7438430 NR Description: GTP-binding protein - garden pea
  misc_feature (1)..(133): Homolog of NCBI NO: 3024505 NR Description: RAS-RELATED PROTEIN RAB11D
  misc_feature (1)..(133): Homolog of NCBI NO: 3024500 NR Description: RAS-RELATED PROTEIN RAB11A
  misc_feature (1)..(133): Homolog of NCBI NO: 15238392 NR Description: GTP-binding protein, putative
MLVYDITRRQTFDHIPRWLEELRAHADKNIVIILIGNKSDLVDQRAIPTEDAKEFAEKEGLFFLETSAFNATNVESAFSTVLTEIFNIVNKKSLAASEDQENGNPGSLAGKKIDIVPGPGQVIPNKSNMCCNS

SEQ ID NO: 21572 - DNA, 563 bp, Arabidopsis thaliana
  misc_feature (1)..(563): Ceres Seq. ID no. 12333265
  misc_feature: MA Experiment ID: 20000234 Result: Up-regulated in Transcription
  misc_feature: MA Experiment 20000234 PARAMETER Experiment Name: At_Siliques_P Parameter: Age (day) Value: 21
  misc_feature: MA Experiment 20000234 PARAMETER Experiment Name: At_Siliques_P Parameter: Organism Value: A. thaliana
  misc_feature: MA Experiment 20000234 PARAMETER Experiment Name: At_Siliques_P Parameter: Plant Line Value: WS
  misc_feature: MA Experiment 20000234 PARAMETER Experiment Name: At_Siliques_P Parameter: Tissue Value: Less Than 5mm Siliques vs. Whole Plant
  misc_feature: MA Experiment ID: 20000235 Result: Up-regulated in Transcription
  misc_feature: MA Experiment 20000235 PARAMETER Experiment Name: At_Siliques_P Parameter: Age (day) Value: 21
  misc_feature: MA Experiment 20000235 PARAMETER Experiment Name: At_Siliques_P Parameter: Organism Value: A. thaliana
  misc_feature: MA Experiment 20000235 PARAMETER Experiment Name: At_Siliques_P Parameter: Plant Line Value: WS
  misc_feature: MA Experiment 20000235 PARAMETER Experiment Name: At_Siliques_P Parameter: Tissue Value: 5-10mm Siliques vs. Whole Plant
  misc_feature: MA Experiment ID: 20001556 Result: Down-regulated in Transcription
  misc_feature: MA Experiment 20001556 PARAMETER Experiment Name: At_Drought_Soil_Dry_P Parameter: Age (day) Value: 26
  misc_feature: MA Experiment 20001556 PARAMETER Experiment Name: At_Drought_Soil_Dry_P Parameter: Organism Value: A. thaliana
  misc_feature: MA Experiment 20001556 PARAMETER Experiment Name: At_Drought_Soil_Dry_P Parameter: Plant Line Value: WS
  misc_feature: MA Experiment 20001556 PARAMETER Experiment Name: At_Drought_Soil_Dry_P Parameter: Post Timepoint (hr) Value: None
  misc_feature: MA Experiment 20001556 PARAMETER Experiment Name: At_Drought_Soil_Dry_P Parameter: Post-Treatment Value: None
  misc_feature: MA Experiment 20001556 PARAMETER Experiment Name: At_Drought_Soil_Dry_P Parameter: Timepoint (day) Value: 12
  misc_feature: MA Experiment 20001556 PARAMETER Experiment Name: At_Drought_Soil_Dry_P Parameter: Treatment Value: Drought vs. No Drought
aaaaattgggattggtaggtgacgcgcatgctaagtaattgaaaaaaaaaaacacaagaggagaagaaacagaacagagaagaaaaagagagaagatggcttcggaagaaggacaagtgatcgcctgccacaccgttgagacatggaacgagcagcttcagaaggctaatgaatccaaaactcttgtggtggttgatttcacggcttcttggtgtggaccatgtcgtttcatcgctccattctttgctgatttggctaagaaacttcctaacgtgcttttcctcaaggttgatactgatgaattgaagtcggtggcaagtgattgggcgatacaggcgatgccaaccttcatgtttttgaaggaagggaagattttggacaaagttgttggagccaagaaagatgagcttcagtctaccattgccaaacacttggcttaagctttccactcttatatatctcttaagatgttggattaattgttctattactcttgacatgttataacttgttcccctttgttatggttccggtctataatctcatctgactatttgaagctg

SEQ ID NO: 21573 - protein, 114 aa, Arabidopsis thaliana
  peptide (1)..(114): Ceres Seq. ID no. 12333266
  misc_feature (2)..(113): Homolog of NCBI NO: 40287476 NR Description: thioredoxin [Capsicum annuum]
  misc_feature (3)..(112): Homolog of NCBI NO: 19851972 NR Description: thioredoxin H [Populus tremula x Populus
  misc_feature (3)..(112): Homolog of NCBI NO: 30575686 NR Description: thioredoxin H [Citrus x paradisi]
  misc_feature (3)..(114): Homolog of NCBI NO: 27466894 NR Description: thioredoxin h [Pisum sativum]
  misc_feature (2)..(114): Homolog of NCBI NO: 267124 NR Description: Thioredoxin H-type 1 (TRX-H1)
  misc_feature (3)..(114): Homolog of NCBI NO: 16588843 NR Description: thioredoxin H [Prunus persica]
  misc_feature (2)..(114): Homolog of NCBI NO: 13624884 NR Description: thioredoxin h [Pisum sativum]
  misc_feature (3)..(114): Homolog of NCBI NO: 586099 NR Description: Thioredoxin H-type 2 (TRX-H2)
  misc_feature (1)..(114): Homolog of NCBI NO: 11135282 NR Description: Thioredoxin H-type (TRX-H)
  misc_feature (1)..(114): Homolog of NCBI NO: 15230385 NR Description: thioredoxin h; protein id: At3g51030.1, supported
  misc_feature (2)..(113): Homolog of NCBI NO: 40287476 NR Description: thioredoxin [Capsicum annuum]
  misc_feature (3)..(112): Homolog of NCBI NO: 19851972 NR Description: thioredoxin H [Populus tremula x Populus
  misc_feature (3)..(112): Homolog of NCBI NO: 30575686 NR Description: thioredoxin H [Citrus x paradisi]
  misc_feature (3)..(114): Homolog of NCBI NO: 27466894 NR Description: thioredoxin h [Pisum sativum]
  misc_feature (2)..(114): Homolog of NCBI NO: 267124 NR Description: Thioredoxin H-type 1 (TRX-H1)
  misc_feature (3)..(114): Homolog of NCBI NO: 16588843 NR Description: thioredoxin H [Prunus persica]
  misc_feature (2)..(114): Homolog of NCBI NO: 13624884 NR Description: thioredoxin h [Pisum sativum]
  misc_feature (3)..(114): Homolog of NCBI NO: 586099 NR Description: Thioredoxin H-type 2 (TRX-H2)
  misc_feature (1)..(114): Homolog of NCBI NO: 11135282 NR Description: Thioredoxin H-type (TRX-H)
  misc_feature (1)..(114): Homolog of NCBI NO: 15230385 NR Description: thioredoxin h; protein id: At3g51030.1, supported
MASEEGQVIACHTVETWNEQLQKANESKTLVVVDFTASWCGPCRFIAPFFADLAKKLPNVLFLKVDTDELKSVASDWAIQAMPTFMFLKEGKILDKVVGAKKDELQSTIAKHLA

SEQ ID NO: 21574 - DNA, 1452 bp, Arabidopsis thaliana
  misc_feature (1)..(1452): Ceres Seq. ID no. 12385723
  misc_feature: MA Experiment ID: 108461 Result: Up-regulated in Transcription
  misc_feature: MA Experiment 108461 PARAMETER Experiment Name: At_Germinating_Seeds_cDNA_P Parameter: Age (day) Value: 1 vs. 0
  misc_feature: MA Experiment 108461 PARAMETER Experiment Name: At_Germinating_Seeds_cDNA_P Parameter: Tissue Value: Germinating Seeds
  misc_feature: MA Experiment ID: 108462 Result: Up-regulated in Transcription
  misc_feature: MA Experiment 108462 PARAMETER Experiment Name: At_Germinating_Seeds_cDNA_P Parameter: Age (day) Value: 2 vs. 0
  misc_feature: MA Experiment 108462 PARAMETER Experiment Name: At_Germinating_Seeds_cDNA_P Parameter: Tissue Value: Germinating Seeds
  misc_feature: MA Experiment ID: 108464 Result: Up-regulated in Transcription
  misc_feature: MA Experiment 108464 PARAMETER Experiment Name: At_Germinating_Seeds_cDNA_P Parameter: Age (day) Value: 4 vs. 0
  misc_feature: MA Experiment 108464 PARAMETER Experiment Name: At_Germinating_Seeds_cDNA_P Parameter: Tissue Value: Germinating Seeds
  misc_feature: MA Experiment ID: 108488 Result: Up-regulated in Transcription
  misc_feature: MA Experiment ID: 108572 Result: Up-regulated in Transcription
  misc_feature: MA Experiment 108572 PARAMETER Experiment Name: At_Drought_cDNA_P Parameter: Timepoint (hr) Value: 1
  misc_feature: MA Experiment 108572 PARAMETER Experiment Name: At_Drought_cDNA_P Parameter: Tissue Value: Aerial
  misc_feature: MA Experiment 108572 PARAMETER Experiment Name: At_Drought_cDNA_P Parameter: Treatment Value: Drought vs. No Drought
  misc_feature: MA Experiment ID: 108576 Result: Down-regulated in Transcription
  misc_feature: MA Experiment 108576 PARAMETER Experiment Name: At_42deg_Heat_cDNA_P Parameter: Temperature (deg C) Value: 42 vs. 22
  misc_feature: MA Experiment 108576 PARAMETER Experiment Name: At_42deg_Heat_cDNA_P Parameter: Timepoint (hr) Value: 1
  misc_feature: MA Experiment 108576 PARAMETER Experiment Name: At_42deg_Heat_cDNA_P Parameter: Tissue Value: Aerial
  misc_feature: MA Experiment ID: 108577 Result: Down-regulated in Transcription
  misc_feature: MA Experiment 108577 PARAMETER Experiment Name: At_42deg_Heat_cDNA_P Parameter: Temperature (deg C) Value: 42 vs. 22
  misc_feature: MA Experiment 108577 PARAMETER Experiment Name: At_42deg_Heat_cDNA_P Parameter: Timepoint (hr) Value: 6
  misc_feature: MA Experiment 108577 PARAMETER Experiment Name: At_42deg_Heat_cDNA_P Parameter: Tissue Value: Aerial
  misc_feature: MA Experiment ID: 108585 Result: Down-regulated in Transcription
  misc_feature: MA Experiment 108585 PARAMETER Experiment Name: At_5mM_NaNP_cDNA_P Parameter: Timepoint (hr) Value: 6
  misc_feature: MA Experiment 108585 PARAMETER Experiment Name: At_5mM_NaNP_cDNA_P Parameter: Tissue Value: Aerial
  misc_feature: MA Experiment 108585 PARAMETER Experiment Name: At_5mM_NaNP_cDNA_P Parameter: Treatment Value: null
  misc_feature: MA Experiment ID: 108594 Result: Down-regulated in Transcription
  misc_feature: MA Experiment 108594 PARAMETER Experiment Name: At_Ler-rhl_Root_cDNA_P Parameter: Plant Line Value: null
  misc_feature: MA Experiment ID: 108595 Result: Down-regulated in Transcription
  misc_feature: MA Experiment 108595 PARAMETER Experiment Name: At_Ler-pi_Ovule_cDNA_P Parameter: Plant Line Value: null
  misc_feature: MA Experiment ID: 108607 Result: Up-regulated in Transcription
  misc_feature: MA Experiment 108607 PARAMETER Experiment Name: At_100uM_ABA_cDNA_P Parameter: Timepoint (hr) Value: 4
  misc_feature: MA Experiment 108607 PARAMETER Experiment Name: At_100uM_ABA_cDNA_P Parameter: Tissue Value: Aerial
  misc_feature: MA Experiment 108607 PARAMETER Experiment Name: At_100uM_ABA_cDNA_P Parameter: Treatment Value: 100uM ABA vs. No Treatment
  misc_feature: MA Experiment ID: 108668 Result: Down-regulated in Transcription
  misc_feature: MA Experiment 108668 PARAMETER Experiment Name: At_2mM_SA_cDNA_P Parameter: Plant Line Value: WS
  misc_feature: MA Experiment 108668 PARAMETER Experiment Name: At_2mM_SA_cDNA_P Parameter: Timepoint (hr) Value: 6
  misc_feature: MA Experiment 108668 PARAMETER Experiment Name: At_2mM_SA_cDNA_P Parameter: Treatment Value: 2mM SA vs. No Treatment
  misc_feature: MA Experiment ID: 20000112 Result: Down-regulated in Transcription
  misc_feature: MA Experiment 20000112 PARAMETER Experiment Name: At_42deg_Heat_cDNA_P Parameter: Temperature (deg C) Value: 42 vs. 22
  misc_feature: MA Experiment 20000112 PARAMETER Experiment Name: At_42deg_Heat_cDNA_P Parameter: Timepoint (hr) Value: 2
  misc_feature: MA Experiment 20000112 PARAMETER Experiment Name: At_42deg_Heat_cDNA_P Parameter: Tissue Value: Aerial
  misc_feature: MA Experiment ID: 20000113 Result: Down-regulated in Transcription
  misc_feature: MA Experiment 20000113 PARAMETER Experiment Name: At_42deg_Heat_cDNA_P Parameter: Temperature (deg C) Value: 42 vs. 22
  misc_feature: MA Experiment 20000113 PARAMETER Experiment Name: At_42deg_Heat_cDNA_P Parameter: Timepoint (hr) Value: 8
  misc_feature: MA Experiment 20000113 PARAMETER Experiment Name: At_42deg_Heat_cDNA_P Parameter: Tissue Value: Aerial
  misc_feature: MA Experiment ID: 20000144 Result: Down-regulated in Transcription
  misc_feature: MA Experiment 20000144 PARAMETER Experiment Name: At_42deg_Heat_cDNA_P Parameter: Temperature (deg C) Value: 42 vs. 22
  misc_feature: MA Experiment 20000144 PARAMETER Experiment Name: At_42deg_Heat_cDNA_P Parameter: Timepoint (hr) Value: 1
  misc_feature: MA Experiment 20000144 PARAMETER Experiment Name: At_42deg_Heat_cDNA_P Parameter: Tissue Value: Aerial
  misc_feature: MA Experiment ID: 20000171 Result: Down-regulated in Transcription
  misc_feature: MA Experiment 20000171 PARAMETER Experiment Name: At_42deg_Heat_P Parameter: Age (day) Value: 14
  misc_feature: MA Experiment 20000171 PARAMETER Experiment Name: At_42deg_Heat_P Parameter: Organism Value: A. thaliana
  misc_feature: MA Experiment 20000171 PARAMETER Experiment Name: At_42deg_Heat_P Parameter: Plant Line Value: WS
  misc_feature: MA Experiment 20000171 PARAMETER Experiment Name: At_42deg_Heat_P Parameter: Temperature (deg C) Value: 42 vs. 22
  misc_feature: MA Experiment 20000171 PARAMETER Experiment Name: At_42deg_Heat_P Parameter: Timepoint (hr) Value: 1
  misc_feature: MA Experiment 20000171 PARAMETER Experiment Name: At_42deg_Heat_P Parameter: Tissue Value: Aerial
  misc_feature: MA Experiment ID: 20000173 Result: Down-regulated in Transcription
  misc_feature: MA Experiment 20000173 PARAMETER Experiment Name: At_42deg_Heat_P Parameter: Age (day) Value: 14
  misc_feature: MA Experiment 20000173 PARAMETER Experiment Name: At_42deg_Heat_P Parameter: Organism Value: A. thaliana
  misc_feature: MA Experiment 20000173 PARAMETER Experiment Name: At_42deg_Heat_P Parameter: Plant Line Value: WS
  misc_feature: MA Experiment 20000173 PARAMETER Experiment Name: At_42deg_Heat_P Parameter: Temperature (deg C) Value: 42 vs. 22
  misc_feature: MA Experiment 20000173 PARAMETER Experiment Name: At_42deg_Heat_P Parameter: Timepoint (hr) Value: 6
  misc_feature: MA Experiment 20000173 PARAMETER Experiment Name: At_42deg_Heat_P Parameter: Tissue Value: Aerial
  misc_feature: MA Experiment ID: 20000180 Result: Up-regulated in Transcription
  misc_feature: MA Experiment 20000180 PARAMETER Experiment Name: At_Germinating_Seeds_P Parameter: Age (hr) Value: 24 vs. 0
  misc_feature: MA Experiment 20000180 PARAMETER Experiment Name: At_Germinating_Seeds_P Parameter: Tissue Value: Germinating Seeds
  misc_feature: MA Experiment ID: 20000184 Result: Up-regulated in Transcription
  misc_feature: MA Experiment 20000184 PARAMETER Experiment Name: At_Shoots__P Parameter: Age (day) Value: 7
  misc_feature: MA Experiment 20000184 PARAMETER Experiment Name: At_Shoots__P Parameter: Tissue Value: Shoots vs. Whole Plant
  misc_feature: MA Experiment ID: 20000185 Result: Down-regulated in Transcription
  misc_feature: MA Experiment 20000185 PARAMETER Experiment Name: At_Roots__P Parameter: Age (day) Value: 7 vs. 21
  misc_feature: MA Experiment 20000185 PARAMETER Experiment Name: At_Roots__P Parameter: Organism Value: A. thaliana
  misc_feature: MA Experiment 20000185 PARAMETER Experiment Name: At_Roots__P Parameter: Tissue Value: Roots vs. Whole Plant
  misc_feature: MA Experiment ID: 20000224 Result: Down-regulated in Transcription
  misc_feature: MA Experiment ID: 20000234 Result: Up-regulated in Transcription
  misc_feature: MA Experiment 20000234 PARAMETER Experiment Name: At_Siliques_P Parameter: Age (day) Value: 21
  misc_feature: MA Experiment 20000234 PARAMETER Experiment Name: At_Siliques_P Parameter: Organism Value: A. thaliana
  misc_feature: MA Experiment 20000234 PARAMETER Experiment Name: At_Siliques_P Parameter: Plant Line Value: WS
  misc_feature: MA Experiment 20000234 PARAMETER Experiment Name: At_Siliques_P Parameter: Tissue Value: Less Than 5mm Siliques vs. Whole Plant
  misc_feature: MA Experiment ID: 20000286 Result: Up-regulated in Transcription
  misc_feature: MA Experiment 20000286 PARAMETER Experiment Name: At_Open_Flower_P Parameter: Age (day) Value: 21
  misc_feature: MA Experiment 20000286 PARAMETER Experiment Name: At_Open_Flower_P Parameter: Plant Line Value: WS
  misc_feature: MA Experiment 20000286 PARAMETER Experiment Name: At_Open_Flower_P Parameter: Tissue Value: Half Open vs. Whole Plant
  misc_feature: MA Experiment ID: 20000438 Result: Up-regulated in Transcription
  misc_feature: MA Experiment 20000438 PARAMETER Experiment Name: At_Shoots__P Parameter: Age (day) Value: 14
  misc_feature: MA Experiment 20000438 PARAMETER Experiment Name: At_Shoots__P Parameter: Tissue Value: Shoots vs. Whole Plant
  misc_feature: MA Experiment ID: 20000439 Result: Down-regulated in Transcription
  misc_feature: MA Experiment 20000439 PARAMETER Experiment Name: At_Roots__P Parameter: Age (day) Value: 14 vs. 21
  misc_feature: MA Experiment 20000439 PARAMETER Experiment Name: At_Roots__P Parameter: Organism Value: A. thaliana
  misc_feature: MA Experiment 20000439 PARAMETER Experiment Name: At_Roots__P Parameter: Tissue Value: Roots vs. Whole Plant
  misc_feature: MA Experiment ID: 20000451 Result: Up-regulated in Transcription
  misc_feature: MA Experiment 20000451 PARAMETER Experiment Name: At_CS6879_Shoots-Roots_P Parameter: Age (day) Value: 14
  misc_feature: MA Experiment 20000451 PARAMETER Experiment Name: At_CS6879_Shoots-Roots_P Parameter: Organism Value: A. thaliana
  misc_feature: MA Experiment 20000451 PARAMETER Experiment Name: At_CS6879_Shoots-Roots_P Parameter: Plant Line Value: CS6879 vs. WS
  misc_feature: MA Experiment 20000451 PARAMETER Experiment Name: At_CS6879_Shoots-Roots_P Parameter: Tissue Value: Roots
  misc_feature: MA Experiment ID: 20000573 Result: Down-regulated in Transcription
  misc_feature: MA Experiment 20000573 PARAMETER Experiment Name: At_100uM_ABA_Mutants__P Parameter: Organism Value: A. thaliana
  misc_feature: MA Experiment 20000573 PARAMETER Experiment Name: At_100uM_ABA_Mutants__P Parameter: Plant Line Value: CS22 vs. Ler wt
  misc_feature: MA Experiment 20000573 PARAMETER Experiment Name: At_100uM_ABA_Mutants__P Parameter: Timepoint (hr) Value: N/A
  misc_feature: MA Experiment 20000573 PARAMETER Experiment Name: At_100uM_ABA_Mutants__P Parameter: Tissue Value: Whole Plant
  misc_feature: MA Experiment 20000573 PARAMETER Experiment Name: At_100uM_ABA_Mutants__P Parameter: Treatment Value: None
  misc_feature: MA Experiment ID: 20000574 Result: Down-regulated in Transcription
  misc_feature: MA Experiment 20000574 PARAMETER Experiment Name: At_100uM_ABA_Mutants__P Parameter: Organism Value: A. thaliana
  misc_feature: MA Experiment 20000574 PARAMETER Experiment Name: At_100uM_ABA_Mutants__P Parameter: Plant Line Value: CS23 vs. Ler wt
  misc_feature: MA Experiment 20000574 PARAMETER Experiment Name: At_100uM_ABA_Mutants__P Parameter: Timepoint (hr) Value: N/A
  misc_feature: MA Experiment 20000574 PARAMETER Experiment Name: At_100uM_ABA_Mutants__P Parameter: Tissue Value: Whole Plant
  misc_feature: MA Experiment 20000574 PARAMETER Experiment Name: At_100uM_ABA_Mutants__P Parameter: Treatment Value: None
  misc_feature: MA Experiment ID: 20001248 Result: Down-regulated in Transcription
  misc_feature: MA Experiment 20001248 PARAMETER Experiment Name: At_Far-red-induction_P Parameter: Age (day) Value: 7
  misc_feature: MA Experiment 20001248 PARAMETER Experiment Name: At_Far-red-induction_P Parameter: Light Value: Far-red vs. White
  misc_feature: MA Experiment 20001248 PARAMETER Experiment Name: At_Far-red-induction_P Parameter: Organism Value: A. thaliana
  misc_feature: MA Experiment 20001248 PARAMETER Experiment Name: At_Far-red-induction_P Parameter: Plant Line Value: Columbia
  misc_feature: MA Experiment 20001248 PARAMETER Experiment Name: At_Far-red-induction_P Parameter: Timepoint (hr) Value: 4
  misc_feature: MA Experiment 20001248 PARAMETER Experiment Name: At_Far-red-induction_P Parameter: Tissue Value: Whole Plant
  misc_feature: MA Experiment ID: 20001558 Result: Up-regulated in Transcription
  misc_feature: MA Experiment 20001558 PARAMETER Experiment Name: At_Drought_Soil_Dry_P Parameter: Age (day) Value: 27
  misc_feature: MA Experiment 20001558 PARAMETER Experiment Name: At_Drought_Soil_Dry_P Parameter: Organism Value: A. thaliana
  misc_feature: MA Experiment 20001558 PARAMETER Experiment Name: At_Drought_Soil_Dry_P Parameter: Plant Line Value: WS
  misc_feature: MA Experiment 20001558 PARAMETER Experiment Name: At_Drought_Soil_Dry_P Parameter: Post Timepoint (hr) Value: 6
  misc_feature: MA Experiment 20001558 PARAMETER Experiment Name: At_Drought_Soil_Dry_P Parameter: Post-Treatment Value: Re-Water vs. No Drought
  misc_feature: MA Experiment 20001558 PARAMETER Experiment Name: At_Drought_Soil_Dry_P Parameter: Timepoint (day) Value: 13
  misc_feature: MA Experiment 20001558 PARAMETER Experiment Name: At_Drought_Soil_Dry_P Parameter: Treatment Value: Drought vs. No Drought
  misc_feature: MA Experiment ID: 20001906 Result: Down-regulated in Transcription
  misc_feature: MA Experiment 20001906 PARAMETER Experiment Name: At_Drought_Reproduction_P Parameter: Age (day) Value: 35
  misc_feature: MA Experiment 20001906 PARAMETER Experiment Name: At_Drought_Reproduction_P Parameter: Organism Value: A. thaliana
  misc_feature: MA Experiment 20001906 PARAMETER Experiment Name: At_Drought_Reproduction_P Parameter: Plant Line Value: WS
  misc_feature: MA Experiment 20001906 PARAMETER Experiment Name: At_Drought_Reproduction_P Parameter: Timepoint (day) Value: 5
  misc_feature: MA Experiment 20001906 PARAMETER Experiment Name: At_Drought_Reproduction_P Parameter: Tissue Value: Siliques
  misc_feature: MA Experiment 20001906 PARAMETER Experiment Name: At_Drought_Reproduction_P Parameter: Treatment Value: Drought vs. No Drought
  misc_feature: MA Experiment ID: 20001908 Result: Down-regulated in Transcription
  misc_feature: MA Experiment 20001908 PARAMETER Experiment Name: At_Drought_Reproduction_P Parameter: Age (day) Value: 40
  misc_feature: MA Experiment 20001908 PARAMETER Experiment Name: At_Drought_Reproduction_P Parameter: Organism Value: A. thaliana
  misc_feature: MA Experiment 20001908 PARAMETER Experiment Name: At_Drought_Reproduction_P Parameter: Plant Line Value: WS
  misc_feature: MA Experiment 20001908 PARAMETER Experiment Name: At_Drought_Reproduction_P Parameter: Timepoint (day) Value: 10
  misc_feature: MA Experiment 20001908 PARAMETER Experiment Name: At_Drought_Reproduction_P Parameter: Tissue Value: Siliques
  misc_feature: MA Experiment 20001908 PARAMETER Experiment Name: At_Drought_Reproduction_P Parameter: Treatment Value: Drought vs. No Drought
  misc_feature: MA Experiment ID: 20001911 Result: Down-regulated in Transcription
  misc_feature: MA Experiment 20001911 PARAMETER Experiment Name: At_Drought_Reproduction_P Parameter: Age (day) Value: 40
  misc_feature: MA Experiment 20001911 PARAMETER Experiment Name: At_Drought_Reproduction_P Parameter: Organism Value: A. thaliana
  misc_feature: MA Experiment 20001911 PARAMETER Experiment Name: At_Drought_Reproduction_P Parameter: Plant Line Value: WS
  misc_feature: MA Experiment 20001911 PARAMETER Experiment Name: At_Drought_Reproduction_P Parameter: Timepoint (day) Value: 10
  misc_feature: MA Experiment 20001911 PARAMETER Experiment Name: At_Drought_Reproduction_P Parameter: Tissue Value: Flowers
  misc_feature: MA Experiment 20001911 PARAMETER Experiment Name: At_Drought_Reproduction_P Parameter: Treatment Value: Drought vs. No Drought
aaatttatttaataaagtttacctataatatcaaattatgcaaaacacaggctggttcagttttttccacgaatcaaaaatggttggagaaatattgaataagagagagagagagagagagagagagagagatagagtttcagagttgacacaacattgaagtaaactaaactcctaacctctttatctatgtgtatatataaaactcaaaagtacatataatcttcaccattcacacatagtcacataccaaagcaaaaacatggatcgttgcacgtcgtcgtttttgcttctcacattggtgtccattctccaaatctcctttgctcaacttgttccagcaatgatgacattcggtgactctgtagttgatgtcggcaacaacaactatcttccgacccttttcagagctgattatcctccttatggccgtgatttcgctaaccacaaagccaccggtcgtttctgcaacggcaaattagccactgatataactgctgagactttaggcttcactaagtacccaccagcttatctaagtcctgaagcttctggtaagaatcttctcattggtgctaatttcgcttctgcagcttcaggttatgatgacaaagctgctcttctcaatcacgcgatcccgttgtatcagcaagtagagtatttcaaggaatacaagagcaagctaataaaaattgcaggaagcaaaaaagctgattcgatcataaagggagcaatctgtctcttaagtgcaggaagcagtgattttgttcaaaactactatgtgaatcctctgctttacaaagtttacactgttgatgcatacggatctttccttatcgataacttctctacatttatcaagcaagtgtatgcggttggagcaaggaagatcggtgtgacatctctgcctccaacaggatgtcttcccgctgcaagaacccttttcggtttccatgaaaaaggctgtgtttcaagactcaacacagatgctcaaaactttaacaagaagcttaacgctgctgcttcaaagcttcagaagcaatattccgatcttaagattgttgtcttcgacatctactctccactttatgatcttgttcagaacccttccaaatccggattcacggaagcaaccaaaggatgttgtggaacaggaacagtcgagacaacttcactcttgtgcaacccgaaatcgtttgggacatgctccaatgctactcagtatgtgttctgggacagtgtgcatccttctgaagctgccaatgagattcttgccactgccctaattggacagggcttttctctcctcggttgatctcacgtatttatcttatattctcttttcaaatcgctgtttctatcacacatgagtcatacatttgtttttctttgaattatgtatcaaagcatcactgttttactaaaaatgtattgaaacttattacaagtact

SEQ ID NO: 21575 - protein, 350 aa, Arabidopsis thaliana
  peptide (1)..(350): Ceres Seq. ID no. 12385724
  misc_feature (28)..(341): Pfam Name: GDSL-like Lipase/Acylhydrolase Pfam Description: GDSL-like Lipase/Acylhydrolase
  misc_feature (24)..(349): Homolog of NCBI NO: 15237137 NR Description: GDSL-motif lipase/hydrolase-like protein; protein
  misc_feature (9)..(349): Homolog of NCBI NO: 10638955 NR Description: putative proline-rich protein APG isolog [Cicer
  misc_feature (26)..(342): Homolog of NCBI NO: 18394825 NR Description: anter-specific proline-rich protein APG
  misc_feature (32)..(349): Homolog of NCBI NO: 15237528 NR Description: putative protein; protein id: At5g03810.1
  misc_feature (11)..(349): Homolog of NCBI NO: 13174242 NR Description: putative proline-rich protein [Oryza sativa]
  misc_feature (24)..(349): Homolog of NCBI NO: 15237531 NR Description: putative protein; protein id: At5g03820.1
  misc_feature (24)..(349): Homolog of NCBI NO: 9758010 NR Description: proline-rich protein APG-like [Arabidopsis
  misc_feature (1)..(342): Homolog of NCBI NO: 28393626 NR Description: putative family II extracellular lipase 1 (EXL1)
  misc_feature (29)..(350): Homolog of NCBI NO: 2062167 NR Description: Proline-rich protein APG isolog [Arabidopsis
  misc_feature (1)..(350): Homolog of NCBI NO: 15228189 NR Description: putative APG protein
MDRCTSSFLLLTLVSILQISFAQLVPAMMTFGDSVVDVGNNNYLPTLFRADYPPYGRDFANHKATGRFCNGKLATDITAETLGFTKYPPAYLSPEASGKNLLIGANFASAASGYDDKAALLNHAIPLYQQVEYFKEYKSKLIKIAGSKKADSIIKGAICLLSAGSSDFVQNYYVNPLLYKVYTVDAYGSFLIDNFSTFIKQVYAVGARKIGVTSLPPTGCLPAARTLFGFHEKGCVSRLNTDAQNFNKKLNAAASKLQKQYSDLKIVVFDIYSPLYDLVQNPSKSGFTEATKGCCGTGTVETTSLLCNPKSFGTCSNATQYVFWDSVHPSEAANEILATALIGQGFSLLG

SEQ ID NO: 21576 - protein, 323 aa, Arabidopsis thaliana
  peptide (1)..(323): Ceres Seq. ID no. 12385725
  misc_feature (1)..(314): Pfam Name: GDSL-like Lipase/Acylhydrolase Pfam Description: GDSL-like Lipase/Acylhydrolase
  misc_feature (1)..(315): Homolog of NCBI NO: 18394825 NR Description: anter-specific proline-rich protein APG
  misc_feature (1)..(315): Homolog of NCBI NO: 28393626 NR Description: putative family II extracellular lipase 1 (EXL1)
  misc_feature (5)..(322): Homolog of NCBI NO: 15237528 NR Description: putative protein; protein id: At5g03810.1
  misc_feature (1)..(322): Homolog of NCBI NO: 9758010 NR Description: proline-rich protein APG-like [Arabidopsis
  misc_feature (1)..(322): Homolog of NCBI NO: 13174242 NR Description: putative proline-rich protein [Oryza sativa]
  misc_feature (1)..(322): Homolog of NCBI NO: 15237531 NR Description: putative protein; protein id: At5g03820.1
  misc_feature (1)..(322): Homolog of NCBI NO: 15237137 NR Description: GDSL-motif lipase/hydrolase-like protein; protein
  misc_feature (1)..(322): Homolog of NCBI NO: 10638955 NR Description: putative proline-rich protein APG isolog [Cicer
  misc_feature (2)..(323): Homolog of NCBI NO: 2062167 NR Description: Proline-rich protein APG isolog [Arabidopsis
  misc_feature (1)..(323): Homolog of NCBI NO: 15228189 NR Description: putative APG protein
MMTFGDSVVDVGNNNYLPTLFRADYPPYGRDFANHKATGRFCNGKLATDITAETLGFTKYPPAYLSPEASGKNLLIGANFASAASGYDDKAALLNHAIPLYQQVEYFKEYKSKLIKIAGSKKADSIIKGAICLLSAGSSDFVQNYYVNPLLYKVYTVDAYGSFLIDNFSTFIKQVYAVGARKIGVTSLPPTGCLPAARTLFGFHEKGCVSRLNTDAQNFNKKLNAAASKLQKQYSDLKIVVFDIYSPLYDLVQNPSKSGFTEATKGCCGTGTVETTSLLCNPKSFGTCSNATQYVFWDSVHPSEAANEILATALIGQGFSLLG

SEQ ID NO: 21577 - protein, 322 aa, Arabidopsis thaliana
  peptide (1)..(322): Ceres Seq. ID no. 12385726
  misc_feature (1)..(313): Pfam Name: GDSL-like Lipase/Acylhydrolase Pfam Description: GDSL-like Lipase/Acylhydrolase
  misc_feature (1)..(314): Homolog of NCBI NO: 18394825 NR Description: anter-specific proline-rich protein APG
  misc_feature (1)..(314): Homolog of NCBI NO: 28393626 NR Description: putative family II extracellular lipase 1 (EXL1)
  misc_feature (4)..(321): Homolog of NCBI NO: 15237528 NR Description: putative protein; protein id: At5g03810.1
  misc_feature (1)..(321): Homolog of NCBI NO: 9758010 NR Description: proline-rich protein APG-like [Arabidopsis
  misc_feature (1)..(321): Homolog of NCBI NO: 13174242 NR Description: putative proline-rich protein [Oryza sativa]
  misc_feature (1)..(321): Homolog of NCBI NO: 15237531 NR Description: putative protein; protein id: At5g03820.1
  misc_feature (1)..(321): Homolog of NCBI NO: 15237137 NR Description: GDSL-motif lipase/hydrolase-like protein; protein
  misc_feature (1)..(321): Homolog of NCBI NO: 10638955 NR Description: putative proline-rich protein APG isolog [Cicer
  misc_feature (1)..(322): Homolog of NCBI NO: 2062167 NR Description: Proline-rich protein APG isolog [Arabidopsis
  misc_feature (1)..(322): Homolog of NCBI NO: 15228189 NR Description: putative APG protein
MTFGDSVVDVGNNNYLPTLFRADYPPYGRDFANHKATGRFCNGKLATDITAETLGFTKYPPAYLSPEASGKNLLIGANFASAASGYDDKAALLNHAIPLYQQVEYFKEYKSKLIKIAGSKKADSIIKGAICLLSAGSSDFVQNYYVNPLLYKVYTVDAYGSFLIDNFSTFIKQVYAVGARKIGVTSLPPTGCLPAARTLFGFHEKGCVSRLNTDAQNFNKKLNAAASKLQKQYSDLKIVVFDIYSPLYDLVQNPSKSGFTEATKGCCGTGTVETTSLLCNPKSFGTCSNATQYVFWDSVHPSEAANEILATALIGQGFSLLG

SEQ ID NO: 21578 - DNA, 657 bp, Arabidopsis thaliana
  misc_feature (1)..(657): Ceres Seq. ID no. 12384594
  misc_feature: MA Experiment ID: 108461 Result: Down-regulated in Transcription
  misc_feature: MA Experiment 108461 PARAMETER Experiment Name: At_Germinating_Seeds_cDNA_P Parameter: Age (day) Value: 1 vs. 0
  misc_feature: MA Experiment 108461 PARAMETER Experiment Name: At_Germinating_Seeds_cDNA_P Parameter: Tissue Value: Germinating Seeds
  misc_feature: MA Experiment ID: 108462 Result: Down-regulated in Transcription
  misc_feature: MA Experiment 108462 PARAMETER Experiment Name: At_Germinating_Seeds_cDNA_P Parameter: Age (day) Value: 2 vs. 0
  misc_feature: MA Experiment 108462 PARAMETER Experiment Name: At_Germinating_Seeds_cDNA_P Parameter: Tissue Value: Germinating Seeds
  misc_feature: MA Experiment ID: 108463 Result: Down-regulated in Transcription
  misc_feature: MA Experiment 108463 PARAMETER Experiment Name: At_Germinating_Seeds_cDNA_P Parameter: Age (day) Value: 3 vs. 0
  misc_feature: MA Experiment 108463 PARAMETER Experiment Name: At_Germinating_Seeds_cDNA_P Parameter: Tissue Value: Germinating Seeds
  misc_feature: MA Experiment ID: 108464 Result: Down-regulated in Transcription
  misc_feature: MA Experiment 108464 PARAMETER Experiment Name: At_Germinating_Seeds_cDNA_P Parameter: Age (day) Value: 4 vs. 0
  misc_feature: MA Experiment 108464 PARAMETER Experiment Name: At_Germinating_Seeds_cDNA_P Parameter: Tissue Value: Germinating Seeds
aaaaacacacgccggagagttttctaagaacaacagtgacgaaaaggtttttagggtttctttaccaatcagaatctccgccaagtaacgattttcagattccgaagcagcaaagttcaaataatttccgaactgtaacatggcggcaactactggacttgagactctcgtcgatcagattatttcggtgattacaaatgacggacgcaacattgtgggagttcttaaaggttttgaccaggctacaaatataatccttgatgaatctcatgaacgtgtgttttccacaaaggaaggagtacaacaacatgtgttgggtttgtacatcatcagaggggacaacataggtgttatcggggagctggacgaggagcttgatgctagtctggatttttcgaagctgagagcccatccgttgaaacccgtagtgcattgattgaatatagttatggtgagaaaatctaattctctcattcaaagcctaaaaacaaagagaagatttgattgtaaacaatttggatagtttgttttgatgtctggagttgtcttatttgtgtatcctaaggacaaaagctatatgatattttatgtcttaaacgttttggtcggaaacttaaatcatacccaatccttttggaacggaacctaggtttgcct

SEQ ID NO: 21579 - protein, 98 aa, Arabidopsis thaliana
  peptide (1)..(98): Ceres Seq. ID no. 12384595
  misc_feature (5)..(74): Pfam Name: LSM domain Pfam Description: LSM domain
  misc_feature (4)..(98): Homolog of NCBI NO: 21537395 NR Description: unknown [Arabidopsis thaliana]
  misc_feature (3)..(96): Homolog of NCBI NO: 23612724 NR Description: u6 snRNA-associated sm-like protein, putative
  misc_feature (7)..(98): Homolog of NCBI NO: 19076009 NR Description: splicing factor [Schizosaccharomyces pombe]
  misc_feature (4)..(69): Homolog of NCBI NO: 28279736 NR Description: Similar to U6 snRNA-associated Sm-like protein
  misc_feature (4)..(96): Homolog of NCBI NO: 39584186 NR Description: Hypothetical protein CBG05470 [Caenorhabditis
  misc_feature (4)..(96): Homolog of NCBI NO: 17544148 NR Description: SM protein (10.8 kD) [Caenorhabditis elegans]
  misc_feature (5)..(98): Homolog of NCBI NO: 24655606 NR Description: CG2021-PA [Drosophila melanogaster]
  misc_feature (4)..(98): Homolog of NCBI NO: 7706425 NR Description: U6 snRNA-associated Sm-like protein LSm8 [Homo
  misc_feature (1)..(98): Homolog of NCBI NO: 15218779 NR Description: small nuclear ribonucleoprotein, putative
  misc_feature (7)..(98): Homolog of NCBI NO: 25404943 NR Description: protein F1E22.8 [imported] - Arabidopsis thaliana
MAATTGLETLVDQIISVITNDGRNIVGVLKGFDQATNIILDESHERVFSTKEGVQQHVLGLYIIRGDNIGVIGELDEELDASLDFSKLRAHPLKPVVH

SEQ ID NO: 21580 - protein, 62 aa, Arabidopsis thaliana
  peptide (1)..(62): Ceres Seq. ID no. 12384596
  misc_feature (6)..(58): Homolog of NCBI NO: 25404943 NR Description: protein F1E22.8 [imported] - Arabidopsis thaliana
KHTPESFLRTTVTKRFLGFLYQSESPPSNDFQIPKQQSSNNFRTVTWRQLLDLRLSSIRLFR

SEQ ID NO: 21581 - DNA, 995 bp, Arabidopsis thaliana
  misc_feature (1)..(995): Ceres Seq. ID no. 12482528
  misc_feature: MA Experiment ID: 108488 Result: Down-regulated in Transcription
  misc_feature: MA Experiment ID: 108577 Result: Down-regulated in Transcription
  misc_feature: MA Experiment 108577 PARAMETER Experiment Name: At_42deg_Heat_cDNA_P Parameter: Temperature (deg C) Value: 42 vs. 22
  misc_feature: MA Experiment 108577 PARAMETER Experiment Name: At_42deg_Heat_cDNA_P Parameter: Timepoint (hr) Value: 6
  misc_feature: MA Experiment 108577 PARAMETER Experiment Name: At_42deg_Heat_cDNA_P Parameter: Tissue Value: Aerial
ctggtcttatgtttttttgccctaatcgacttctgcgtagagaaaccgaaaaaggagagagaaaatccgccgataagattccgtacgactgcacgtctccgatctcgccgtgaatctgtctcgagagtctgttaactcaccggatctccgtcgttgatctgcctctgtttcgatccgtgttaaactcgatttaaaactatggatccgatggatatagttggaaaatcaaaggaagatgcttcgcttccgaaagctaccatgacgaaaattataaaggagatgttacccgcagatgttcgtgttgctagagatgctcaagatctattgattgagtgttgtgtagagttcataaatcttatatcgtcggagtcgaatgaagtgtgtaacaaagaggataaacgaacaatagcccctgagcacgtactcaaagctttacaggttcttggctttggggaatacgtagaagaagtttatgccgcgtatgagcaacataaatatgaaaccatgcaggattcgcagagaagtgtgaagatgaatagcggagcagagatgacggaagaagaggcggcagcggaacaacagaggatgtttgcagaagctcgagcaagaatgaatggaggtgttacagttcctcaaccagagcaactagaagaaccccaacaacaacaacaaacaagtctacaaagctaatcaacaaaaccgcaaaggaatcccttattttaacattatccttttgacttctttttctttctagcaatatctctgtaaagtgcaaaattcgtcgcgtcttggtgttgatatgctctttacattttttaacttagggttgtgttttttcccctttctttgaatctaaaatcacttaggtgattcagatgtaattagtaaggtttttattgaatcttagcaactagtgtcattcgaatccaaatccccttaaattatgtgtaacttcataattctgaagtcttgaatccatttctagtctgatcacc

SEQ ID NO: 21582 - protein, 163 aa, Arabidopsis thaliana
  peptide (1)..(163): Ceres Seq. ID no. 12482529
  misc_feature (1)..(159): Homolog of NCBI NO: 30688817 NR Description: TATA-binding protein-associated phosphoprotein
  misc_feature (1)..(159): Homolog of NCBI NO: 2129748 NR Description: TATA-binding protein-associated phosphoprotein
  misc_feature (1)..(159): Homolog of NCBI NO: 30688804 NR Description: TATA-binding protein-associated phosphoprotein
  misc_feature (1)..(163): Homolog of NCBI NO: 11279032 NR Description: DR1-like protein - Arabidopsis thaliana
  misc_feature (1)..(163): Homolog of NCBI NO: 18415737 NR Description: DR1-like protein
MDPMDIVGKSKEDASLPKATMTKIIKEMLPADVRVARDAQDLLIECCVEFINLISSESNEVCNKEDKRTIAPEHVLKALQVLGFGEYVEEVYAAYEQHKYETMQDSQRSVKMNSGAEMTEEEAAAEQQRMFAEARARMNGGVTVPQPEQLEEPQQQQQTSLQS

SEQ ID NO: 21583 - protein, 160 aa, Arabidopsis thaliana
  peptide (1)..(160): Ceres Seq. ID no. 12482530
  misc_feature (1)..(156): Homolog of NCBI NO: 30688817 NR Description: TATA-binding protein-associated phosphoprotein
  misc_feature (1)..(156): Homolog of NCBI NO: 2129748 NR Description: TATA-binding protein-associated phosphoprotein
  misc_feature (1)..(156): Homolog of NCBI NO: 30688804 NR Description: TATA-binding protein-associated phosphoprotein
  misc_feature (1)..(160): Homolog of NCBI NO: 11279032 NR Description: DR1-like protein - Arabidopsis thaliana
  misc_feature (1)..(160): Homolog of NCBI NO: 18415737 NR Description: DR1-like protein
MDIVGKSKEDASLPKATMTKIIKEMLPADVRVARDAQDLLIECCVEFINLISSESNEVCNKEDKRTIAPEHVLKALQVLGFGEYVEEVYAAYEQHKYETMQDSQRSVKMNSGAEMTEEEAAAEQQRMFAEARARMNGGVTVPQPEQLEEPQQQQQTSLQS

SEQ ID NO: 21584 - protein, 143 aa, Arabidopsis thaliana
  peptide (1)..(143): Ceres Seq. ID no. 12482531
  misc_feature (1)..(139): Homolog of NCBI NO: 30688817 NR Description: TATA-binding protein-associated phosphoprotein
  misc_feature (1)..(139): Homolog of NCBI NO: 2129748 NR Description: TATA-binding protein-associated phosphoprotein
  misc_feature (1)..(139): Homolog of NCBI NO: 30688804 NR Description: TATA-binding protein-associated phosphoprotein
  misc_feature (1)..(143): Homolog of NCBI NO: 11279032 NR Description: DR1-like protein - Arabidopsis thaliana
  misc_feature (1)..(143): Homolog of NCBI NO: 18415737 NR Description: DR1-like protein
MTKIIKEMLPADVRVARDAQDLLIECCVEFINLISSESNEVCNKEDKRTIAPEHVLKALQVLGFGEYVEEVYAAYEQHKYETMQDSQRSVKMNSGAEMTEEEAAAEQQRMFAEARARMNGGVTVPQPEQLEEPQQQQQTSLQS

SEQ ID NO: 21585 - DNA, 929 bp, Arabidopsis thaliana
  misc_feature (1)..(929): Ceres Seq. ID no. 12338468
  misc_feature: MA Experiment ID: 20000185 Result: Down-regulated in Transcription
  misc_feature: MA Experiment 20000185 PARAMETER Experiment Name: At_Roots__P Parameter: Age (day) Value: 7 vs. 21
  misc_feature: MA Experiment 20000185 PARAMETER Experiment Name: At_Roots__P Parameter: Organism Value: A. thaliana
  misc_feature: MA Experiment 20000185 PARAMETER Experiment Name: At_Roots__P Parameter: Tissue Value: Roots vs. Whole Plant
  misc_feature: MA Experiment ID: 20000438 Result: Up-regulated in Transcription
  misc_feature: MA Experiment 20000438 PARAMETER Experiment Name: At_Shoots__P Parameter: Age (day) Value: 14
  misc_feature: MA Experiment 20000438 PARAMETER Experiment Name: At_Shoots__P Parameter: Tissue Value: Shoots vs. Whole Plant
  misc_feature: MA Experiment ID: 20000439 Result: Down-regulated in Transcription
  misc_feature: MA Experiment 20000439 PARAMETER Experiment Name: At_Roots__P Parameter: Age (day) Value: 14 vs. 21
  misc_feature: MA Experiment 20000439 PARAMETER Experiment Name: At_Roots__P Parameter: Organism Value: A. thaliana
  misc_feature: MA Experiment 20000439 PARAMETER Experiment Name: At_Roots__P Parameter: Tissue Value: Roots vs. Whole Plant
  misc_feature: MA Experiment ID: 20001557 Result: Down-regulated in Transcription
  misc_feature: MA Experiment 20001557 PARAMETER Experiment Name: At_Drought_Soil_Dry_P Parameter: Age (day) Value: 27
  misc_feature: MA Experiment 20001557 PARAMETER Experiment Name: At_Drought_Soil_Dry_P Parameter: Organism Value: A. thaliana
  misc_feature: MA Experiment 20001557 PARAMETER Experiment Name: At_Drought_Soil_Dry_P Parameter: Plant Line Value: WS
  misc_feature: MA Experiment 20001557 PARAMETER Experiment Name: At_Drought_Soil_Dry_P Parameter: Post Timepoint (hr) Value: 3
  misc_feature: MA Experiment 20001557 PARAMETER Experiment Name: At_Drought_Soil_Dry_P Parameter: Post-Treatment Value: Re-Water vs. No Drought
  misc_feature: MA Experiment 20001557 PARAMETER Experiment Name: At_Drought_Soil_Dry_P Parameter: Timepoint (day) Value: 13
  misc_feature: MA Experiment 20001557 PARAMETER Experiment Name: At_Drought_Soil_Dry_P Parameter: Treatment Value: Drought vs. No Drought
attcctaagcaaatctcttctctctcccattcgtctccaaagagattacagttttgagcatttctcatctctcgaagctcttctctgtgtgtgtggcgatggctgctaattcgataatggcttcctccaaacccctaatctccctgtcatccaaccaacaaccaaaccgagtccaaattcccaaattcgccaaacttccccaaattcccaaatccctcacttcctccaccgatctccgtagcaaagcactatcactctcctccgccaccgccaaatccttagctttaatcgccgctttcgctcctccgtcgatggcggaggcgatggagaaagcacagctcttcgatttcaatctcacgcttccgatcatcgttgttgagtttctcttcttgatgttcgctctcgacaaggtctattactctccgcttggtaacttcatggatcaaagagacgcttccatcaaagagaagctcgcgagtgttaaggacacttcgactgaagtaaaggagctcgatgagcaagccgccgccgtaatgagagcagctagggctgagatcgccgccgcgcttaacaagatgaagaaggagactcaggttgaagtcgaggagaagctagcggagggaaggaagaaggtggaggaagagctaaaagaagctttggcgagcttggagagtcagaaagaagaaaccattaaagctttggattctcagattgctgctcttagtgaagacattgtcaagaaggttcttccttcttaaattatatttttgttaactgtgtaattctctgtctctctatctcaaaacttatttacaagaaattactgtaaatctcttcttcttcttcttctctgtttcttggattgttcgtcgttcaaagaagaacaatttttattttgtaagtttataaataattagctctcttctgcc

SEQ ID NO: 21586 - protein, 219 aa, Arabidopsis thaliana
  peptide (1)..(219): Ceres Seq. ID no. 12338469
  misc_feature (71)..(217): Homolog of NCBI NO: 23043220 NR Description: hypothetical protein [Trichodesmium erythraeum
  misc_feature (75)..(217): Homolog of NCBI NO: 11467368 NR Description: ATP synthase CF0 beta' chain [Cyanophora
  misc_feature (5)..(147): Homolog of NCBI NO: 31980479 NR Description: hypothetical protein [Drosera tokaiensis]
  misc_feature (5)..(147): Homolog of NCBI NO: 31980477 NR Description: hypothetical protein [Drosera tokaiensis]
  misc_feature (37)..(218): Homolog of NCBI NO: 5902610 NR Description: CFO ATP synthase subunit II precursor
  misc_feature (7)..(219): Homolog of NCBI NO: 29367413 NR Description: H+-transporting ATP synthase chain 9-like protein
  misc_feature (3)..(218): Homolog of NCBI NO: 448445 NR Description: CF0 ATP synthase:SUBUNIT=9
  misc_feature (3)..(218): Homolog of NCBI NO: 461595 NR Description: ATP synthase B' chain, chloroplast precursor
  misc_feature (1)..(219): Homolog of NCBI NO: 14596171 NR Description: H+-transporting ATP synthase-like protein
  misc_feature (1)..(219): Homolog of NCBI NO: 15236722 NR Description: H+-transporting ATP synthase chain 9 - like
MAANSIMASSKPLISLSSNQQPNRVQIPKFAKLPQIPKSLTSSTDLRSKALSLSSATAKSLALIAAFAPPSMAEAMEKAQLFDFNLTLPIIVVEFLFLMFALDKVYYSPLGNFMDQRDASIKEKLASVKDTSTEVKELDEQAAAVMRAARAEIAAALNKMKKETQVEVEEKLAEGRKKVEEELKEALASLESQKEETIKALDSQIAALSEDIVKKVLPS

SEQ ID NO: 21587 - protein, 213 aa, Arabidopsis thaliana
  peptide (1)..(213): Ceres Seq. ID no. 12338471
  misc_feature (65)..(211): Homolog of NCBI NO: 23043220 NR Description: hypothetical protein [Trichodesmium erythraeum
  misc_feature (69)..(211): Homolog of NCBI NO: 11467368 NR Description: ATP synthase CF0 beta' chain [Cyanophora
  misc_feature (1)..(141): Homolog of NCBI NO: 31980479 NR Description: hypothetical protein [Drosera tokaiensis]
  misc_feature (1)..(141): Homolog of NCBI NO: 31980477 NR Description: hypothetical protein [Drosera tokaiensis]
  misc_feature (31)..(212): Homolog of NCBI NO: 5902610 NR Description: CFO ATP synthase subunit II precursor
  misc_feature (1)..(213): Homolog of NCBI NO: 29367413 NR Description: H+-transporting ATP synthase chain 9-like protein
  misc_feature (1)..(212): Homolog of NCBI NO: 448445 NR Description: CF0 ATP synthase:SUBUNIT=9
  misc_feature (1)..(212): Homolog of NCBI NO: 461595 NR Description: ATP synthase B' chain, chloroplast precursor
  misc_feature (1)..(213): Homolog of NCBI NO: 14596171 NR Description: H+-transporting ATP synthase-like protein
  misc_feature (1)..(213): Homolog of NCBI NO: 15236722 NR Description: H+-transporting ATP synthase chain 9 - like
MASSKPLISLSSNQQPNRVQIPKFAKLPQIPKSLTSSTDLRSKALSLSSATAKSLALIAAFAPPSMAEAMEKAQLFDFNLTLPIIVVEFLFLMFALDKVYYSPLGNFMDQRDASIKEKLASVKDTSTEVKELDEQAAAVMRAARAEIAAALNKMKKETQVEVEEKLAEGRKKVEEELKEALASLESQKEETIKALDSQIAALSEDIVKKVLPS

SEQ ID NO: 21588 - protein, 148 aa, Arabidopsis thaliana
  peptide (1)..(148): Ceres Seq. ID no. 12338472
  misc_feature (1)..(146): Homolog of NCBI NO: 23043220 NR Description: hypothetical protein [Trichodesmium erythraeum
  misc_feature (4)..(146): Homolog of NCBI NO: 11467368 NR Description: ATP synthase CF0 beta' chain [Cyanophora
  misc_feature (1)..(76): Homolog of NCBI NO: 31980479 NR Description: hypothetical protein [Drosera tokaiensis]
  misc_feature (1)..(76): Homolog of NCBI NO: 31980477 NR Description: hypothetical protein [Drosera tokaiensis]
  misc_feature (1)..(147): Homolog of NCBI NO: 5902610 NR Description: CFO ATP synthase subunit II precursor
  misc_feature (1)..(148): Homolog of NCBI NO: 29367413 NR Description: H+-transporting ATP synthase chain 9-like protein
  misc_feature (1)..(147): Homolog of NCBI NO: 448445 NR Description: CF0 ATP synthase:SUBUNIT=9
  misc_feature (1)..(147): Homolog of NCBI NO: 461595 NR Description: ATP synthase B' chain, chloroplast precursor
  misc_feature (1)..(148): Homolog of NCBI NO: 14596171 NR Description: H+-transporting ATP synthase-like protein
  misc_feature (1)..(148): Homolog of NCBI NO: 15236722 NR Description: H+-transporting ATP synthase chain 9 - like
MAEAMEKAQLFDFNLTLPIIVVEFLFLMFALDKVYYSPLGNFMDQRDASIKEKLASVKDTSTEVKELDEQAAAVMRAARAEIAAALNKMKKETQVEVEEKLAEGRKKVEEELKEALASLESQKEETIKALDSQIAALSEDIVKKVLPS

SEQ ID NO: 21589 - DNA, 841 bp, Arabidopsis thaliana
  misc_feature (1)..(841): Ceres Seq. ID no. 12331964
  misc_feature: MA Experiment ID: 108434 Result: Up-regulated in Transcription
  misc_feature: MA Experiment 108434 PARAMETER Experiment Name: At_Root_Tips_cDNA_P Parameter: Tissue Value: Root Tips
  misc_feature: MA Experiment ID: 108462 Result: Down-regulated in Transcription
  misc_feature: MA Experiment 108462 PARAMETER Experiment Name: At_Germinating_Seeds_cDNA_P Parameter: Age (day) Value: 2 vs. 0
  misc_feature: MA Experiment 108462 PARAMETER Experiment Name: At_Germinating_Seeds_cDNA_P Parameter: Tissue Value: Germinating Seeds
  misc_feature: MA Experiment ID: 108463 Result: Down-regulated in Transcription
  misc_feature: MA Experiment 108463 PARAMETER Experiment Name: At_Germinating_Seeds_cDNA_P Parameter: Age (day) Value: 3 vs. 0
  misc_feature: MA Experiment 108463 PARAMETER Experiment Name: At_Germinating_Seeds_cDNA_P Parameter: Tissue Value: Germinating Seeds
  misc_feature: MA Experiment ID: 20000111 Result: Up-regulated in Transcription
  misc_feature: MA Experiment 20000111 PARAMETER Experiment Name: At_42deg_Heat_cDNA_P Parameter: Temperature (deg C) Value: 42 vs. 22
  misc_feature: MA Experiment 20000111 PARAMETER Experiment Name: At_42deg_Heat_cDNA_P Parameter: Timepoint (hr) Value: 6
  misc_feature: MA Experiment 20000111 PARAMETER Experiment Name: At_42deg_Heat_cDNA_P Parameter: Tissue Value: Aerial
  misc_feature: MA Experiment ID: 20000224 Result: Down-regulated in Transcription
aacccctctttatccgcgcgagagcaattgagcagccatggtttgcatcaggcgagcgacggtggatgatctgctggcgatgcaagcctgcaatctcatgtgtcttcctgagaactaccagatgaagtactacctctaccatatcctctcatggcctcagcttctctacgtcgccgaggactacaatggtcgcatcgttggctatgtcttggctaagatggaggaagagagcaacgagtgccacggccacatcacttctctcgccgttcttcgtacccatcgcaagctcggtctcgccactaagctcatgaccgccgctcaagctgccatggaacaggtttacgaggctgagtatgtttcgttgcatgtgaggagaagtaaccgagcagcattcaatctatacactgagacattaggctacaagattaatgatgtagaagcaaagtactacgccgatggggaggatgcttatgacatgcggaagaatctcaaggggaagcagaaccatcaccacgcccacggtcatcatcatcaccatggaggaggatgttgttctggtgatgcaaaagttgtagaaacagctcaagccgtagatggtaaagcagtttccaaatgagattcgaaagcagataattatgagtatattgaggtgggttcactggctcgctctagtacttctcactatttccattcatatgattccgagtgacaaatacatttggtgaccactctgtgttactcctttgtctttctttggttgtattgaaaatttagccgttcctttttttgatgtatcattttggaaattccaagctttcattaaggctttacaacttaagct

SEQ ID NO: 21590 - protein, 192 aa, Arabidopsis thaliana
  peptide (1)..(192): Ceres Seq. ID no. 12331965
  misc_feature (45)..(129): Pfam Name: Acetyltransferase (GNAT) family Pfam Description: Acetyltransferase (GNAT) family
  misc_feature (1)..(151): Homolog of NCBI NO: 33871453 NR Description: MGC10646 protein [Homo sapiens]
  misc_feature (1)..(192): Homolog of NCBI NO: 14550116 NR Description: silencing group B protein [Zea mays]
  misc_feature (4)..(151): Homolog of NCBI NO: 20071196 NR Description: Similar to N-acetyltransferase ARD1 homolog (S.
  misc_feature (4)..(151): Homolog of NCBI NO: 37539684 NR Description: hypothetical protein MGC10646 [Homo sapiens]
  misc_feature (4)..(151): Homolog of NCBI NO: 30519923 NR Description: DNA segment, Chr 18, Wayne State University 98,
  misc_feature (1)..(151): Homolog of NCBI NO: 39645307 NR Description: Unknown (protein for IMAGE:3922934) [Homo sapiens]
  misc_feature (4)..(151): Homolog of NCBI NO: 28422354 NR Description: Similar to N-acetyltransferase ARD1 homolog (S.
  misc_feature (4)..(151): Homolog of NCBI NO: 9845236 NR Description: N-acetyltransferase similar to S. cerevisiae ARD1
  misc_feature (1)..(176): Homolog of NCBI NO: 38344807 NR Description: OSJNBa0043L09.27 [Oryza sativa (japonica
  misc_feature (1)..(192): Homolog of NCBI NO: 15240705 NR Description: putative protein
MVCIRRATVDDLLAMQACNLMCLPENYQMKYYLYHILSWPQLLYVAEDYNGRIVGYVLAKMEEESNECHGHITSLAVLRTHRKLGLATKLMTAAQAAMEQVYEAEYVSLHVRRSNRAAFNLYTETLGYKINDVEAKYYADGEDAYDMRKNLKGKQNHHHAHGHHHHHGGGCCSGDAKVVETAQAVDGKAVSK

SEQ ID NO: 21591 - protein, 178 aa, Arabidopsis thaliana
  peptide (1)..(178): Ceres Seq. ID no. 12331966
  misc_feature (31)..(115): Pfam Name: Acetyltransferase (GNAT) family Pfam Description: Acetyltransferase (GNAT) family
  misc_feature (1)..(137): Homolog of NCBI NO: 10835057 NR Description: N-acetyltransferase, homolog of S. cerevisiae ARD1
  misc_feature (1)..(137): Homolog of NCBI NO: 9845236 NR Description: N-acetyltransferase similar to S. cerevisiae ARD1
  misc_feature (1)..(137): Homolog of NCBI NO: 37539684 NR Description: hypothetical protein MGC10646 [Homo sapiens]
  misc_feature (1)..(137): Homolog of NCBI NO: 28422354 NR Description: Similar to N-acetyltransferase ARD1 homolog (S.
  misc_feature (1)..(137): Homolog of NCBI NO: 30519923 NR Description: DNA segment, Chr 18, Wayne State University 98,
  misc_feature (1)..(137): Homolog of NCBI NO: 39645307 NR Description: Unknown (protein for IMAGE:3922934) [Homo sapiens]
  misc_feature (1)..(137): Homolog of NCBI NO: 33871453 NR Description: MGC10646 protein [Homo sapiens]
  misc_feature (1)..(178): Homolog of NCBI NO: 14550116 NR Description: silencing group B protein [Zea mays]
  misc_feature (1)..(162): Homolog of NCBI NO: 38344807 NR Description: OSJNBa0043L09.27 [Oryza sativa (japonica
  misc_feature (1)..(178): Homolog of NCBI NO: 15240705 NR Description: putative protein
MQACNLMCLPENYQMKYYLYHILSWPQLLYVAEDYNGRIVGYVLAKMEEESNECHGHITSLAVLRTHRKLGLATKLMTAAQAAMEQVYEAEYVSLHVRRSNRAAFNLYTETLGYKINDVEAKYYADGEDAYDMRKNLKGKQNHHHAHGHHHHHGGGCCSGDAKVVETAQAVDGKAVSK

SEQ ID NO: 21592 - protein, 172 aa, Arabidopsis thaliana
  peptide (1)..(172): Ceres Seq. ID no. 12331967
  misc_feature (25)..(109): Pfam Name: Acetyltransferase (GNAT) family Pfam Description: Acetyltransferase (GNAT) family
  misc_feature (1)..(131): Homolog of NCBI NO: 10835057 NR Description: N-acetyltransferase, homolog of S. cerevisiae ARD1
  misc_feature (1)..(131): Homolog of NCBI NO: 9845236 NR Description: N-acetyltransferase similar to S. cerevisiae ARD1
  misc_feature (1)..(131): Homolog of NCBI NO: 37539684 NR Description: hypothetical protein MGC10646 [Homo sapiens]
  misc_feature (1)..(131): Homolog of NCBI NO: 28422354 NR Description: Similar to N-acetyltransferase ARD1 homolog (S.
  misc_feature (1)..(131): Homolog of NCBI NO: 30519923 NR Description: DNA segment, Chr 18, Wayne State University 98,
  misc_feature (1)..(131): Homolog of NCBI NO: 39645307 NR Description: Unknown (protein for IMAGE:3922934) [Homo sapiens]
  misc_feature (1)..(131): Homolog of NCBI NO: 33871453 NR Description: MGC10646 protein [Homo sapiens]
  misc_feature (1)..(172): Homolog of NCBI NO: 14550116 NR Description: silencing group B protein [Zea mays]
  misc_feature (1)..(156): Homolog of NCBI NO: 38344807 NR Description: OSJNBa0043L09.27 [Oryza sativa (japonica
  misc_feature (1)..(172): Homolog of NCBI NO: 15240705 NR Description: putative protein
MCLPENYQMKYYLYHILSWPQLLYVAEDYNGRIVGYVLAKMEEESNECHGHITSLAVLRTHRKLGLATKLMTAAQAAMEQVYEAEYVSLHVRRSNRAAFNLYTETLGYKINDVEAKYYADGEDAYDMRKNLKGKQNHHHAHGHHHHHGGGCCSGDAKVVETAQAVDGKAVSK

SEQ ID NO: 21593 - DNA, 650 bp, Arabidopsis thaliana
  misc_feature (1)..(650): Ceres Seq. ID no. 12482746
  misc_feature: MA Experiment ID: 108434 Result: Up-regulated in Transcription
  misc_feature: MA Experiment 108434 PARAMETER Experiment Name: At_Root_Tips_cDNA_P Parameter: Tissue Value: Root Tips
  misc_feature: MA Experiment ID: 108573 Result: Down-regulated in Transcription
  misc_feature: MA Experiment 108573 PARAMETER Experiment Name: At_Drought_cDNA_P Parameter: Timepoint (hr) Value: 6
  misc_feature: MA Experiment 108573 PARAMETER Experiment Name: At_Drought_cDNA_P Parameter: Tissue Value: Aerial
  misc_feature: MA Experiment 108573 PARAMETER Experiment Name: At_Drought_cDNA_P Parameter: Treatment Value: Drought vs. No Drought
agttctctcagtggagaagaagactcgagtcatctgcagaaaagattcccgatcggattggatcatataagattttagggatttggaaaaaatcttgagctatggaggcgaatgcggcggtggacggaacggggaatccgatccctacgtcggcggttttaacagcttcggcgaagcatataggaatcaggtgtatgccggaaaacatggcgttcctgaaatgtaagaagaatgatcctaacccagagaaatgcctcgagaagggacgtgacgtcactcgctgtgttcttggcctgctgaaggatcttcaccagagatgcccaaaggagatggatgcttacgttggatgcatgtattactacaccaacgagtttgagttgtgtcggaaagagcaagaagcttttgagaaagtgtgtccgttgaaatgagaaagtcaagtttttatctgtctcctaataagcaaatgttcattttgactctggagcgttactctaatcactcttccatcgctgcctgcttcttttccttttctggtaatggaagacctttaaaccatgtaatattgtcgtgtttcctttgtccagttctcccgagggaaacgattttggttacttgtgcaattgactctcaagtacagagcttaattagtc

SEQ ID NO: 21594 - protein, 108 aa, Arabidopsis thaliana
  peptide (1)..(108): Ceres Seq. ID no. 12482747
  misc_feature (14)..(107): Homolog of NCBI NO: 33943531 NR Description: putative NADH:ubiquinone oxidoreductase 12.5 kDa
  misc_feature (16)..(103): Homolog of NCBI NO: 40747025 NR Description: hypothetical protein AN1063.2 [Aspergillus
  misc_feature (16)..(107): Homolog of NCBI NO: 21312012 NR Description: RIKEN cDNA 0610033L03 [Mus musculus]
  misc_feature (16)..(107): Homolog of NCBI NO: 28461275 NR Description: NADH dehydrogenase (ubiquinone) 1 alpha
  misc_feature (16)..(107): Homolog of NCBI NO: 33086512 NR Description: Aa2-258 [Rattus norvegicus]
  misc_feature (16)..(107): Homolog of NCBI NO: 27706932 NR Description: similar to RIKEN cDNA 0610033L03
  misc_feature (16)..(107): Homolog of NCBI NO: 37589679 NR Description: Unknown (protein for MGC:73139) [Danio rerio]
  misc_feature (16)..(107): Homolog of NCBI NO: 7657369 NR Description: NADH dehydrogenase (ubiquinone) 1 alpha
  misc_feature (4)..(108): Homolog of NCBI NO: 15239564 NR Description: NADH:ubiquinone oxidoreductase - like protein
  misc_feature (1)..(108): Homolog of NCBI NO: 18397530 NR Description: expressed protein
MEANAAVDGTGNPIPTSAVLTASAKHIGIRCMPENMAFLKCKKNDPNPEKCLEKGRDVTRCVLGLLKDLHQRCPKEMDAYVGCMYYYTNEFELCRKEQEAFEKVCPLK

SEQ ID NO: 21595 - protein, 77 aa, Arabidopsis thaliana
  peptide (1)..(77): Ceres Seq. ID no. 12482748
  misc_feature (1)..(76): Homolog of NCBI NO: 33943531 NR Description: putative NADH:ubiquinone oxidoreductase 12.5 kDa
  misc_feature (1)..(72): Homolog of NCBI NO: 40747025 NR Description: hypothetical protein AN1063.2 [Aspergillus
  misc_feature (1)..(76): Homolog of NCBI NO: 21312012 NR Description: RIKEN cDNA 0610033L03 [Mus musculus]
  misc_feature (1)..(76): Homolog of NCBI NO: 28461275 NR Description: NADH dehydrogenase (ubiquinone) 1 alpha
  misc_feature (1)..(76): Homolog of NCBI NO: 33086512 NR Description: Aa2-258 [Rattus norvegicus]
  misc_feature (1)..(76): Homolog of NCBI NO: 27706932 NR Description: similar to RIKEN cDNA 0610033L03
  misc_feature (1)..(76): Homolog of NCBI NO: 37589679 NR Description: Unknown (protein for MGC:73139) [Danio rerio]
  misc_feature (1)..(76): Homolog of NCBI NO: 7657369 NR Description: NADH dehydrogenase (ubiquinone) 1 alpha
  misc_feature (1)..(77): Homolog of NCBI NO: 15239564 NR Description: NADH:ubiquinone oxidoreductase - like protein
  misc_feature (1)..(77): Homolog of NCBI NO: 18397530 NR Description: expressed protein
MPENMAFLKCKKNDPNPEKCLEKGRDVTRCVLGLLKDLHQRCPKEMDAYVGCMYYYTNEFELCRKEQEAFEKVCPLK

SEQ ID NO: 21596 - protein, 75 aa, Arabidopsis thaliana
  peptide (1)..(75): Ceres Seq. ID no. 12482749
MRKSSFYLSPNKQMFILTLERYSNHSSIAACFFSFSGNGRPLNHVILSCFLCPVLPRETILVTCAIDSQVQSLIS

SEQ ID NO: 21597 - DNA, 933 bp, Arabidopsis thaliana
  misc_feature (1)..(933): Ceres Seq. ID no. 12370043
  misc_feature: MA Experiment ID: 108461 Result: Up-regulated in Transcription
  misc_feature: MA Experiment 108461 PARAMETER Experiment Name: At_Germinating_Seeds_cDNA_P Parameter: Age (day) Value: 1 vs. 0
  misc_feature: MA Experiment 108461 PARAMETER Experiment Name: At_Germinating_Seeds_cDNA_P Parameter: Tissue Value: Germinating Seeds
  misc_feature: MA Experiment ID: 108462 Result: Up-regulated in Transcription
  misc_feature: MA Experiment 108462 PARAMETER Experiment Name: At_Germinating_Seeds_cDNA_P Parameter: Age (day) Value: 2 vs. 0
  misc_feature: MA Experiment 108462 PARAMETER Experiment Name: At_Germinating_Seeds_cDNA_P Parameter: Tissue Value: Germinating Seeds
  misc_feature: MA Experiment ID: 108463 Result: Up-regulated in Transcription
  misc_feature: MA Experiment 108463 PARAMETER Experiment Name: At_Germinating_Seeds_cDNA_P Parameter: Age (day) Value: 3 vs. 0
  misc_feature: MA Experiment 108463 PARAMETER Experiment Name: At_Germinating_Seeds_cDNA_P Parameter: Tissue Value: Germinating Seeds
  misc_feature: MA Experiment ID: 108464 Result: Up-regulated in Transcription
  misc_feature: MA Experiment 108464 PARAMETER Experiment Name: At_Germinating_Seeds_cDNA_P Parameter: Age (day) Value: 4 vs. 0
  misc_feature: MA Experiment 108464 PARAMETER Experiment Name: At_Germinating_Seeds_cDNA_P Parameter: Tissue Value: Germinating Seeds
  misc_feature: MA Experiment ID: 108569 Result: Up-regulated in Transcription
  misc_feature: MA Experiment 108569 PARAMETER Experiment Name: At_0.001%_MeJA__cDNA_P Parameter: Timepoint (hr) Value: 6
  misc_feature: MA Experiment 108569 PARAMETER Experiment Name: At_0.001%_MeJA__cDNA_P Parameter: Tissue Value: Aerial
  misc_feature: MA Experiment 108569 PARAMETER Experiment Name: At_0.001%_MeJA__cDNA_P Parameter: Treatment Value: 0.001% MeJA vs. No Treatment
  misc_feature: MA Experiment ID: 108572 Result: Up-regulated in Transcription
  misc_feature: MA Experiment 108572 PARAMETER Experiment Name: At_Drought_cDNA_P Parameter: Timepoint (hr) Value: 1
  misc_feature: MA Experiment 108572 PARAMETER Experiment Name: At_Drought_cDNA_P Parameter: Tissue Value: Aerial
  misc_feature: MA Experiment 108572 PARAMETER Experiment Name: At_Drought_cDNA_P Parameter: Treatment Value: Drought vs. No Drought
  misc_feature: MA Experiment ID: 108605 Result: Up-regulated in Transcription
  misc_feature: MA Experiment 108605 PARAMETER Experiment Name: At_100uM_ABA_cDNA_P Parameter: Timepoint (hr) Value: 6
  misc_feature: MA Experiment 108605 PARAMETER Experiment Name: At_100uM_ABA_cDNA_P Parameter: Tissue Value: Aerial
  misc_feature: MA Experiment 108605 PARAMETER Experiment Name: At_100uM_ABA_cDNA_P Parameter: Treatment Value: 100uM ABA vs. No Treatment
  misc_feature: MA Experiment ID: 108607 Result: Up-regulated in Transcription
  misc_feature: MA Experiment 108607 PARAMETER Experiment Name: At_100uM_ABA_cDNA_P Parameter: Timepoint (hr) Value: 4
  misc_feature: MA Experiment 108607 PARAMETER Experiment Name: At_100uM_ABA_cDNA_P Parameter: Tissue Value: Aerial
  misc_feature: MA Experiment 108607 PARAMETER Experiment Name: At_100uM_ABA_cDNA_P Parameter: Treatment Value: 100uM ABA vs. No Treatment
  misc_feature: MA Experiment ID: 108609 Result: Up-regulated in Transcription
  misc_feature: MA Experiment 108609 PARAMETER Experiment Name: At_100uM_ABA_cDNA_P Parameter: Timepoint (hr) Value: 24
  misc_feature: MA Experiment 108609 PARAMETER Experiment Name: At_100uM_ABA_cDNA_P Parameter: Tissue Value: Aerial
  misc_feature: MA Experiment 108609 PARAMETER Experiment Name: At_100uM_ABA_cDNA_P Parameter: Treatment Value: 100uM ABA vs. No Treatment
  misc_feature: MA Experiment ID: 20000069 Result: Up-regulated in Transcription
  misc_feature: MA Experiment 20000069 PARAMETER Experiment Name: At_100uM_ABA_Mutants_cDNA_P Parameter: Plant Line Value: CS23
  misc_feature: MA Experiment 20000069 PARAMETER Experiment Name: At_100uM_ABA_Mutants_cDNA_P Parameter: Timepoint (hr) Value: 6
  misc_feature: MA Experiment 20000069 PARAMETER Experiment Name: At_100uM_ABA_Mutants_cDNA_P Parameter: Tissue Value: Aerial
  misc_feature: MA Experiment 20000069 PARAMETER Experiment Name: At_100uM_ABA_Mutants_cDNA_P Parameter: Treatment Value: 100uM ABA vs. No Treatment
  misc_feature: MA Experiment ID: 20000070 Result: Up-regulated in Transcription
  misc_feature: MA Experiment 20000070 PARAMETER Experiment Name: At_100uM_ABA_Mutants_cDNA_P Parameter: Plant Line Value: CS24
  misc_feature: MA Experiment 20000070 PARAMETER Experiment Name: At_100uM_ABA_Mutants_cDNA_P Parameter: Timepoint (hr) Value: 6
  misc_feature: MA Experiment 20000070 PARAMETER Experiment Name: At_100uM_ABA_Mutants_cDNA_P Parameter: Tissue Value: Aerial
  misc_feature: MA Experiment 20000070 PARAMETER Experiment Name: At_100uM_ABA_Mutants_cDNA_P Parameter: Treatment Value: 100uM ABA vs. No Treatment
  misc_feature: MA Experiment ID: 20000071 Result: Up-regulated in Transcription
  misc_feature: MA Experiment 20000071 PARAMETER Experiment Name: At_100uM_ABA_Mutants_cDNA_P Parameter: Plant Line Value: CS8104
  misc_feature: MA Experiment 20000071 PARAMETER Experiment Name: At_100uM_ABA_Mutants_cDNA_P Parameter: Timepoint (hr) Value: 6
  misc_feature: MA Experiment 20000071 PARAMETER Experiment Name: At_100uM_ABA_Mutants_cDNA_P Parameter: Tissue Value: Aerial
  misc_feature: MA Experiment 20000071 PARAMETER Experiment Name: At_100uM_ABA_Mutants_cDNA_P Parameter: Treatment Value: 100uM ABA vs. No Treatment
  misc_feature: MA Experiment ID: 20000072 Result: Up-regulated in Transcription
  misc_feature: MA Experiment 20000072 PARAMETER Experiment Name: At_100uM_ABA_Mutants_cDNA_P Parameter: Plant Line Value: CS8105
  misc_feature: MA Experiment 20000072 PARAMETER Experiment Name: At_100uM_ABA_Mutants_cDNA_P Parameter: Timepoint (hr) Value: 6
  misc_feature: MA Experiment 20000072 PARAMETER Experiment Name: At_100uM_ABA_Mutants_cDNA_P Parameter: Tissue Value: Aerial
  misc_feature: MA Experiment 20000072 PARAMETER Experiment Name: At_100uM_ABA_Mutants_cDNA_P Parameter: Treatment Value: 100uM ABA vs. No Treatment
  misc_feature: MA Experiment ID: 20000087 Result: Up-regulated in Transcription
  misc_feature: MA Experiment 20000087 PARAMETER Experiment Name: At_100uM_ABA_Mutants_cDNA_P Parameter: Plant Line Value: WS
  misc_feature: MA Experiment 20000087 PARAMETER Experiment Name: At_100uM_ABA_Mutants_cDNA_P Parameter: Timepoint (hr) Value: 6
  misc_feature: MA Experiment 20000087 PARAMETER Experiment Name: At_100uM_ABA_Mutants_cDNA_P Parameter: Tissue Value: Aerial
  misc_feature: MA Experiment 20000087 PARAMETER Experiment Name: At_100uM_ABA_Mutants_cDNA_P Parameter: Treatment Value: 100uM ABA vs. No Treatment
  misc_feature: MA Experiment ID: 20000088 Result: Up-regulated in Transcription
  misc_feature: MA Experiment 20000088 PARAMETER Experiment Name: At_100uM_ABA_Mutants_cDNA_P Parameter: Plant Line Value: Landsberg
  misc_feature: MA Experiment 20000088 PARAMETER Experiment Name: At_100uM_ABA_Mutants_cDNA_P Parameter: Timepoint (hr) Value: 6
  misc_feature: MA Experiment 20000088 PARAMETER Experiment Name: At_100uM_ABA_Mutants_cDNA_P Parameter: Tissue Value: Aerial
  misc_feature: MA Experiment 20000088 PARAMETER Experiment Name: At_100uM_ABA_Mutants_cDNA_P Parameter: Treatment Value: 100uM ABA vs. No Treatment
  misc_feature: MA Experiment ID: 20000227 Result: Down-regulated in Transcription
  misc_feature: MA Experiment 20000227 PARAMETER Experiment Name: At_Root-Tips-vs-Tops_P Parameter: Tissue Value: Root Tips vs. Root Tops
  misc_feature: MA Experiment ID: 20000265 Result: Up-regulated in Transcription
  misc_feature: MA Experiment 20000265 PARAMETER Experiment Name: At_Open_Flower_P Parameter: Age (day) Value: 21
  misc_feature: MA Experiment 20000265 PARAMETER Experiment Name: At_Open_Flower_P Parameter: Plant Line Value: WS
  misc_feature: MA Experiment 20000265 PARAMETER Experiment Name: At_Open_Flower_P Parameter: Tissue Value: Closed Flower vs. Whole Plant
  misc_feature: MA Experiment ID: 20000286 Result: Up-regulated in Transcription
  misc_feature: MA Experiment 20000286 PARAMETER Experiment Name: At_Open_Flower_P Parameter: Age (day) Value: 21
  misc_feature: MA Experiment 20000286 PARAMETER Experiment Name: At_Open_Flower_P Parameter: Plant Line Value: WS
  misc_feature: MA Experiment 20000286 PARAMETER Experiment Name: At_Open_Flower_P Parameter: Tissue Value: Half Open vs. Whole Plant
  misc_feature: MA Experiment ID: 20000794 Result: Up-regulated in Transcription
  misc_feature: MA Experiment 20000794 PARAMETER Experiment Name: At_Petals_P Parameter: Age (day) Value: 23-25 days
  misc_feature: MA Experiment 20000794 PARAMETER Experiment Name: At_Petals_P Parameter: Plant Line Value: WS
  misc_feature: MA Experiment 20000794 PARAMETER Experiment Name: At_Petals_P Parameter: Tissue Value: Petals vs. Whole plant
  misc_feature: MA Experiment ID: 20001554 Result: Up-regulated in Transcription
  misc_feature: MA Experiment 20001554 PARAMETER Experiment Name: At_Drought_Soil_Dry_P Parameter: Age (day) Value: 21
  misc_feature: MA Experiment 20001554 PARAMETER Experiment Name: At_Drought_Soil_Dry_P Parameter: Organism Value: A. thaliana
  misc_feature: MA Experiment 20001554 PARAMETER Experiment Name: At_Drought_Soil_Dry_P Parameter: Plant Line Value: WS
  misc_feature: MA Experiment 20001554 PARAMETER Experiment Name: At_Drought_Soil_Dry_P Parameter: Post Timepoint (hr) Value: None
  misc_feature: MA Experiment 20001554 PARAMETER Experiment Name: At_Drought_Soil_Dry_P Parameter: Post-Treatment Value: None
  misc_feature: MA Experiment 20001554 PARAMETER Experiment Name: At_Drought_Soil_Dry_P Parameter: Timepoint (day) Value: 7
  misc_feature: MA Experiment 20001554 PARAMETER Experiment Name: At_Drought_Soil_Dry_P Parameter: Treatment Value: Drought vs. No Drought
  misc_feature: MA Experiment ID: 20001555 Result: Up-regulated in Transcription
  misc_feature: MA Experiment 20001555 PARAMETER Experiment Name: At_Drought_Soil_Dry_P Parameter: Age (day) Value: 24
  misc_feature: MA Experiment 20001555 PARAMETER Experiment Name: At_Drought_Soil_Dry_P Parameter: Organism Value: A. thaliana
  misc_feature: MA Experiment 20001555 PARAMETER Experiment Name: At_Drought_Soil_Dry_P Parameter: Plant Line Value: WS
  misc_feature: MA Experiment 20001555 PARAMETER Experiment Name: At_Drought_Soil_Dry_P Parameter: Post Timepoint (hr) Value: None
  misc_feature: MA Experiment 20001555 PARAMETER Experiment Name: At_Drought_Soil_Dry_P Parameter: Post-Treatment Value: None
  misc_feature: MA Experiment 20001555 PARAMETER Experiment Name: At_Drought_Soil_Dry_P Parameter: Timepoint (day) Value: 10
  misc_feature: MA Experiment 20001555 PARAMETER Experiment Name: At_Drought_Soil_Dry_P Parameter: Treatment Value: Drought vs. No Drought
attggccatcgaacacaccacacagagaaaacaatatgagcaatcatcaaactcaggtgttgaagctattggagccatggtgtgaacttaaagacaaagtggttcttgtgacaggagcttcctctggtattggaagagagatctgtcttgatcttgccaaagctggttgccaggttattgcagcagctcgtcgtgttgatcgactcaactctctctgctctgaaatcaacagcttcagttcaactggaatccaagccgcagctcttgagttagacgtttcatcagacgcagccaccattcaaaaagcggtcagggaagcttgggacatctttggaaagatcgatgcattgatcaacaatgctggaatcagaggcaatgtcaagtcgagtttggatttgtcagaggacgaatgggacaacgtcttcaagaccaacttaaagggtccttggttagtatccaaacatgtttgtatgttaatgcgtgacgctaaacgaggtggctcggtgataaacatctcatcgatcgccgggatccggggtatgttgcccggtggacttgcttatgcttgttccaaaggcggtgttgacaccatgtcaaggatgatggcacttgagttaggtgttcataagatcagagtgaactcgatcgcaccggggcttttcaagtcagagatcacacaaggtcttatgcaaaaggagtggctcaagaatgttaccgagaggactgtgccgttaaaggtgcaacagaccgttgatccagggcttacttctctggttcgctatctcattcatgactcttctcaatatatatccgggaatacatacattgttgattccggtgctacattgcccggtgtgcctatcttttcatctctctgaaaatcgaaccttataatatcttatcttgtgcaataataagtgaatacatttaccc

SEQ ID NO: 21598 - protein, 291 aa, Arabidopsis thaliana
  peptide (1)..(291): Ceres Seq. ID no. 12370044
  misc_feature (25)..(291): Homolog of NCBI NO: 28411870 NR Description: putative 3-ketoacyl-acyl carrier protein
  misc_feature (12)..(291): Homolog of NCBI NO: 23451057 NR Description: putative short-chain type alcohol dehydrogenase
  misc_feature (12)..(291): Homolog of NCBI NO: 13549123 NR Description: putative short-chain type alcohol dehydrogenase
  misc_feature (3)..(291): Homolog of NCBI NO: 18398539 NR Description: similar to oxidoreductase -like protein; protein
  misc_feature (16)..(291): Homolog of NCBI NO: 15222406 NR Description: reductase, putative; protein id: At1g63380.1
  misc_feature (16)..(291): Homolog of NCBI NO: 15221517 NR Description: similar to glucose 1-dehydrogenase (AB000617)
  misc_feature (12)..(291): Homolog of NCBI NO: 15231362 NR Description: dehydrogenase -like protein; protein id:
  misc_feature (19)..(291): Homolog of NCBI NO: 15233243 NR Description: beta-ketoacyl-ACP reductase - like protein
  misc_feature (19)..(291): Homolog of NCBI NO: 11250516 NR Description: oxidoreductase-like protein - Arabidopsis
  misc_feature (12)..(291): Homolog of NCBI NO: 18410245 NR Description: oxidoreductase -like protein
WPSNTPHRENNMSNHQTQVLKLLEPWCELKDKVVLVTGASSGIGREICLDLAKAGCQVIAAARRVDRLNSLCSEINSFSSTGIQAAALELDVSSDAATIQKAVREAWDIFGKIDALINNAGIRGNVKSSLDLSEDEWDNVFKTNLKGPWLVSKHVCMLMRDAKRGGSVINISSIAGIRGMLPGGLAYACSKGGVDTMSRMMALELGVHKIRVNSIAPGLFKSEITQGLMQKEWLKNVTERTVPLKVQQTVDPGLTSLVRYLIHDSSQYISGNTYIVDSGATLPGVPIFSSL

SEQ ID NO: 21599 - protein, 280 aa, Arabidopsis thaliana
  peptide (1)..(280): Ceres Seq. ID no. 12370045
  misc_feature (14)..(280): Homolog of NCBI NO: 28411870 NR Description: putative 3-ketoacyl-acyl carrier protein
  misc_feature (1)..(280): Homolog of NCBI NO: 23451057 NR Description: putative short-chain type alcohol dehydrogenase
  misc_feature (1)..(280): Homolog of NCBI NO: 13549123 NR Description: putative short-chain type alcohol dehydrogenase
  misc_feature (1)..(280): Homolog of NCBI NO: 18398539 NR Description: similar to oxidoreductase -like protein; protein
  misc_feature (5)..(280): Homolog of NCBI NO: 15222406 NR Description: reductase, putative; protein id: At1g63380.1
  misc_feature (5)..(280): Homolog of NCBI NO: 15221517 NR Description: similar to glucose 1-dehydrogenase (AB000617)
  misc_feature (1)..(280): Homolog of NCBI NO: 15231362 NR Description: dehydrogenase -like protein; protein id:
  misc_feature (8)..(280): Homolog of NCBI NO: 15233243 NR Description: beta-ketoacyl-ACP reductase - like protein
  misc_feature (8)..(280): Homolog of NCBI NO: 11250516 NR Description: oxidoreductase-like protein - Arabidopsis
  misc_feature (1)..(280): Homolog of NCBI NO: 18410245 NR Description: oxidoreductase -like protein
MSNHQTQVLKLLEPWCELKDKVVLVTGASSGIGREICLDLAKAGCQVIAAARRVDRLNSLCSEINSFSSTGIQAAALELDVSSDAATIQKAVREAWDIFGKIDALINNAGIRGNVKSSLDLSEDEWDNVFKTNLKGPWLVSKHVCMLMRDAKRGGSVINISSIAGIRGMLPGGLAYACSKGGVDTMSRMMALELGVHKIRVNSIAPGLFKSEITQGLMQKEWLKNVTERTVPLKVQQTVDPGLTSLVRYLIHDSSQYISGNTYIVDSGATLPGVPIFSSL

SEQ ID NO: 21600 - DNA, 1127 bp, Arabidopsis thaliana
  misc_feature (1)..(1127): Ceres Seq. ID no. 12332941
  misc_feature: MA Experiment ID: 108433 Result: Up-regulated in Transcription
  misc_feature: MA Experiment 108433 PARAMETER Experiment Name: At_rhl_Mutant2_cDNA_P Parameter: Age (day) Value: 7
  misc_feature: MA Experiment 108433 PARAMETER Experiment Name: At_rhl_Mutant2_cDNA_P Parameter: Organism Value: A. thaliana
  misc_feature: MA Experiment 108433 PARAMETER Experiment Name: At_rhl_Mutant2_cDNA_P Parameter: Plant Line Value: rhl Mutant vs. wt landsburg
  misc_feature: MA Experiment 108433 PARAMETER Experiment Name: At_rhl_Mutant2_cDNA_P Parameter: Tissue Value: Roots
  misc_feature: MA Experiment ID: 108434 Result: Down-regulated in Transcription
  misc_feature: MA Experiment 108434 PARAMETER Experiment Name: At_Root_Tips_cDNA_P Parameter: Tissue Value: Root Tips
  misc_feature: MA Experiment ID: 108464 Result: Up-regulated in Transcription
  misc_feature: MA Experiment 108464 PARAMETER Experiment Name: At_Germinating_Seeds_cDNA_P Parameter: Age (day) Value: 4 vs. 0
  misc_feature: MA Experiment 108464 PARAMETER Experiment Name: At_Germinating_Seeds_cDNA_P Parameter: Tissue Value: Germinating Seeds
  misc_feature: MA Experiment ID: 108585 Result: Up-regulated in Transcription
  misc_feature: MA Experiment 108585 PARAMETER Experiment Name: At_5mM_NaNP_cDNA_P Parameter: Timepoint (hr) Value: 6
  misc_feature: MA Experiment 108585 PARAMETER Experiment Name: At_5mM_NaNP_cDNA_P Parameter: Tissue Value: Aerial
  misc_feature: MA Experiment 108585 PARAMETER Experiment Name: At_5mM_NaNP_cDNA_P Parameter: Treatment Value: null
  misc_feature: MA Experiment ID: 108594 Result: Down-regulated in Transcription
  misc_feature: MA Experiment 108594 PARAMETER Experiment Name: At_Ler-rhl_Root_cDNA_P Parameter: Plant Line Value: null
  misc_feature: MA Experiment ID: 108667 Result: Up-regulated in Transcription
  misc_feature: MA Experiment 108667 PARAMETER Experiment Name: At_2mM_SA_cDNA_P Parameter: Plant Line Value: WS
  misc_feature: MA Experiment 108667 PARAMETER Experiment Name: At_2mM_SA_cDNA_P Parameter: Timepoint (hr) Value: 1
  misc_feature: MA Experiment 108667 PARAMETER Experiment Name: At_2mM_SA_cDNA_P Parameter: Treatment Value: 2mM SA vs. No Treatment
  misc_feature: MA Experiment ID: 20000087 Result: Down-regulated in Transcription
  misc_feature: MA Experiment 20000087 PARAMETER Experiment Name: At_100uM_ABA_Mutants_cDNA_P Parameter: Plant Line Value: WS
  misc_feature: MA Experiment 20000087 PARAMETER Experiment Name: At_100uM_ABA_Mutants_cDNA_P Parameter: Timepoint (hr) Value: 6
  misc_feature: MA Experiment 20000087 PARAMETER Experiment Name: At_100uM_ABA_Mutants_cDNA_P Parameter: Tissue Value: Aerial
  misc_feature: MA Experiment 20000087 PARAMETER Experiment Name: At_100uM_ABA_Mutants_cDNA_P Parameter: Treatment Value: 100uM ABA vs. No Treatment
  misc_feature: MA Experiment ID: 20000090 Result: Down-regulated in Transcription
  misc_feature: MA Experiment ID: 20000093 Result: Down-regulated in Transcription
  misc_feature: MA Experiment 20000093 PARAMETER Experiment Name: At_42deg_Heat_cDNA_P Parameter: Temperature (deg C) Value: 42 vs. 22
  misc_feature: MA Experiment 20000093 PARAMETER Experiment Name: At_42deg_Heat_cDNA_P Parameter: Timepoint (hr) Value: 0.5
  misc_feature: MA Experiment 20000093 PARAMETER Experiment Name: At_42deg_Heat_cDNA_P Parameter: Tissue Value: Aerial
  misc_feature: MA Experiment ID: 20000113 Result: Up-regulated in Transcription
  misc_feature: MA Experiment 20000113 PARAMETER Experiment Name: At_42deg_Heat_cDNA_P Parameter: Temperature (deg C) Value: 42 vs. 22
  misc_feature: MA Experiment 20000113 PARAMETER Experiment Name: At_42deg_Heat_cDNA_P Parameter: Timepoint (hr) Value: 8
  misc_feature: MA Experiment 20000113 PARAMETER Experiment Name: At_42deg_Heat_cDNA_P Parameter: Tissue Value: Aerial
  misc_feature: MA Experiment ID: 20000327 Result: Down-regulated in Transcription
  misc_feature: MA Experiment 20000327 PARAMETER Experiment Name: At_42deg_Heat_Sub_P Parameter: Age (day) Value: 14
  misc_feature: MA Experiment 20000327 PARAMETER Experiment Name: At_42deg_Heat_Sub_P Parameter: Organism Value: A. thaliana
  misc_feature: MA Experiment 20000327 PARAMETER Experiment Name: At_42deg_Heat_Sub_P Parameter: Plant Line Value: WS
  misc_feature: MA Experiment 20000327 PARAMETER Experiment Name: At_42deg_Heat_Sub_P Parameter: Temperature (deg C) Value: 42 vs. 22
  misc_feature: MA Experiment 20000327 PARAMETER Experiment Name: At_42deg_Heat_Sub_P Parameter: Timepoint (hr) Value: 1
  misc_feature: MA Experiment 20000327 PARAMETER Experiment Name: At_42deg_Heat_Sub_P Parameter: Tissue Value: Aerial
  misc_feature: MA Experiment ID: 20000346 Result: Up-regulated in Transcription
  misc_feature: MA Experiment 20000346 PARAMETER Experiment Name: At_2mM_SA_Sub_P Parameter: Age (day) Value: 14
  misc_feature: MA Experiment 20000346 PARAMETER Experiment Name: At_2mM_SA_Sub_P Parameter: Organism Value: A. thaliana
  misc_feature: MA Experiment 20000346 PARAMETER Experiment Name: At_2mM_SA_Sub_P Parameter: Plant Line Value: WS
  misc_feature: MA Experiment 20000346 PARAMETER Experiment Name: At_2mM_SA_Sub_P Parameter: Timepoint (hr) Value: 1
  misc_feature: MA Experiment 20000346 PARAMETER Experiment Name: At_2mM_SA_Sub_P Parameter: Tissue Value: Aerial
  misc_feature: MA Experiment 20000346 PARAMETER Experiment Name: At_2mM_SA_Sub_P Parameter: Treatment Value: 2mM SA vs. No Treatment
  misc_feature: MA Experiment ID: 20000355 Result: Down-regulated in Transcription
  misc_feature: MA Experiment 20000355 PARAMETER Experiment Name: At_Siliques_Sub_P Parameter: Age (day) Value: 21
  misc_feature: MA Experiment 20000355 PARAMETER Experiment Name: At_Siliques_Sub_P Parameter: Organism Value: A. thaliana
  misc_feature: MA Experiment 20000355 PARAMETER Experiment Name: At_Siliques_Sub_P Parameter: Plant Line Value: WS
  misc_feature: MA Experiment 20000355 PARAMETER Experiment Name: At_Siliques_Sub_P Parameter: Tissue Value: Less Than 5mm Siliques vs. Whole Plant
  misc_feature: MA Experiment ID: 20000440 Result: Down-regulated in Transcription
  misc_feature: MA Experiment 20000440 PARAMETER Experiment Name: At_Closed-Flower__Sub_P Parameter: Tissue Value: Closed Flower vs. Whole Plant
aaccattctctcttctcttctttatctcaaactctttcttcttccaaatcataaaccatggcaacatgcatccacacatgccgaaccggtaatacccaagacgatgattcccggttctgttgcatcaataaattcttccgacccggtttctctgtcaaccggaagatccaccacacccaaatcgaagatgacgatgatgtctggatcaagatgctcaaagaagccgaatccgatgttaaacaagaacccattttgtcaaactactactacgcttcgatcacatctcatcgatctttagagtctgctttaggtcacatcctctccgtaaagctcagcaatttaaacctaccaagcaacacactcttcgaactgttcataagcgttttagaagaaagccctgagatcatcgaatccacgaagcaagatcttatagcagtcaaagaaagagacccagcttgtataagctacgttcattgcttcttgggcttcaaaggcttcctcgcttgtcaagctcatcgaatagctcataccctctggaaacagaacagaaaaatcgtagctttattgatccaaaacagagtatcagaatctttcgccgtcgatattcatcccggagcgaagatcggaaaagggattcttttagaccatgcgacgggcgtggttatcggagagacggcggtggttggagacaatgtttcgattctacacggagtgaccttgggaggaacagggaaacagagtggtgatcggcatccgaagattggtgatggtgtgttgattggagctgggagttgtatattggggaatataacaatcggtgagggagctaagattggatcagggtcggtggtggttaaggatgtgccggcgcgtacgacggcggttggaaatccggcgaggttgattggtgggaaagagaatccgagaaaacatgataagattccttgtctgactatggaccagacatcgtatttaaccgagtggtctgattatgtgatttaacacaaatgtgtatttctttctttcttgtaactgatgatgatgaaacaagtcttgtctatttcttaatattttactatgtactaatcaaacaagtcttgaaatcaagctcatcgatctttaagaag

SEQ ID NO: 21601 - protein, 314 aa, Arabidopsis thaliana
  peptide (1)..(314): Ceres Seq. ID no. 12332942
  misc_feature (43)..(314): Homolog of NCBI NO: 38350581 NR Description: serine acetyltransferase [Nicotiana
  misc_feature (34)..(314): Homolog of NCBI NO: 23343583 NR Description: serine acetyltransferase 4 [Nicotiana tabacum]
  misc_feature (1)..(314): Homolog of NCBI NO: 23343581 NR Description: serine acetyltransferase 1 [Nicotiana tabacum]
  misc_feature (46)..(314): Homolog of NCBI NO: 2129731 NR Description: serine O-acetyltransferase (EC 2.3.1.30) satA -
  misc_feature (15)..(314): Homolog of NCBI NO: 1369758 NR Description: serine acetyltransferase
  misc_feature (15)..(314): Homolog of NCBI NO: 15231152 NR Description: serine acetyltransferase (Sat-1)
  misc_feature (15)..(314): Homolog of NCBI NO: 1107505 NR Description: serine O-acetyltransferase [Arabidopsis thaliana]
  misc_feature (15)..(314): Homolog of NCBI NO: 897678 NR Description: serine O-acetyltransferase [Arabidopsis thaliana]
  misc_feature (1)..(314): Homolog of NCBI NO: 15222799 NR Description: serine acetyltransferase
  misc_feature (1)..(314): Homolog of NCBI NO: 2146775 NR Description: serine O-acetyltransferase (EC 2.3.1.30) SAT1
MATCIHTCRTGNTQDDDSRFCCINKFFRPGFSVNRKIHHTQIEDDDDVWIKMLKEAESDVKQEPILSNYYYASITSHRSLESALGHILSVKLSNLNLPSNTLFELFISVLEESPEIIESTKQDLIAVKERDPACISYVHCFLGFKGFLACQAHRIAHTLWKQNRKIVALLIQNRVSESFAVDIHPGAKIGKGILLDHATGVVIGETAVVGDNVSILHGVTLGGTGKQSGDRHPKIGDGVLIGAGSCILGNITIGEGAKIGSGSVVVKDVPARTTAVGNPARLIGGKENPRKHDKIPCLTMDQTSYLTEWSDYVI

SEQ ID NO: 21602 - protein, 263 aa, Arabidopsis thaliana
  peptide (1)..(263): Ceres Seq. ID no. 12332943
  misc_feature (1)..(263): Homolog of NCBI NO: 38350581 NR Description: serine acetyltransferase [Nicotiana
  misc_feature (1)..(263): Homolog of NCBI NO: 23343583 NR Description: serine acetyltransferase 4 [Nicotiana tabacum]
  misc_feature (1)..(263): Homolog of NCBI NO: 23343581 NR Description: serine acetyltransferase 1 [Nicotiana tabacum]
  misc_feature (1)..(263): Homolog of NCBI NO: 2129731 NR Description: serine O-acetyltransferase (EC 2.3.1.30) satA -
  misc_feature (1)..(263): Homolog of NCBI NO: 1369758 NR Description: serine acetyltransferase
  misc_feature (1)..(263): Homolog of NCBI NO: 15231152 NR Description: serine acetyltransferase (Sat-1)
  misc_feature (1)..(263): Homolog of NCBI NO: 1107505 NR Description: serine O-acetyltransferase [Arabidopsis thaliana]
  misc_feature (1)..(263): Homolog of NCBI NO: 897678 NR Description: serine O-acetyltransferase [Arabidopsis thaliana]
  misc_feature (1)..(263): Homolog of NCBI NO: 15222799 NR Description: serine acetyltransferase
  misc_feature (1)..(263): Homolog of NCBI NO: 2146775 NR Description: serine O-acetyltransferase (EC 2.3.1.30) SAT1
MLKEAESDVKQEPILSNYYYASITSHRSLESALGHILSVKLSNLNLPSNTLFELFISVLEESPEIIESTKQDLIAVKERDPACISYVHCFLGFKGFLACQAHRIAHTLWKQNRKIVALLIQNRVSESFAVDIHPGAKIGKGILLDHATGVVIGETAVVGDNVSILHGVTLGGTGKQSGDRHPKIGDGVLIGAGSCILGNITIGEGAKIGSGSVVVKDVPARTTAVGNPARLIGGKENPRKHDKIPCLTMDQTSYLTEWSDYVI

SEQ ID NO: 21603 - DNA, 1210 bp, Arabidopsis thaliana
  misc_feature (1)..(1210): Ceres Seq. ID no. 13492950
  misc_feature: MA Experiment ID: 108434 Result: Down-regulated in Transcription
  misc_feature: MA Experiment 108434 PARAMETER Experiment Name: At_Root_Tips_cDNA_P Parameter: Tissue Value: Root Tips
  misc_feature: MA Experiment ID: 108461 Result: Down-regulated in Transcription
  misc_feature: MA Experiment 108461 PARAMETER Experiment Name: At_Germinating_Seeds_cDNA_P Parameter: Age (day) Value: 1 vs. 0
  misc_feature: MA Experiment 108461 PARAMETER Experiment Name: At_Germinating_Seeds_cDNA_P Parameter: Tissue Value: Germinating Seeds
  misc_feature: MA Experiment ID: 108469 Result: Up-regulated in Transcription
  misc_feature: MA Experiment ID: 108488 Result: Down-regulated in Transcription
  misc_feature: MA Experiment ID: 108573 Result: Up-regulated in Transcription
  misc_feature: MA Experiment 108573 PARAMETER Experiment Name: At_Drought_cDNA_P Parameter: Timepoint (hr) Value: 6
  misc_feature: MA Experiment 108573 PARAMETER Experiment Name: At_Drought_cDNA_P Parameter: Tissue Value: Aerial
  misc_feature: MA Experiment 108573 PARAMETER Experiment Name: At_Drought_cDNA_P Parameter: Treatment Value: Drought vs. No Drought
  misc_feature: MA Experiment ID: 108577 Result: Down-regulated in Transcription
  misc_feature: MA Experiment 108577 PARAMETER Experiment Name: At_42deg_Heat_cDNA_P Parameter: Temperature (deg C) Value: 42 vs. 22
  misc_feature: MA Experiment 108577 PARAMETER Experiment Name: At_42deg_Heat_cDNA_P Parameter: Timepoint (hr) Value: 6
  misc_feature: MA Experiment 108577 PARAMETER Experiment Name: At_42deg_Heat_cDNA_P Parameter: Tissue Value: Aerial
  misc_feature: MA Experiment ID: 108585 Result: Up-regulated in Transcription
  misc_feature: MA Experiment 108585 PARAMETER Experiment Name: At_5mM_NaNP_cDNA_P Parameter: Timepoint (hr) Value: 6
  misc_feature: MA Experiment 108585 PARAMETER Experiment Name: At_5mM_NaNP_cDNA_P Parameter: Tissue Value: Aerial
  misc_feature: MA Experiment 108585 PARAMETER Experiment Name: At_5mM_NaNP_cDNA_P Parameter: Treatment Value: null
  misc_feature: MA Experiment ID: 20000184 Result: Down-regulated in Transcription
  misc_feature: MA Experiment 20000184 PARAMETER Experiment Name: At_Shoots__P Parameter: Age (day) Value: 7
  misc_feature: MA Experiment 20000184 PARAMETER Experiment Name: At_Shoots__P Parameter: Tissue Value: Shoots vs. Whole Plant
  misc_feature: MA Experiment ID: 20000227 Result: Down-regulated in Transcription
  misc_feature: MA Experiment 20000227 PARAMETER Experiment Name: At_Root-Tips-vs-Tops_P Parameter: Tissue Value: Root Tips vs. Root Tops
  misc_feature: MA Experiment ID: 20000234 Result: Down-regulated in Transcription
  misc_feature: MA Experiment 20000234 PARAMETER Experiment Name: At_Siliques_P Parameter: Age (day) Value: 21
  misc_feature: MA Experiment 20000234 PARAMETER Experiment Name: At_Siliques_P Parameter: Organism Value: A. thaliana
  misc_feature: MA Experiment 20000234 PARAMETER Experiment Name: At_Siliques_P Parameter: Plant Line Value: WS
  misc_feature: MA Experiment 20000234 PARAMETER Experiment Name: At_Siliques_P Parameter: Tissue Value: Less Than 5mm Siliques vs. Whole Plant
  misc_feature: MA Experiment ID: 20000235 Result: Down-regulated in Transcription
  misc_feature: MA Experiment 20000235 PARAMETER Experiment Name: At_Siliques_P Parameter: Age (day) Value: 21
  misc_feature: MA Experiment 20000235 PARAMETER Experiment Name: At_Siliques_P Parameter: Organism Value: A. thaliana
  misc_feature: MA Experiment 20000235 PARAMETER Experiment Name: At_Siliques_P Parameter: Plant Line Value: WS
  misc_feature: MA Experiment 20000235 PARAMETER Experiment Name: At_Siliques_P Parameter: Tissue Value: 5-10mm Siliques vs. Whole Plant
  misc_feature: MA Experiment ID: 20000264 Result: Down-regulated in Transcription
  misc_feature: MA Experiment 20000264 PARAMETER Experiment Name: At_Open_Flower_P Parameter: Age (day) Value: 21
  misc_feature: MA Experiment 20000264 PARAMETER Experiment Name: At_Open_Flower_P Parameter: Plant Line Value: WS
  misc_feature: MA Experiment 20000264 PARAMETER Experiment Name: At_Open_Flower_P Parameter: Tissue Value: Open Flower vs. Whole Plant
  misc_feature: MA Experiment ID: 20000265 Result: Down-regulated in Transcription
  misc_feature: MA Experiment 20000265 PARAMETER Experiment Name: At_Open_Flower_P Parameter: Age (day) Value: 21
  misc_feature: MA Experiment 20000265 PARAMETER Experiment Name: At_Open_Flower_P Parameter: Plant Line Value: WS
  misc_feature: MA Experiment 20000265 PARAMETER Experiment Name: At_Open_Flower_P Parameter: Tissue Value: Closed Flower vs. Whole Plant
  misc_feature: MA Experiment ID: 20000286 Result: Down-regulated in Transcription
  misc_feature: MA Experiment 20000286 PARAMETER Experiment Name: At_Open_Flower_P Parameter: Age (day) Value: 21
  misc_feature: MA Experiment 20000286 PARAMETER Experiment Name: At_Open_Flower_P Parameter: Plant Line Value: WS
  misc_feature: MA Experiment 20000286 PARAMETER Experiment Name: At_Open_Flower_P Parameter: Tissue Value: Half Open vs. Whole Plant
  misc_feature: MA Experiment ID: 20000437 Result: Up-regulated in Transcription
  misc_feature: MA Experiment 20000437 PARAMETER Experiment Name: At_Drought_P Parameter: Age (day) Value: 8
  misc_feature: MA Experiment 20000437 PARAMETER Experiment Name: At_Drought_P Parameter: Organism Value: A. thaliana
  misc_feature: MA Experiment 20000437 PARAMETER Experiment Name: At_Drought_P Parameter: Plant Line Value: WS
  misc_feature: MA Experiment 20000437 PARAMETER Experiment Name: At_Drought_P Parameter: Timepoint (hr) Value: 24
  misc_feature: MA Experiment 20000437 PARAMETER Experiment Name: At_Drought_P Parameter: Tissue Value: Whole Plant
  misc_feature: MA Experiment 20000437 PARAMETER Experiment Name: At_Drought_P Parameter: Treatment Value: Drought vs. No Drought
  misc_feature: MA Experiment ID: 20000438 Result: Down-regulated in Transcription
  misc_feature: MA Experiment 20000438 PARAMETER Experiment Name: At_Shoots__P Parameter: Age (day) Value: 14
  misc_feature: MA Experiment 20000438 PARAMETER Experiment Name: At_Shoots__P Parameter: Tissue Value: Shoots vs. Whole Plant
  misc_feature: MA Experiment ID: 20001248 Result: Up-regulated in Transcription
  misc_feature: MA Experiment 20001248 PARAMETER Experiment Name: At_Far-red-induction_P Parameter: Age (day) Value: 7
  misc_feature: MA Experiment 20001248 PARAMETER Experiment Name: At_Far-red-induction_P Parameter: Light Value: Far-red vs. White
  misc_feature: MA Experiment 20001248 PARAMETER Experiment Name: At_Far-red-induction_P Parameter: Organism Value: A. thaliana
  misc_feature: MA Experiment 20001248 PARAMETER Experiment Name: At_Far-red-induction_P Parameter: Plant Line Value: Columbia
  misc_feature: MA Experiment 20001248 PARAMETER Experiment Name: At_Far-red-induction_P Parameter: Timepoint (hr) Value: 4
  misc_feature: MA Experiment 20001248 PARAMETER Experiment Name: At_Far-red-induction_P Parameter: Tissue Value: Whole Plant
ctcttatttactttagtcctctcgaatcccataaagtccacaactctctccttgtagagagagagattttatggcggtggagctcatgactcggaattacatctccggcgtcggagctgatagcttcgccgttcaagaagcagctgcttcaggactcaaaagtatcgaaaatttcatcggtttaatgtctcgtgatagctttaactctgatcagccatcttcttcttccgcctccgcctccgcctccgcctccgcctccgcctccgccgccgcagatcttgaatcagctcgtaacacaacggcggacgcggctgtttcaaagtttaaaagagtcatatctctcttagatcgaactcgaaccggacacgcccggtttagacgtgctccggttcatgttatttctccggttcttttacaagaagaaccaaaaacgacgccgtttcagtctcctcttcctcctccgccgcaaatgatccgaaaaggttcgttttcttcatcgatgaaaacgattgatttctcatctctctcctctgtaacaacggaatcagacaaccagaagaagattcatcatcatcaacgtccctctgaaacggcgccgtttgcgtctcaaactcaaagcctctccacgacggtctcgtctttctcaaaatcaacaaagagaaaatgtaactctgagaatcttctcaccggaaaatgcgcttccgcttcttcctccggtcgttgtcattgctcgaagaaaagaaagataaaacagaggagaataattagggttccggcgataagtgcaaaaatgtccgatgtaccaccggacgattattcatggaggaaatacggacaaaaaccaattaaaggatctccacatccaagaggatattataagtgtagtagcgtaagaggttgtccagcacgtaaacatgttgagagagcagctgatgattcgtccatgttgattgttacttatgaaggagatcataatcattctctctccgccgctgatctcgccggagccgccgttgctgatcttattttggaatcgtcttgaaaagaacaaatctttatttaaggcttttataatataaatttagatccttacttagtgaagtactcaaactatgaatgaaatcaatgtaatcaaaatcaaaaagcttttgctaaatttcgatttgttagttttttggattgttaaattataaattgtgatatattcacc

SEQ ID NO: 21604 - protein, 323 aa, Arabidopsis thaliana
  peptide (1)..(323): Ceres Seq. ID no. 13492951
  misc_feature (245)..(305): Pfam Name: WRKY DNA -binding domain Pfam Description: WRKY DNA -binding domain
  misc_feature (1)..(323): Homolog of NCBI NO: 15227812 NR Description: WRKY family transcription factor [Arabidopsis
  misc_feature (1)..(323): Homolog of NCBI NO: 22329054 NR Description: WRKY family transcription factor [Arabidopsis
  misc_feature (1)..(323): Homolog of NCBI NO: 30689072 NR Description: WRKY family transcription factor [Arabidopsis
  misc_feature (1)..(289): Homolog of NCBI NO: 4680251 NR Description: transcription factor
  misc_feature (17)..(308): Homolog of NCBI NO: 38568048 NR Description: OSJNBa0065J03.18 [Oryza sativa (japonica
  misc_feature (1)..(304): Homolog of NCBI NO: 38175580 NR Description: putative DNA-binding protein NtWRKY3
  misc_feature (122)..(323): Homolog of NCBI NO: 10798760 NR Description: WRKY transcription factor Nt-SubD48 [Nicotiana
  misc_feature (53)..(316): Homolog of NCBI NO: 38346908 NR Description: OSJNBb0015N08.8 [Oryza sativa (japonica
  misc_feature (1)..(307): Homolog of NCBI NO: 7488950 NR Description: DNA-binding protein WRKY3 - parsley
  misc_feature (1)..(313): Homolog of NCBI NO: 4894963 NR Description: DNA-binding protein WRKY3 [Avena sativa]
MAVELMTRNYISGVGADSFAVQEAAASGLKSIENFIGLMSRDSFNSDQPSSSSASASASASASASAAADLESARNTTADAAVSKFKRVISLLDRTRTGHARFRRAPVHVISPVLLQEEPKTTPFQSPLPPPPQMIRKGSFSSSMKTIDFSSLSSVTTESDNQKKIHHHQRPSETAPFASQTQSLSTTVSSFSKSTKRKCNSENLLTGKCASASSSGRCHCSKKRKIKQRRIIRVPAISAKMSDVPPDDYSWRKYGQKPIKGSPHPRGYYKCSSVRGCPARKHVERAADDSSMLIVTYEGDHNHSLSAADLAGAAVADLILESS

SEQ ID NO: 21605 - protein, 318 aa, Arabidopsis thaliana
  peptide (1)..(318): Ceres Seq. ID no. 13492952
  misc_feature (240)..(300): Pfam Name: WRKY DNA -binding domain Pfam Description: WRKY DNA -binding domain
  misc_feature (1)..(318): Homolog of NCBI NO: 22329054 NR Description: WRKY family transcription factor [Arabidopsis
  misc_feature (1)..(318): Homolog of NCBI NO: 30689072 NR Description: WRKY family transcription factor [Arabidopsis
  misc_feature (1)..(284): Homolog of NCBI NO: 4680251 NR Description: transcription factor
  misc_feature (12)..(303): Homolog of NCBI NO: 38568048 NR Description: OSJNBa0065J03.18 [Oryza sativa (japonica
  misc_feature (1)..(299): Homolog of NCBI NO: 38175580 NR Description: putative DNA-binding protein NtWRKY3
  misc_feature (117)..(318): Homolog of NCBI NO: 10798760 NR Description: WRKY transcription factor Nt-SubD48 [Nicotiana
  misc_feature (48)..(311): Homolog of NCBI NO: 38346908 NR Description: OSJNBb0015N08.8 [Oryza sativa (japonica
  misc_feature (1)..(302): Homolog of NCBI NO: 7488950 NR Description: DNA-binding protein WRKY3 - parsley
  misc_feature (1)..(308): Homolog of NCBI NO: 4894963 NR Description: DNA-binding protein WRKY3 [Avena sativa]
  misc_feature (1)..(318): Homolog of NCBI NO: 15227812 NR Description: WRKY family transcription factor [Arabidopsis
MTRNYISGVGADSFAVQEAAASGLKSIENFIGLMSRDSFNSDQPSSSSASASASASASASAAADLESARNTTADAAVSKFKRVISLLDRTRTGHARFRRAPVHVISPVLLQEEPKTTPFQSPLPPPPQMIRKGSFSSSMKTIDFSSLSSVTTESDNQKKIHHHQRPSETAPFASQTQSLSTTVSSFSKSTKRKCNSENLLTGKCASASSSGRCHCSKKRKIKQRRIIRVPAISAKMSDVPPDDYSWRKYGQKPIKGSPHPRGYYKCSSVRGCPARKHVERAADDSSMLIVTYEGDHNHSLSAADLAGAAVADLILESS

SEQ ID NO: 21606 - protein, 285 aa, Arabidopsis thaliana
  peptide (1)..(285): Ceres Seq. ID no. 13492953
  misc_feature (207)..(267): Pfam Name: WRKY DNA -binding domain Pfam Description: WRKY DNA -binding domain
  misc_feature (1)..(285): Homolog of NCBI NO: 22329054 NR Description: WRKY family transcription factor [Arabidopsis
  misc_feature (1)..(285): Homolog of NCBI NO: 30689072 NR Description: WRKY family transcription factor [Arabidopsis
  misc_feature (1)..(251): Homolog of NCBI NO: 4680251 NR Description: transcription factor
  misc_feature (1)..(270): Homolog of NCBI NO: 38568048 NR Description: OSJNBa0065J03.18 [Oryza sativa (japonica
  misc_feature (1)..(266): Homolog of NCBI NO: 38175580 NR Description: putative DNA-binding protein NtWRKY3
  misc_feature (84)..(285): Homolog of NCBI NO: 10798760 NR Description: WRKY transcription factor Nt-SubD48 [Nicotiana
  misc_feature (15)..(278): Homolog of NCBI NO: 38346908 NR Description: OSJNBb0015N08.8 [Oryza sativa (japonica
  misc_feature (1)..(269): Homolog of NCBI NO: 7488950 NR Description: DNA-binding protein WRKY3 - parsley
  misc_feature (1)..(275): Homolog of NCBI NO: 4894963 NR Description: DNA-binding protein WRKY3 [Avena sativa]
  misc_feature (1)..(285): Homolog of NCBI NO: 15227812 NR Description: WRKY family transcription factor [Arabidopsis
MSRDSFNSDQPSSSSASASASASASASAAADLESARNTTADAAVSKFKRVISLLDRTRTGHARFRRAPVHVISPVLLQEEPKTTPFQSPLPPPPQMIRKGSFSSSMKTIDFSSLSSVTTESDNQKKIHHHQRPSETAPFASQTQSLSTTVSSFSKSTKRKCNSENLLTGKCASASSSGRCHCSKKRKIKQRRIIRVPAISAKMSDVPPDDYSWRKYGQKPIKGSPHPRGYYKCSSVRGCPARKHVERAADDSSMLIVTYEGDHNHSLSAADLAGAAVADLILESS

SEQ ID NO: 21607 - DNA, 1039 bp, Arabidopsis thaliana
  misc_feature (1)..(1039): Ceres Seq. ID no. 12348537
  misc_feature: MA Experiment ID: 108488 Result: Down-regulated in Transcription
  misc_feature: MA Experiment ID: 108595 Result: Down-regulated in Transcription
  misc_feature: MA Experiment 108595 PARAMETER Experiment Name: At_Ler-pi_Ovule_cDNA_P Parameter: Plant Line Value: null
  misc_feature: MA Experiment ID: 20000224 Result: Down-regulated in Transcription
atatcatctcctgctaaaagcctaaaaagctaaaactagtcgtgactcgtcgtcgtctgatattaccagattcctgagaatttgagcctaatccttcatcaccaagctaagtctcaagatctgattgtggttgtggttgacttcttcttcaaaggtttcacgagtacaataatgagtcaaaagggtttgatatatagctttgttgctaaaggaacagttgttctagcagagcatactccttattcaggaaactttagcaccattgctgttcaatgtctgcagaagctacccacaaatagcagcaagtatacttactcttgcgatggtcatactttcaatttccttgttgacaatggctttgtgtttctagtggttgctgatgagtccaccggaagaagtgttcctttcgtgtttctcgaacgggtcaaggaagactttaagaagcggtatgaagcgagtataaagaatgatgagcgacatcctcttgcggatgaggacgaagatgatgatttgtttggagatcggtttagcgttgcatacaatcttgacagggagttcgggcccatactaaaggagcatatgcagtattgtatgagccatccagaagagatgagcaaactttctaagttgaaggcccaaataactgaggtcaaggggatcatgatggacaacattgagaaggttctggacagaggagagaagatcgaacttctggttgacaaaaccgaaaacctacagttccaggcagatagcttccagagacaaggaaggcagttaagaaggaagatgtggctacagagtctgcagatgaagctgatggtggctggtgctgttttctcttttattctcatcgtttgggttgttgcttgtggaggtttcaaatgctcatcatgatgtttcgcttcgtttgtatctgttttaacacttaaattgcatgctcatgtttgtacatggaagaacttataataacatatcatcatatcatcatcatctcccacatgctgtgatgctatatatataaaaaaatgtttttgttttc

SEQ ID NO: 21608 - protein, 240 aa, Arabidopsis thaliana
  peptide (1)..(240): Ceres Seq. ID no. 12348538
  misc_feature (146)..(234): Pfam Name: Synaptobrevin Pfam Description: Synaptobrevin
  misc_feature (122)..(238): Homolog of NCBI NO: 15220943 NR Description: synaptobrevin 7B, putative; protein id:
  misc_feature (1)..(93): Homolog of NCBI NO: 29150380 NR Description: synaptobrevin-like protein
  misc_feature (104)..(238): Homolog of NCBI NO: 29150380 NR Description: synaptobrevin-like protein
  misc_feature (1)..(93): Homolog of NCBI NO: 15220315 NR Description: synaptobrevin 7B, putative; protein id:
  misc_feature (122)..(239): Homolog of NCBI NO: 15220315 NR Description: synaptobrevin 7B, putative; protein id:
  misc_feature (1)..(93): Homolog of NCBI NO: 27805753 NR Description: Vesicle-associated membrane protein 725
  misc_feature (122)..(239): Homolog of NCBI NO: 27805753 NR Description: Vesicle-associated membrane protein 725
  misc_feature (1)..(93): Homolog of NCBI NO: 30685375 NR Description: synaptobrevin -related [Arabidopsis thaliana]
  misc_feature (122)..(239): Homolog of NCBI NO: 30685375 NR Description: synaptobrevin -related [Arabidopsis thaliana]
  misc_feature (1)..(240): Homolog of NCBI NO: 15232475 NR Description: synaptobrevin -like protein; protein id:
MSQKGLIYSFVAKGTVVLAEHTPYSGNFSTIAVQCLQKLPTNSSKYTYSCDGHTFNFLVDNGFVFLVVADESTGRSVPFVFLERVKEDFKKRYEASIKNDERHPLADEDEDDDLFGDRFSVAYNLDREFGPILKEHMQYCMSHPEEMSKLSKLKAQITEVKGIMMDNIEKVLDRGEKIELLVDKTENLQFQADSFQRQGRQLRRKMWLQSLQMKLMVAGAVFSFILIVWVVACGGFKCSS

SEQ ID NO: 21609 - DNA, 1097 bp, Arabidopsis thaliana
  misc_feature (1)..(1097): Ceres Seq. ID no. 12340203
  misc_feature: MA Experiment ID: 108434 Result: Down-regulated in Transcription
  misc_feature: MA Experiment 108434 PARAMETER Experiment Name: At_Root_Tips_cDNA_P Parameter: Tissue Value: Root Tips
  misc_feature: MA Experiment ID: 108435 Result: Down-regulated in Transcription
  misc_feature: MA Experiment 108435 PARAMETER Experiment Name: At_stm_Mutants_cDNA_P Parameter: Plant Line Value: wt Landsburg vs stm
  misc_feature: MA Experiment 108435 PARAMETER Experiment Name: At_stm_Mutants_cDNA_P Parameter: Tissue Value: Shoot Apical Meristem Region
  misc_feature: MA Experiment ID: 108488 Result: Up-regulated in Transcription
  misc_feature: MA Experiment ID: 108595 Result: Down-regulated in Transcription
  misc_feature: MA Experiment 108595 PARAMETER Experiment Name: At_Ler-pi_Ovule_cDNA_P Parameter: Plant Line Value: null
  misc_feature: MA Experiment ID: 20000069 Result: Down-regulated in Transcription
  misc_feature: MA Experiment 20000069 PARAMETER Experiment Name: At_100uM_ABA_Mutants_cDNA_P Parameter: Plant Line Value: CS23
  misc_feature: MA Experiment 20000069 PARAMETER Experiment Name: At_100uM_ABA_Mutants_cDNA_P Parameter: Timepoint (hr) Value: 6
  misc_feature: MA Experiment 20000069 PARAMETER Experiment Name: At_100uM_ABA_Mutants_cDNA_P Parameter: Tissue Value: Aerial
  misc_feature: MA Experiment 20000069 PARAMETER Experiment Name: At_100uM_ABA_Mutants_cDNA_P Parameter: Treatment Value: 100uM ABA vs. No Treatment
  misc_feature: MA Experiment ID: 20000070 Result: Down-regulated in Transcription
  misc_feature: MA Experiment 20000070 PARAMETER Experiment Name: At_100uM_ABA_Mutants_cDNA_P Parameter: Plant Line Value: CS24
  misc_feature: MA Experiment 20000070 PARAMETER Experiment Name: At_100uM_ABA_Mutants_cDNA_P Parameter: Timepoint (hr) Value: 6
  misc_feature: MA Experiment 20000070 PARAMETER Experiment Name: At_100uM_ABA_Mutants_cDNA_P Parameter: Tissue Value: Aerial
  misc_feature: MA Experiment 20000070 PARAMETER Experiment Name: At_100uM_ABA_Mutants_cDNA_P Parameter: Treatment Value: 100uM ABA vs. No Treatment
  misc_feature: MA Experiment ID: 20000071 Result: Down-regulated in Transcription
  misc_feature: MA Experiment 20000071 PARAMETER Experiment Name: At_100uM_ABA_Mutants_cDNA_P Parameter: Plant Line Value: CS8104
  misc_feature: MA Experiment 20000071 PARAMETER Experiment Name: At_100uM_ABA_Mutants_cDNA_P Parameter: Timepoint (hr) Value: 6
  misc_feature: MA Experiment 20000071 PARAMETER Experiment Name: At_100uM_ABA_Mutants_cDNA_P Parameter: Tissue Value: Aerial
  misc_feature: MA Experiment 20000071 PARAMETER Experiment Name: At_100uM_ABA_Mutants_cDNA_P Parameter: Treatment Value: 100uM ABA vs. No Treatment
  misc_feature: MA Experiment ID: 20000072 Result: Down-regulated in Transcription
  misc_feature: MA Experiment 20000072 PARAMETER Experiment Name: At_100uM_ABA_Mutants_cDNA_P Parameter: Plant Line Value: CS8105
  misc_feature: MA Experiment 20000072 PARAMETER Experiment Name: At_100uM_ABA_Mutants_cDNA_P Parameter: Timepoint (hr) Value: 6
  misc_feature: MA Experiment 20000072 PARAMETER Experiment Name: At_100uM_ABA_Mutants_cDNA_P Parameter: Tissue Value: Aerial
  misc_feature: MA Experiment 20000072 PARAMETER Experiment Name: At_100uM_ABA_Mutants_cDNA_P Parameter: Treatment Value: 100uM ABA vs. No Treatment
  misc_feature: MA Experiment ID: 20000086 Result: Down-regulated in Transcription
  misc_feature: MA Experiment 20000086 PARAMETER Experiment Name: At_100uM_ABA_Mutants_cDNA_P Parameter: Plant Line Value: CS22
  misc_feature: MA Experiment 20000086 PARAMETER Experiment Name: At_100uM_ABA_Mutants_cDNA_P Parameter: Timepoint (hr) Value: 6
  misc_feature: MA Experiment 20000086 PARAMETER Experiment Name: At_100uM_ABA_Mutants_cDNA_P Parameter: Tissue Value: Aerial
  misc_feature: MA Experiment 20000086 PARAMETER Experiment Name: At_100uM_ABA_Mutants_cDNA_P Parameter: Treatment Value: 100uM ABA vs. No Treatment
  misc_feature: MA Experiment ID: 20000087 Result: Down-regulated in Transcription
  misc_feature: MA Experiment 20000087 PARAMETER Experiment Name: At_100uM_ABA_Mutants_cDNA_P Parameter: Plant Line Value: WS
  misc_feature: MA Experiment 20000087 PARAMETER Experiment Name: At_100uM_ABA_Mutants_cDNA_P Parameter: Timepoint (hr) Value: 6
  misc_feature: MA Experiment 20000087 PARAMETER Experiment Name: At_100uM_ABA_Mutants_cDNA_P Parameter: Tissue Value: Aerial
  misc_feature: MA Experiment 20000087 PARAMETER Experiment Name: At_100uM_ABA_Mutants_cDNA_P Parameter: Treatment Value: 100uM ABA vs. No Treatment
  misc_feature: MA Experiment ID: 20000089 Result: Down-regulated in Transcription
  misc_feature: MA Experiment ID: 20000090 Result: Down-regulated in Transcription
  misc_feature: MA Experiment ID: 20000117 Result: Down-regulated in Transcription
  misc_feature: MA Experiment 20000117 PARAMETER Experiment Name: At_100uM_ABA_Mutants_cDNA_P Parameter: Plant Line Value: Columbia
  misc_feature: MA Experiment 20000117 PARAMETER Experiment Name: At_100uM_ABA_Mutants_cDNA_P Parameter: Timepoint (hr) Value: 6
  misc_feature: MA Experiment 20000117 PARAMETER Experiment Name: At_100uM_ABA_Mutants_cDNA_P Parameter: Tissue Value: Aerial
  misc_feature: MA Experiment 20000117 PARAMETER Experiment Name: At_100uM_ABA_Mutants_cDNA_P Parameter: Treatment Value: 100uM ABA vs. No Treatment
  misc_feature: MA Experiment ID: 20001248 Result: Down-regulated in Transcription
  misc_feature: MA Experiment 20001248 PARAMETER Experiment Name: At_Far-red-induction_P Parameter: Age (day) Value: 7
  misc_feature: MA Experiment 20001248 PARAMETER Experiment Name: At_Far-red-induction_P Parameter: Light Value: Far-red vs. White
  misc_feature: MA Experiment 20001248 PARAMETER Experiment Name: At_Far-red-induction_P Parameter: Organism Value: A. thaliana
  misc_feature: MA Experiment 20001248 PARAMETER Experiment Name: At_Far-red-induction_P Parameter: Plant Line Value: Columbia
  misc_feature: MA Experiment 20001248 PARAMETER Experiment Name: At_Far-red-induction_P Parameter: Timepoint (hr) Value: 4
  misc_feature: MA Experiment 20001248 PARAMETER Experiment Name: At_Far-red-induction_P Parameter: Tissue Value: Whole Plant
  misc_feature: MA Experiment ID: 20001906 Result: Down-regulated in Transcription
  misc_feature: MA Experiment 20001906 PARAMETER Experiment Name: At_Drought_Reproduction_P Parameter: Age (day) Value: 35
  misc_feature: MA Experiment 20001906 PARAMETER Experiment Name: At_Drought_Reproduction_P Parameter: Organism Value: A. thaliana
  misc_feature: MA Experiment 20001906 PARAMETER Experiment Name: At_Drought_Reproduction_P Parameter: Plant Line Value: WS
  misc_feature: MA Experiment 20001906 PARAMETER Experiment Name: At_Drought_Reproduction_P Parameter: Timepoint (day) Value: 5
  misc_feature: MA Experiment 20001906 PARAMETER Experiment Name: At_Drought_Reproduction_P Parameter: Tissue Value: Siliques
  misc_feature: MA Experiment 20001906 PARAMETER Experiment Name: At_Drought_Reproduction_P Parameter: Treatment Value: Drought vs. No Drought
gcattaactgatttcacattcttcgataaggattttactctccaaagaaagaaaaaaaaacctcctctgcttttgtgatcctttaaggaaaaagacgaaatggcaacggaatcgtacgaagccgccattaaaggactcaatgatcttctcagtacgaaagcggatctcggaaacgtcgccgccgcgaagatcaaagcgttgacggcggagctaaaggagcttgactcaagcaattcagacgcaattgaacgaatcaagaccggttttactcaattcaaaaccgagaaatatttgaagaatagtactttgttcaatcatcttgccaagactcagaccccaaagtttctggtgtttgcttgctctgattctcgagtttgtccatctcacatcttgaatttccaacctggtgaggcttttgttgtcagaaacatagccaatatggttccaccttttgaccagaagagacactctggagttggcgccgccgttgaatacgcagttgtacatctcaaggtggagaacattttggtgataggccatagctgctgtggtggtattaagggactcatgtccattgaagatgatgctgccccaactcaaagtgacttcattgaaaattgggtgaagataggcgcatcagcgaggaacaagatcaaggaggaacataaagacttgagctacgatgatcaatgcaacaagtgtgagaaggaagctgtgaacgtatcgcttggaaacttgctttcgtacccattcgtgagagctgaggtggtgaagaacacacttgcaataagaggaggtcactacaatttcgtcaaaggaacgtttgatctctgggagctcgatttcaagaccactcctgcttttgccttctcttaagaaagaaagctaccggaacatataaaactcttttgagataaaaaaagacactttgactcatctttcttcattctctcatgttgatgattcctctccaacttctttgatttctttttgttaattcaaaacttcaactttgctgcttctatttcaaaagctcaaacaataaagctgtaaccaacgtttgaaacttctatatttgtctaattgatgtttgaacc

SEQ ID NO: 21610 - protein, 258 aa, Arabidopsis thaliana
  peptide (1)..(258): Ceres Seq. ID no. 12340204
  misc_feature (1)..(253): Homolog of NCBI NO: 30685030 NR Description: CARBONIC ANHYDRASE 2 [Arabidopsis thaliana]
  misc_feature (10)..(248): Homolog of NCBI NO: 27652184 NR Description: carbonic anhydrase 2 [Flaveria bidentis]
  misc_feature (1)..(256): Homolog of NCBI NO: 22550386 NR Description: beta-carbonic anhydrase [Nicotiana tabacum]
  misc_feature (1)..(253): Homolog of NCBI NO: 27652186 NR Description: carbonic anhydrase 3 [Flaveria bidentis]
  misc_feature (1)..(256): Homolog of NCBI NO: 7436815 NR Description: carbonate dehydratase (EC 4.2.1.1), chloroplast -
  misc_feature (1)..(256): Homolog of NCBI NO: 115473 NR Description: CARBONIC ANHYDRASE, CHLOROPLAST PRECURSOR
  misc_feature (1)..(256): Homolog of NCBI NO: 3061271 NR Description: NPCA1 [Nicotiana paniculata]
  misc_feature (1)..(258): Homolog of NCBI NO: 15220853 NR Description: putative carbonic anhydrase
  misc_feature (1)..(258): Homolog of NCBI NO: 30698715 NR Description: carbonic anhydrase -related [Arabidopsis
  misc_feature (1)..(258): Homolog of NCBI NO: 15223141 NR Description: carbonic anhydrase, putative
MATESYEAAIKGLNDLLSTKADLGNVAAAKIKALTAELKELDSSNSDAIERIKTGFTQFKTEKYLKNSTLFNHLAKTQTPKFLVFACSDSRVCPSHILNFQPGEAFVVRNIANMVPPFDQKRHSGVGAAVEYAVVHLKVENILVIGHSCCGGIKGLMSIEDDAAPTQSDFIENWVKIGASARNKIKEEHKDLSYDDQCNKCEKEAVNVSLGNLLSYPFVRAEVVKNTLAIRGGHYNFVKGTFDLWELDFKTTPAFAFS

SEQ ID NO: 21611 - protein, 145 aa, Arabidopsis thaliana
  peptide (1)..(145): Ceres Seq. ID no. 12340205
  misc_feature (1)..(140): Homolog of NCBI NO: 30685030 NR Description: CARBONIC ANHYDRASE 2 [Arabidopsis thaliana]
  misc_feature (1)..(135): Homolog of NCBI NO: 27652184 NR Description: carbonic anhydrase 2 [Flaveria bidentis]
  misc_feature (1)..(143): Homolog of NCBI NO: 22550386 NR Description: beta-carbonic anhydrase [Nicotiana tabacum]
  misc_feature (1)..(140): Homolog of NCBI NO: 27652186 NR Description: carbonic anhydrase 3 [Flaveria bidentis]
  misc_feature (1)..(143): Homolog of NCBI NO: 7436815 NR Description: carbonate dehydratase (EC 4.2.1.1), chloroplast -
  misc_feature (1)..(143): Homolog of NCBI NO: 115473 NR Description: CARBONIC ANHYDRASE, CHLOROPLAST PRECURSOR
  misc_feature (1)..(143): Homolog of NCBI NO: 3061271 NR Description: NPCA1 [Nicotiana paniculata]
  misc_feature (1)..(145): Homolog of NCBI NO: 15220853 NR Description: putative carbonic anhydrase
  misc_feature (1)..(145): Homolog of NCBI NO: 30698715 NR Description: carbonic anhydrase -related [Arabidopsis
  misc_feature (1)..(145): Homolog of NCBI NO: 15223141 NR Description: carbonic anhydrase, putative
MVPPFDQKRHSGVGAAVEYAVVHLKVENILVIGHSCCGGIKGLMSIEDDAAPTQSDFIENWVKIGASARNKIKEEHKDLSYDDQCNKCEKEAVNVSLGNLLSYPFVRAEVVKNTLAIRGGHYNFVKGTFDLWELDFKTTPAFAFS

SEQ ID NO: 21612 - DNA, 1550 bp, Arabidopsis thaliana
  misc_feature (1)..(1550): Ceres Seq. ID no. 12576127
  misc_feature: MA Experiment ID: 108569 Result: Up-regulated in Transcription
  misc_feature: MA Experiment 108569 PARAMETER Experiment Name: At_0.001%_MeJA__cDNA_P Parameter: Timepoint (hr) Value: 6
  misc_feature: MA Experiment 108569 PARAMETER Experiment Name: At_0.001%_MeJA__cDNA_P Parameter: Tissue Value: Aerial
  misc_feature: MA Experiment 108569 PARAMETER Experiment Name: At_0.001%_MeJA__cDNA_P Parameter: Treatment Value: 0.001% MeJA vs. No Treatment
  misc_feature: MA Experiment ID: 108573 Result: Up-regulated in Transcription
  misc_feature: MA Experiment 108573 PARAMETER Experiment Name: At_Drought_cDNA_P Parameter: Timepoint (hr) Value: 6
  misc_feature: MA Experiment 108573 PARAMETER Experiment Name: At_Drought_cDNA_P Parameter: Tissue Value: Aerial
  misc_feature: MA Experiment 108573 PARAMETER Experiment Name: At_Drought_cDNA_P Parameter: Treatment Value: Drought vs. No Drought
  misc_feature: MA Experiment ID: 108577 Result: Down-regulated in Transcription
  misc_feature: MA Experiment 108577 PARAMETER Experiment Name: At_42deg_Heat_cDNA_P Parameter: Temperature (deg C) Value: 42 vs. 22
  misc_feature: MA Experiment 108577 PARAMETER Experiment Name: At_42deg_Heat_cDNA_P Parameter: Timepoint (hr) Value: 6
  misc_feature: MA Experiment 108577 PARAMETER Experiment Name: At_42deg_Heat_cDNA_P Parameter: Tissue Value: Aerial
  misc_feature: MA Experiment ID: 20000113 Result: Down-regulated in Transcription
  misc_feature: MA Experiment 20000113 PARAMETER Experiment Name: At_42deg_Heat_cDNA_P Parameter: Temperature (deg C) Value: 42 vs. 22
  misc_feature: MA Experiment 20000113 PARAMETER Experiment Name: At_42deg_Heat_cDNA_P Parameter: Timepoint (hr) Value: 8
  misc_feature: MA Experiment 20000113 PARAMETER Experiment Name: At_42deg_Heat_cDNA_P Parameter: Tissue Value: Aerial
  misc_feature: MA Experiment ID: 20000224 Result: Down-regulated in Transcription
  misc_feature: MA Experiment ID: 20000437 Result: Up-regulated in Transcription
  misc_feature: MA Experiment 20000437 PARAMETER Experiment Name: At_Drought_P Parameter: Age (day) Value: 8
  misc_feature: MA Experiment 20000437 PARAMETER Experiment Name: At_Drought_P Parameter: Organism Value: A. thaliana
  misc_feature: MA Experiment 20000437 PARAMETER Experiment Name: At_Drought_P Parameter: Plant Line Value: WS
  misc_feature: MA Experiment 20000437 PARAMETER Experiment Name: At_Drought_P Parameter: Timepoint (hr) Value: 24
  misc_feature: MA Experiment 20000437 PARAMETER Experiment Name: At_Drought_P Parameter: Tissue Value: Whole Plant
  misc_feature: MA Experiment 20000437 PARAMETER Experiment Name: At_Drought_P Parameter: Treatment Value: Drought vs. No Drought
accaaactttacgatttctcctctctggaatctcgattctgtatgatctcttcgatctaatcgagtcttctaaacgttccgtgtagaatttcaaatctagggtttgctaaagcttgaacctttcttacccttttctctcgaagaggttttgattcctgggcatgaatttttccctaatcttgttaccttcgaagcataacaacaacgaaagatgtcagattcaatccaggaaagatacttagttggatacgcactcgcagccaagaaacagcatagtttcatccaaccttctttgatcgaacactcaaggcaacgaggcattgatctggtcaagcttgatccgacgaaatcgttgttggagcaagggaagcttgattgcataatccacaagctttacgatgtgtattggaaggagaatcttcatgagtttcgcgagaaatgtcctggtgttcctgtaatcgatttgcctgaggctatcgagcgattgcacaatagggtttcgatgcttgaggtgataactcaattgaggtttcctgtttcagatagcgagagatttggtgtcccggagcaagttgttgttatggattcgagcgtcttgagcggtggaggagctttaggggagcttaagtttccggtgattgctaagccgttggatgctgatgggagtgctaaatctcataagatgtttttgatttatgatcaagaagggatgaagattttgaaagctcctattgtgttgcaggagtttgtgaatcatggtggtgtgatctttaaggtctatgtggttggagatcatgtcaaatgtgtaaagagaagatctttacctgatatctctgaagagaagattgggacgtcgaaagggtctcttccgttttcgcagatatcgaatctgactgctcaagaggacaagaacattgagtatggtgaggataggagcttagagaaagtggaaatgcctccgttaagtttcttgacagatctagcaaaggccatgagggaatcaatgggactcaatctctttaacttcgacgtgattagggatgccaaagatgctaataggtaccttataattgatattaactactttcctggatatgctaagatgccctcttacgagcctgtgttgactgagttcttctgggacatggtcactaagaagaatcatgtctgagaaataatctgttggggagttagcaggaacattgttggggaggatttgtaccattgcaatgtgttgcaactgccattgcaattctggcctatggtgactagctgctttgctaattttcatttggattcttgaacttgtgctttttatatttttttagttgtttctcttttgtttacttccgagttttgcaaagccatgttcaaatgcataactgttgctactcttgaaaagcattgaatctctaaattcttggcaatgtggtctgttctcaactgttggtagtttgtgatttcttttcaagcttttatggtgcctgttttcttcctcaaatctgacaagactgagatatttgattaagcattggtataagttgattagt

SEQ ID NO: 21613 - protein, 319 aa, Arabidopsis thaliana
  peptide (1)..(319): Ceres Seq. ID no. 12576128
  misc_feature (2)..(311): Pfam Name: Inositol 1, 3, 4-trisphosphate 5/6-kinase Pfam Description: Inositol 1, 3, 4-trisphosphate 5/6-kinase
  misc_feature (85)..(316): Homolog of NCBI NO: 30689810 NR Description: expressed protein [Arabidopsis thaliana]
  misc_feature (66)..(313): Homolog of NCBI NO: 30680654 NR Description: inositol 1,3,4-trisphosphate 5/6-kinase-related
  misc_feature (5)..(294): Homolog of NCBI NO: 7487925 NR Description: inositol 1,3,4-trisphosphate 5/6-kinase homolog
  misc_feature (8)..(316): Homolog of NCBI NO: 27311236 NR Description: Putative inositol 1,3,4-trisphosphate 5/6-kinase
  misc_feature (7)..(316): Homolog of NCBI NO: 37530372 NR Description: putative inositol 1,3,4-trisphosphate 5/6-kinase
  misc_feature (5)..(313): Homolog of NCBI NO: 18413088 NR Description: inositol 1,3,4-trisphosphate 5/6-kinase-like
  misc_feature (8)..(315): Homolog of NCBI NO: 27549256 NR Description: inositol phosphate kinase [Zea mays]
  misc_feature (3)..(315): Homolog of NCBI NO: 37537118 NR Description: putative inositol 1,3,4-trisphosphate 5/6-kinase
  misc_feature (1)..(319): Homolog of NCBI NO: 7487924 NR Description: inositol 1,3,4-trisphosphate 5/6-kinase (EC
  misc_feature (1)..(319): Homolog of NCBI NO: 15237403 NR Description: Inositol 1,3,4-Trisphosphate 5/6 kinase
MSDSIQERYLVGYALAAKKQHSFIQPSLIEHSRQRGIDLVKLDPTKSLLEQGKLDCIIHKLYDVYWKENLHEFREKCPGVPVIDLPEAIERLHNRVSMLEVITQLRFPVSDSERFGVPEQVVVMDSSVLSGGGALGELKFPVIAKPLDADGSAKSHKMFLIYDQEGMKILKAPIVLQEFVNHGGVIFKVYVVGDHVKCVKRRSLPDISEEKIGTSKGSLPFSQISNLTAQEDKNIEYGEDRSLEKVEMPPLSFLTDLAKAMRESMGLNLFNFDVIRDAKDANRYLIIDINYFPGYAKMPSYEPVLTEFFWDMVTKKNHV

SEQ ID NO: 21614 - protein, 222 aa, Arabidopsis thaliana
  peptide (1)..(222): Ceres Seq. ID no. 12576129
  misc_feature (1)..(214): Pfam Name: Inositol 1, 3, 4-trisphosphate 5/6-kinase Pfam Description: Inositol 1, 3, 4-trisphosphate 5/6-kinase
  misc_feature (1)..(219): Homolog of NCBI NO: 30689810 NR Description: expressed protein [Arabidopsis thaliana]
  misc_feature (1)..(216): Homolog of NCBI NO: 30680654 NR Description: inositol 1,3,4-trisphosphate 5/6-kinase-related
  misc_feature (1)..(197): Homolog of NCBI NO: 7487925 NR Description: inositol 1,3,4-trisphosphate 5/6-kinase homolog
  misc_feature (1)..(219): Homolog of NCBI NO: 27311236 NR Description: Putative inositol 1,3,4-trisphosphate 5/6-kinase
  misc_feature (1)..(219): Homolog of NCBI NO: 37530372 NR Description: putative inositol 1,3,4-trisphosphate 5/6-kinase
  misc_feature (1)..(216): Homolog of NCBI NO: 18413088 NR Description: inositol 1,3,4-trisphosphate 5/6-kinase-like
  misc_feature (1)..(218): Homolog of NCBI NO: 27549256 NR Description: inositol phosphate kinase [Zea mays]
  misc_feature (1)..(218): Homolog of NCBI NO: 37537118 NR Description: putative inositol 1,3,4-trisphosphate 5/6-kinase
  misc_feature (1)..(222): Homolog of NCBI NO: 7487924 NR Description: inositol 1,3,4-trisphosphate 5/6-kinase (EC
  misc_feature (1)..(222): Homolog of NCBI NO: 15237403 NR Description: Inositol 1,3,4-Trisphosphate 5/6 kinase
MLEVITQLRFPVSDSERFGVPEQVVVMDSSVLSGGGALGELKFPVIAKPLDADGSAKSHKMFLIYDQEGMKILKAPIVLQEFVNHGGVIFKVYVVGDHVKCVKRRSLPDISEEKIGTSKGSLPFSQISNLTAQEDKNIEYGEDRSLEKVEMPPLSFLTDLAKAMRESMGLNLFNFDVIRDAKDANRYLIIDINYFPGYAKMPSYEPVLTEFFWDMVTKKNHV

SEQ ID NO: 21615 - protein, 196 aa, Arabidopsis thaliana
  peptide (1)..(196): Ceres Seq. ID no. 12576130
  misc_feature (1)..(188): Pfam Name: Inositol 1, 3, 4-trisphosphate 5/6-kinase Pfam Description: Inositol 1, 3, 4-trisphosphate 5/6-kinase
  misc_feature (1)..(193): Homolog of NCBI NO: 30689810 NR Description: expressed protein [Arabidopsis thaliana]
  misc_feature (1)..(190): Homolog of NCBI NO: 30680654 NR Description: inositol 1,3,4-trisphosphate 5/6-kinase-related
  misc_feature (1)..(171): Homolog of NCBI NO: 7487925 NR Description: inositol 1,3,4-trisphosphate 5/6-kinase homolog
  misc_feature (1)..(193): Homolog of NCBI NO: 27311236 NR Description: Putative inositol 1,3,4-trisphosphate 5/6-kinase
  misc_feature (1)..(193): Homolog of NCBI NO: 37530372 NR Description: putative inositol 1,3,4-trisphosphate 5/6-kinase
  misc_feature (1)..(190): Homolog of NCBI NO: 18413088 NR Description: inositol 1,3,4-trisphosphate 5/6-kinase-like
  misc_feature (1)..(192): Homolog of NCBI NO: 27549256 NR Description: inositol phosphate kinase [Zea mays]
  misc_feature (1)..(192): Homolog of NCBI NO: 37537118 NR Description: putative inositol 1,3,4-trisphosphate 5/6-kinase
  misc_feature (1)..(196): Homolog of NCBI NO: 7487924 NR Description: inositol 1,3,4-trisphosphate 5/6-kinase (EC
  misc_feature (1)..(196): Homolog of NCBI NO: 15237403 NR Description: Inositol 1,3,4-Trisphosphate 5/6 kinase
MDSSVLSGGGALGELKFPVIAKPLDADGSAKSHKMFLIYDQEGMKILKAPIVLQEFVNHGGVIFKVYVVGDHVKCVKRRSLPDISEEKIGTSKGSLPFSQISNLTAQEDKNIEYGEDRSLEKVEMPPLSFLTDLAKAMRESMGLNLFNFDVIRDAKDANRYLIIDINYFPGYAKMPSYEPVLTEFFWDMVTKKNHV

SEQ ID NO: 21616 - DNA, 889 bp, Arabidopsis thaliana
  misc_feature (1)..(889): Ceres Seq. ID no. 12369956
  misc_feature: MA Experiment ID: 108434 Result: Down-regulated in Transcription
  misc_feature: MA Experiment 108434 PARAMETER Experiment Name: At_Root_Tips_cDNA_P Parameter: Tissue Value: Root Tips
  misc_feature: MA Experiment ID: 108461 Result: Up-regulated in Transcription
  misc_feature: MA Experiment 108461 PARAMETER Experiment Name: At_Germinating_Seeds_cDNA_P Parameter: Age (day) Value: 1 vs. 0
  misc_feature: MA Experiment 108461 PARAMETER Experiment Name: At_Germinating_Seeds_cDNA_P Parameter: Tissue Value: Germinating Seeds
  misc_feature: MA Experiment ID: 108462 Result: Up-regulated in Transcription
  misc_feature: MA Experiment 108462 PARAMETER Experiment Name: At_Germinating_Seeds_cDNA_P Parameter: Age (day) Value: 2 vs. 0
  misc_feature: MA Experiment 108462 PARAMETER Experiment Name: At_Germinating_Seeds_cDNA_P Parameter: Tissue Value: Germinating Seeds
  misc_feature: MA Experiment ID: 108469 Result: Down-regulated in Transcription
  misc_feature: MA Experiment ID: 108474 Result: Up-regulated in Transcription
  misc_feature: MA Experiment 108474 PARAMETER Experiment Name: At_Drought_Flowers_cDNA_P Parameter: Timepoint (hr) Value: null
  misc_feature: MA Experiment 108474 PARAMETER Experiment Name: At_Drought_Flowers_cDNA_P Parameter: Treatment Value: Drought vs. No Drought
  misc_feature: MA Experiment ID: 108573 Result: Down-regulated in Transcription
  misc_feature: MA Experiment 108573 PARAMETER Experiment Name: At_Drought_cDNA_P Parameter: Timepoint (hr) Value: 6
  misc_feature: MA Experiment 108573 PARAMETER Experiment Name: At_Drought_cDNA_P Parameter: Tissue Value: Aerial
  misc_feature: MA Experiment 108573 PARAMETER Experiment Name: At_Drought_cDNA_P Parameter: Treatment Value: Drought vs. No Drought
  misc_feature: MA Experiment ID: 108579 Result: Up-regulated in Transcription
  misc_feature: MA Experiment 108579 PARAMETER Experiment Name: At_4deg_Cold_cDNA_P Parameter: Temperature (deg C) Value: 4 vs. 22
  misc_feature: MA Experiment 108579 PARAMETER Experiment Name: At_4deg_Cold_cDNA_P Parameter: Timepoint (hr) Value: 6
  misc_feature: MA Experiment 108579 PARAMETER Experiment Name: At_4deg_Cold_cDNA_P Parameter: Tissue Value: Aerial
  misc_feature: MA Experiment ID: 108595 Result: Down-regulated in Transcription
  misc_feature: MA Experiment 108595 PARAMETER Experiment Name: At_Ler-pi_Ovule_cDNA_P Parameter: Plant Line Value: null
  misc_feature: MA Experiment ID: 108668 Result: Down-regulated in Transcription
  misc_feature: MA Experiment 108668 PARAMETER Experiment Name: At_2mM_SA_cDNA_P Parameter: Plant Line Value: WS
  misc_feature: MA Experiment 108668 PARAMETER Experiment Name: At_2mM_SA_cDNA_P Parameter: Timepoint (hr) Value: 6
  misc_feature: MA Experiment 108668 PARAMETER Experiment Name: At_2mM_SA_cDNA_P Parameter: Treatment Value: 2mM SA vs. No Treatment
  misc_feature: MA Experiment ID: 20000071 Result: Down-regulated in Transcription
  misc_feature: MA Experiment 20000071 PARAMETER Experiment Name: At_100uM_ABA_Mutants_cDNA_P Parameter: Plant Line Value: CS8104
  misc_feature: MA Experiment 20000071 PARAMETER Experiment Name: At_100uM_ABA_Mutants_cDNA_P Parameter: Timepoint (hr) Value: 6
  misc_feature: MA Experiment 20000071 PARAMETER Experiment Name: At_100uM_ABA_Mutants_cDNA_P Parameter: Tissue Value: Aerial
  misc_feature: MA Experiment 20000071 PARAMETER Experiment Name: At_100uM_ABA_Mutants_cDNA_P Parameter: Treatment Value: 100uM ABA vs. No Treatment
  misc_feature: MA Experiment ID: 20000090 Result: Down-regulated in Transcription
  misc_feature: MA Experiment ID: 20000111 Result: Down-regulated in Transcription
  misc_feature: MA Experiment 20000111 PARAMETER Experiment Name: At_42deg_Heat_cDNA_P Parameter: Temperature (deg C) Value: 42 vs. 22
  misc_feature: MA Experiment 20000111 PARAMETER Experiment Name: At_42deg_Heat_cDNA_P Parameter: Timepoint (hr) Value: 6
  misc_feature: MA Experiment 20000111 PARAMETER Experiment Name: At_42deg_Heat_cDNA_P Parameter: Tissue Value: Aerial
  misc_feature: MA Experiment ID: 20000113 Result: Down-regulated in Transcription
  misc_feature: MA Experiment 20000113 PARAMETER Experiment Name: At_42deg_Heat_cDNA_P Parameter: Temperature (deg C) Value: 42 vs. 22
  misc_feature: MA Experiment 20000113 PARAMETER Experiment Name: At_42deg_Heat_cDNA_P Parameter: Timepoint (hr) Value: 8
  misc_feature: MA Experiment 20000113 PARAMETER Experiment Name: At_42deg_Heat_cDNA_P Parameter: Tissue Value: Aerial
  misc_feature: MA Experiment ID: 20000117 Result: Down-regulated in Transcription
  misc_feature: MA Experiment 20000117 PARAMETER Experiment Name: At_100uM_ABA_Mutants_cDNA_P Parameter: Plant Line Value: Columbia
  misc_feature: MA Experiment 20000117 PARAMETER Experiment Name: At_100uM_ABA_Mutants_cDNA_P Parameter: Timepoint (hr) Value: 6
  misc_feature: MA Experiment 20000117 PARAMETER Experiment Name: At_100uM_ABA_Mutants_cDNA_P Parameter: Tissue Value: Aerial
  misc_feature: MA Experiment 20000117 PARAMETER Experiment Name: At_100uM_ABA_Mutants_cDNA_P Parameter: Treatment Value: 100uM ABA vs. No Treatment
  misc_feature: MA Experiment ID: 20000180 Result: Up-regulated in Transcription
  misc_feature: MA Experiment 20000180 PARAMETER Experiment Name: At_Germinating_Seeds_P Parameter: Age (hr) Value: 24 vs. 0
  misc_feature: MA Experiment 20000180 PARAMETER Experiment Name: At_Germinating_Seeds_P Parameter: Tissue Value: Germinating Seeds
  misc_feature: MA Experiment ID: 20000182 Result: Down-regulated in Transcription
  misc_feature: MA Experiment 20000182 PARAMETER Experiment Name: At_2mM_SA_P Parameter: Age (day) Value: 14
  misc_feature: MA Experiment 20000182 PARAMETER Experiment Name: At_2mM_SA_P Parameter: Organism Value: A. thaliana
  misc_feature: MA Experiment 20000182 PARAMETER Experiment Name: At_2mM_SA_P Parameter: Plant Line Value: WS
  misc_feature: MA Experiment 20000182 PARAMETER Experiment Name: At_2mM_SA_P Parameter: Timepoint (hr) Value: 6
  misc_feature: MA Experiment 20000182 PARAMETER Experiment Name: At_2mM_SA_P Parameter: Tissue Value: Aerial
  misc_feature: MA Experiment 20000182 PARAMETER Experiment Name: At_2mM_SA_P Parameter: Treatment Value: 2mM SA vs. No Treatment
  misc_feature: MA Experiment ID: 20000227 Result: Down-regulated in Transcription
  misc_feature: MA Experiment 20000227 PARAMETER Experiment Name: At_Root-Tips-vs-Tops_P Parameter: Tissue Value: Root Tips vs. Root Tops
  misc_feature: MA Experiment ID: 20000234 Result: Down-regulated in Transcription
  misc_feature: MA Experiment 20000234 PARAMETER Experiment Name: At_Siliques_P Parameter: Age (day) Value: 21
  misc_feature: MA Experiment 20000234 PARAMETER Experiment Name: At_Siliques_P Parameter: Organism Value: A. thaliana
  misc_feature: MA Experiment 20000234 PARAMETER Experiment Name: At_Siliques_P Parameter: Plant Line Value: WS
  misc_feature: MA Experiment 20000234 PARAMETER Experiment Name: At_Siliques_P Parameter: Tissue Value: Less Than 5mm Siliques vs. Whole Plant
  misc_feature: MA Experiment ID: 20000235 Result: Down-regulated in Transcription
  misc_feature: MA Experiment 20000235 PARAMETER Experiment Name: At_Siliques_P Parameter: Age (day) Value: 21
  misc_feature: MA Experiment 20000235 PARAMETER Experiment Name: At_Siliques_P Parameter: Organism Value: A. thaliana
  misc_feature: MA Experiment 20000235 PARAMETER Experiment Name: At_Siliques_P Parameter: Plant Line Value: WS
  misc_feature: MA Experiment 20000235 PARAMETER Experiment Name: At_Siliques_P Parameter: Tissue Value: 5-10mm Siliques vs. Whole Plant
  misc_feature: MA Experiment ID: 20000264 Result: Down-regulated in Transcription
  misc_feature: MA Experiment 20000264 PARAMETER Experiment Name: At_Open_Flower_P Parameter: Age (day) Value: 21
  misc_feature: MA Experiment 20000264 PARAMETER Experiment Name: At_Open_Flower_P Parameter: Plant Line Value: WS
  misc_feature: MA Experiment 20000264 PARAMETER Experiment Name: At_Open_Flower_P Parameter: Tissue Value: Open Flower vs. Whole Plant
  misc_feature: MA Experiment ID: 20000286 Result: Down-regulated in Transcription
  misc_feature: MA Experiment 20000286 PARAMETER Experiment Name: At_Open_Flower_P Parameter: Age (day) Value: 21
  misc_feature: MA Experiment 20000286 PARAMETER Experiment Name: At_Open_Flower_P Parameter: Plant Line Value: WS
  misc_feature: MA Experiment 20000286 PARAMETER Experiment Name: At_Open_Flower_P Parameter: Tissue Value: Half Open vs. Whole Plant
  misc_feature: MA Experiment ID: 20000308 Result: Up-regulated in Transcription
  misc_feature: MA Experiment 20000308 PARAMETER Experiment Name: At_100mM_NaCl__P Parameter: Age (day) Value: 17
  misc_feature: MA Experiment 20000308 PARAMETER Experiment Name: At_100mM_NaCl__P Parameter: Organism Value: A. thaliana
  misc_feature: MA Experiment 20000308 PARAMETER Experiment Name: At_100mM_NaCl__P Parameter: Plant Line Value: WS
  misc_feature: MA Experiment 20000308 PARAMETER Experiment Name: At_100mM_NaCl__P Parameter: Timepoint (hr) Value: 72
  misc_feature: MA Experiment 20000308 PARAMETER Experiment Name: At_100mM_NaCl__P Parameter: Tissue Value: Whole Plant
  misc_feature: MA Experiment 20000308 PARAMETER Experiment Name: At_100mM_NaCl__P Parameter: Treatment Value: 100mM NaCl vs. No Treatment
  misc_feature: MA Experiment ID: 20000436 Result: Down-regulated in Transcription
  misc_feature: MA Experiment 20000436 PARAMETER Experiment Name: At_Drought_P Parameter: Age (day) Value: 7
  misc_feature: MA Experiment 20000436 PARAMETER Experiment Name: At_Drought_P Parameter: Organism Value: A. thaliana
  misc_feature: MA Experiment 20000436 PARAMETER Experiment Name: At_Drought_P Parameter: Plant Line Value: WS
  misc_feature: MA Experiment 20000436 PARAMETER Experiment Name: At_Drought_P Parameter: Timepoint (hr) Value: 12
  misc_feature: MA Experiment 20000436 PARAMETER Experiment Name: At_Drought_P Parameter: Tissue Value: Whole Plant
  misc_feature: MA Experiment 20000436 PARAMETER Experiment Name: At_Drought_P Parameter: Treatment Value: Drought vs. No Drought
  misc_feature: MA Experiment ID: 20000437 Result: Down-regulated in Transcription
  misc_feature: MA Experiment 20000437 PARAMETER Experiment Name: At_Drought_P Parameter: Age (day) Value: 8
  misc_feature: MA Experiment 20000437 PARAMETER Experiment Name: At_Drought_P Parameter: Organism Value: A. thaliana
  misc_feature: MA Experiment 20000437 PARAMETER Experiment Name: At_Drought_P Parameter: Plant Line Value: WS
  misc_feature: MA Experiment 20000437 PARAMETER Experiment Name: At_Drought_P Parameter: Timepoint (hr) Value: 24
  misc_feature: MA Experiment 20000437 PARAMETER Experiment Name: At_Drought_P Parameter: Tissue Value: Whole Plant
  misc_feature: MA Experiment 20000437 PARAMETER Experiment Name: At_Drought_P Parameter: Treatment Value: Drought vs. No Drought
  misc_feature: MA Experiment ID: 20000438 Result: Up-regulated in Transcription
  misc_feature: MA Experiment 20000438 PARAMETER Experiment Name: At_Shoots__P Parameter: Age (day) Value: 14
  misc_feature: MA Experiment 20000438 PARAMETER Experiment Name: At_Shoots__P Parameter: Tissue Value: Shoots vs. Whole Plant
  misc_feature: MA Experiment ID: 20000439 Result: Down-regulated in Transcription
  misc_feature: MA Experiment 20000439 PARAMETER Experiment Name: At_Roots__P Parameter: Age (day) Value: 14 vs. 21
  misc_feature: MA Experiment 20000439 PARAMETER Experiment Name: At_Roots__P Parameter: Organism Value: A. thaliana
  misc_feature: MA Experiment 20000439 PARAMETER Experiment Name: At_Roots__P Parameter: Tissue Value: Roots vs. Whole Plant
  misc_feature: MA Experiment ID: 20000445 Result: Down-regulated in Transcription
  misc_feature: MA Experiment 20000445 PARAMETER Experiment Name: At_100uM_NAA__P Parameter: Age (day) Value: 14
  misc_feature: MA Experiment 20000445 PARAMETER Experiment Name: At_100uM_NAA__P Parameter: Organism Value: A. thaliana
  misc_feature: MA Experiment 20000445 PARAMETER Experiment Name: At_100uM_NAA__P Parameter: Plant Line Value: WS
  misc_feature: MA Experiment 20000445 PARAMETER Experiment Name: At_100uM_NAA__P Parameter: Timepoint (hr) Value: 6
  misc_feature: MA Experiment 20000445 PARAMETER Experiment Name: At_100uM_NAA__P Parameter: Tissue Value: Aerial
  misc_feature: MA Experiment 20000445 PARAMETER Experiment Name: At_100uM_NAA__P Parameter: Treatment Value: 100uM NAA vs. No Treatment
  misc_feature: MA Experiment ID: 20000495 Result: Up-regulated in Transcription
  misc_feature: MA Experiment 20000495 PARAMETER Experiment Name: At_Guard_Cells_P Parameter: Harvest Date Value: 8/2/2002
  misc_feature: MA Experiment 20000495 PARAMETER Experiment Name: At_Guard_Cells_P Parameter: Organism Value: A. thaliana
  misc_feature: MA Experiment 20000495 PARAMETER Experiment Name: At_Guard_Cells_P Parameter: Tissue Value: Guard Cells vs. Leaves
  misc_feature: MA Experiment ID: 20000527 Result: Up-regulated in Transcription
  misc_feature: MA Experiment 20000527 PARAMETER Experiment Name: At_10percent_PEG_P Parameter: Age (day) Value: 20
  misc_feature: MA Experiment 20000527 PARAMETER Experiment Name: At_10percent_PEG_P Parameter: Organism Value: A. thaliana
  misc_feature: MA Experiment 20000527 PARAMETER Experiment Name: At_10percent_PEG_P Parameter: Plant Line Value: WS
  misc_feature: MA Experiment 20000527 PARAMETER Experiment Name: At_10percent_PEG_P Parameter: Timepoint (day) Value: 20
  misc_feature: MA Experiment 20000527 PARAMETER Experiment Name: At_10percent_PEG_P Parameter: Tissue Value: Whole Plant
  misc_feature: MA Experiment 20000527 PARAMETER Experiment Name: At_10percent_PEG_P Parameter: Treatment Value: 10percent PEG vs. No Treatment
  misc_feature: MA Experiment ID: 20000573 Result: Down-regulated in Transcription
  misc_feature: MA Experiment 20000573 PARAMETER Experiment Name: At_100uM_ABA_Mutants__P Parameter: Organism Value: A. thaliana
  misc_feature: MA Experiment 20000573 PARAMETER Experiment Name: At_100uM_ABA_Mutants__P Parameter: Plant Line Value: CS22 vs. Ler wt
  misc_feature: MA Experiment 20000573 PARAMETER Experiment Name: At_100uM_ABA_Mutants__P Parameter: Timepoint (hr) Value: N/A
  misc_feature: MA Experiment 20000573 PARAMETER Experiment Name: At_100uM_ABA_Mutants__P Parameter: Tissue Value: Whole Plant
  misc_feature: MA Experiment 20000573 PARAMETER Experiment Name: At_100uM_ABA_Mutants__P Parameter: Treatment Value: None
  misc_feature: MA Experiment ID: 20000794 Result: Down-regulated in Transcription
  misc_feature: MA Experiment 20000794 PARAMETER Experiment Name: At_Petals_P Parameter: Age (day) Value: 23-25 days
  misc_feature: MA Experiment 20000794 PARAMETER Experiment Name: At_Petals_P Parameter: Plant Line Value: WS
  misc_feature: MA Experiment 20000794 PARAMETER Experiment Name: At_Petals_P Parameter: Tissue Value: Petals vs. Whole plant
  misc_feature: MA Experiment ID: 20001248 Result: Down-regulated in Transcription
  misc_feature: MA Experiment 20001248 PARAMETER Experiment Name: At_Far-red-induction_P Parameter: Age (day) Value: 7
  misc_feature: MA Experiment 20001248 PARAMETER Experiment Name: At_Far-red-induction_P Parameter: Light Value: Far-red vs. White
  misc_feature: MA Experiment 20001248 PARAMETER Experiment Name: At_Far-red-induction_P Parameter: Organism Value: A. thaliana
  misc_feature: MA Experiment 20001248 PARAMETER Experiment Name: At_Far-red-induction_P Parameter: Plant Line Value: Columbia
  misc_feature: MA Experiment 20001248 PARAMETER Experiment Name: At_Far-red-induction_P Parameter: Timepoint (hr) Value: 4
  misc_feature: MA Experiment 20001248 PARAMETER Experiment Name: At_Far-red-induction_P Parameter: Tissue Value: Whole Plant
  misc_feature: MA Experiment ID: 20001450 Result: Down-regulated in Transcription
  misc_feature: MA Experiment 20001450 PARAMETER Experiment Name: At_Far-red-induction_P Parameter: Age (day) Value: 7
  misc_feature: MA Experiment 20001450 PARAMETER Experiment Name: At_Far-red-induction_P Parameter: Light Value: Far-red vs. White
  misc_feature: MA Experiment 20001450 PARAMETER Experiment Name: At_Far-red-induction_P Parameter: Organism Value: A. thaliana
  misc_feature: MA Experiment 20001450 PARAMETER Experiment Name: At_Far-red-induction_P Parameter: Plant Line Value: Columbia
  misc_feature: MA Experiment 20001450 PARAMETER Experiment Name: At_Far-red-induction_P Parameter: Timepoint (hr) Value: 8
  misc_feature: MA Experiment 20001450 PARAMETER Experiment Name: At_Far-red-induction_P Parameter: Tissue Value: Whole Plant
  misc_feature: MA Experiment ID: 20001451 Result: Down-regulated in Transcription
  misc_feature: MA Experiment 20001451 PARAMETER Experiment Name: At_Far-red-induction_P Parameter: Age (day) Value: 7
  misc_feature: MA Experiment 20001451 PARAMETER Experiment Name: At_Far-red-induction_P Parameter: Light Value: Far-red vs. White
  misc_feature: MA Experiment 20001451 PARAMETER Experiment Name: At_Far-red-induction_P Parameter: Organism Value: A. thaliana
  misc_feature: MA Experiment 20001451 PARAMETER Experiment Name: At_Far-red-induction_P Parameter: Plant Line Value: Columbia
  misc_feature: MA Experiment 20001451 PARAMETER Experiment Name: At_Far-red-induction_P Parameter: Timepoint (hr) Value: 24
  misc_feature: MA Experiment 20001451 PARAMETER Experiment Name: At_Far-red-induction_P Parameter: Tissue Value: Whole Plant
  misc_feature: MA Experiment ID: 20001560 Result: Up-regulated in Transcription
  misc_feature: MA Experiment 20001560 PARAMETER Experiment Name: At_Drought_Soil_Dry_P Parameter: Age (day) Value: 28
  misc_feature: MA Experiment 20001560 PARAMETER Experiment Name: At_Drought_Soil_Dry_P Parameter: Organism Value: A. thaliana
  misc_feature: MA Experiment 20001560 PARAMETER Experiment Name: At_Drought_Soil_Dry_P Parameter: Plant Line Value: WS
  misc_feature: MA Experiment 20001560 PARAMETER Experiment Name: At_Drought_Soil_Dry_P Parameter: Post Timepoint (hr) Value: None
  misc_feature: MA Experiment 20001560 PARAMETER Experiment Name: At_Drought_Soil_Dry_P Parameter: Post-Treatment Value: None
  misc_feature: MA Experiment 20001560 PARAMETER Experiment Name: At_Drought_Soil_Dry_P Parameter: Timepoint (day) Value: 14
  misc_feature: MA Experiment 20001560 PARAMETER Experiment Name: At_Drought_Soil_Dry_P Parameter: Treatment Value: Drought vs. No Drought
  misc_feature: MA Experiment ID: 20001755 Result: Up-regulated in Transcription
  misc_feature: MA Experiment 20001755 PARAMETER Experiment Name: At_50mM_NH4NO3_L-to-H_P Parameter: Timepoint (hr) Value: 2
  misc_feature: MA Experiment 20001755 PARAMETER Experiment Name: At_50mM_NH4NO3_L-to-H_P Parameter: Tissue Value: Leaf
  misc_feature: MA Experiment 20001755 PARAMETER Experiment Name: At_50mM_NH4NO3_L-to-H_P Parameter: Treatment Value: 50mM NH4NO3 vs 100mM Mannitol
  misc_feature: MA Experiment ID: 20001756 Result: Up-regulated in Transcription
  misc_feature: MA Experiment 20001756 PARAMETER Experiment Name: At_50mM_NH4NO3_L-to-H_P Parameter: Timepoint (hr) Value: 4
  misc_feature: MA Experiment 20001756 PARAMETER Experiment Name: At_50mM_NH4NO3_L-to-H_P Parameter: Tissue Value: Leaf
  misc_feature: MA Experiment 20001756 PARAMETER Experiment Name: At_50mM_NH4NO3_L-to-H_P Parameter: Treatment Value: 50mM NH4NO3 vs 100mM Mannitol
  misc_feature: MA Experiment ID: 20001757 Result: Up-regulated in Transcription
  misc_feature: MA Experiment 20001757 PARAMETER Experiment Name: At_50mM_NH4NO3_L-to-H_P Parameter: Timepoint (hr) Value: 6
  misc_feature: MA Experiment 20001757 PARAMETER Experiment Name: At_50mM_NH4NO3_L-to-H_P Parameter: Tissue Value: Leaf
  misc_feature: MA Experiment 20001757 PARAMETER Experiment Name: At_50mM_NH4NO3_L-to-H_P Parameter: Treatment Value: 50mM NH4NO3 vs 100mM Mannitol
  misc_feature: MA Experiment ID: 20001905 Result: Down-regulated in Transcription
  misc_feature: MA Experiment 20001905 PARAMETER Experiment Name: At_Drought_Reproduction_P Parameter: Age (day) Value: 40
  misc_feature: MA Experiment 20001905 PARAMETER Experiment Name: At_Drought_Reproduction_P Parameter: Organism Value: A. thaliana
  misc_feature: MA Experiment 20001905 PARAMETER Experiment Name: At_Drought_Reproduction_P Parameter: Plant Line Value: WS
  misc_feature: MA Experiment 20001905 PARAMETER Experiment Name: At_Drought_Reproduction_P Parameter: Timepoint (day) Value: 10
  misc_feature: MA Experiment 20001905 PARAMETER Experiment Name: At_Drought_Reproduction_P Parameter: Tissue Value: Rosettes
  misc_feature: MA Experiment 20001905 PARAMETER Experiment Name: At_Drought_Reproduction_P Parameter: Treatment Value: Drought vs. No Drought
  misc_feature: MA Experiment ID: 20001911 Result: Down-regulated in Transcription
  misc_feature: MA Experiment 20001911 PARAMETER Experiment Name: At_Drought_Reproduction_P Parameter: Age (day) Value: 40
  misc_feature: MA Experiment 20001911 PARAMETER Experiment Name: At_Drought_Reproduction_P Parameter: Organism Value: A. thaliana
  misc_feature: MA Experiment 20001911 PARAMETER Experiment Name: At_Drought_Reproduction_P Parameter: Plant Line Value: WS
  misc_feature: MA Experiment 20001911 PARAMETER Experiment Name: At_Drought_Reproduction_P Parameter: Timepoint (day) Value: 10
  misc_feature: MA Experiment 20001911 PARAMETER Experiment Name: At_Drought_Reproduction_P Parameter: Tissue Value: Flowers
  misc_feature: MA Experiment 20001911 PARAMETER Experiment Name: At_Drought_Reproduction_P Parameter: Treatment Value: Drought vs. No Drought
tataacacacactcgcttgttcacgcacaacaaaaagcaagaatatataccactttgtgaacttcagagatcctatagcaatggcgaacctaccgattcttttggattactggccaagtatgttcgggatgagggctagagttgcgttgcgagagaaaggtgttgagtttgaatacagagaggaagatttctcgaacaagagccctttactcctccagagtaatcccattcacaagaaaatcccggttctggtccacaacggtaaaccggtatgtgaatctcttaacgttgtccagtacgtcgacgaggcttggcccgagaagaacccgttcttcccttccgatccttacgggagagctcaggctcgattctgggctgatttcgtggacaagaagttcaccgacgcccaattcaaggtatgggggaagaaaggtgaggaacaagaagcaggcaagaaggaatttattgaggcagtgaagattcttgaatctgagctaggagataaaccttactttggtggagatagctttgggtatgtagacatttccttgattacattctcgagttggttccaagcctatgagaagtttggtaactttagcatcgagtcagagagtccgaaactgatcgcttgggcaaagcggtgcatggagaaagagagtgtgtctaagtctctccctgactctgagaagattgttgcatatgctgctgagtataggaagaacaatctctgatttgaataatcttgttgttctcttgttgctaagctgtgttctgtttttgtctttgtttttttttttcccctaataatgcgagagagccttagtgaatgtgtgttgtggtttttatgcatcctaagtatggaatttaaataaaatttgtttcgact

SEQ ID NO: 21617 - protein, 217 aa, Arabidopsis thaliana
  peptide (1)..(217): Ceres Seq. ID no. 12369957
  misc_feature (85)..(193): Pfam Name: Glutathione S-transferase, C-terminal domain Pfam Description: Glutathione S-transferase, C-terminal domain
  misc_feature (1)..(214): Homolog of NCBI NO: 15218304 NR Description: glutathione transferase, putative
  misc_feature (1)..(214): Homolog of NCBI NO: 8052535 NR Description: F3F9.13 [Arabidopsis thaliana]
  misc_feature (1)..(214): Homolog of NCBI NO: 15220041 NR Description: glutathione transferase, putative; protein id:
  misc_feature (1)..(214): Homolog of NCBI NO: 8052534 NR Description: F3F9.11 [Arabidopsis thaliana]
  misc_feature (1)..(214): Homolog of NCBI NO: 21592644 NR Description: glutathione transferase, putative [Arabidopsis
  misc_feature (1)..(214): Homolog of NCBI NO: 18411929 NR Description: glutathione transferase, putative
  misc_feature (1)..(168): Homolog of NCBI NO: 8052534 NR Description: F3F9.11 [Arabidopsis thaliana]
  misc_feature (1)..(217): Homolog of NCBI NO: 21592638 NR Description: 2,4-D inducible glutathione S-transferase,
  misc_feature (1)..(217): Homolog of NCBI NO: 15218311 NR Description: glutathione transferase, putative
MANLPILLDYWPSMFGMRARVALREKGVEFEYREEDFSNKSPLLLQSNPIHKKIPVLVHNGKPVCESLNVVQYVDEAWPEKNPFFPSDPYGRAQARFWADFVDKKFTDAQFKVWGKKGEEQEAGKKEFIEAVKILESELGDKPYFGGDSFGYVDISLITFSSWFQAYEKFGNFSIESESPKLIAWAKRCMEKESVSKSLPDSEKIVAYAAEYRKNNL

SEQ ID NO: 21618 - protein, 204 aa, Arabidopsis thaliana
  peptide (1)..(204): Ceres Seq. ID no. 12369958
  misc_feature (72)..(180): Pfam Name: Glutathione S-transferase, C-terminal domain Pfam Description: Glutathione S-transferase, C-terminal domain
  misc_feature (1)..(201): Homolog of NCBI NO: 15218304 NR Description: glutathione transferase, putative
  misc_feature (1)..(201): Homolog of NCBI NO: 8052535 NR Description: F3F9.13 [Arabidopsis thaliana]
  misc_feature (1)..(201): Homolog of NCBI NO: 15220041 NR Description: glutathione transferase, putative; protein id:
  misc_feature (1)..(201): Homolog of NCBI NO: 8052534 NR Description: F3F9.11 [Arabidopsis thaliana]
  misc_feature (1)..(201): Homolog of NCBI NO: 21592644 NR Description: glutathione transferase, putative [Arabidopsis
  misc_feature (1)..(201): Homolog of NCBI NO: 18411929 NR Description: glutathione transferase, putative
  misc_feature (1)..(155): Homolog of NCBI NO: 8052534 NR Description: F3F9.11 [Arabidopsis thaliana]
  misc_feature (1)..(204): Homolog of NCBI NO: 21592638 NR Description: 2,4-D inducible glutathione S-transferase,
  misc_feature (1)..(204): Homolog of NCBI NO: 15218311 NR Description: glutathione transferase, putative
MFGMRARVALREKGVEFEYREEDFSNKSPLLLQSNPIHKKIPVLVHNGKPVCESLNVVQYVDEAWPEKNPFFPSDPYGRAQARFWADFVDKKFTDAQFKVWGKKGEEQEAGKKEFIEAVKILESELGDKPYFGGDSFGYVDISLITFSSWFQAYEKFGNFSIESESPKLIAWAKRCMEKESVSKSLPDSEKIVAYAAEYRKNNL

SEQ ID NO: 21619 - protein, 201 aa, Arabidopsis thaliana
  peptide (1)..(201): Ceres Seq. ID no. 12369959
  misc_feature (69)..(177): Pfam Name: Glutathione S-transferase, C-terminal domain Pfam Description: Glutathione S-transferase, C-terminal domain
  misc_feature (1)..(198): Homolog of NCBI NO: 15218304 NR Description: glutathione transferase, putative
  misc_feature (1)..(198): Homolog of NCBI NO: 8052535 NR Description: F3F9.13 [Arabidopsis thaliana]
  misc_feature (1)..(198): Homolog of NCBI NO: 15220041 NR Description: glutathione transferase, putative; protein id:
  misc_feature (1)..(198): Homolog of NCBI NO: 8052534 NR Description: F3F9.11 [Arabidopsis thaliana]
  misc_feature (1)..(198): Homolog of NCBI NO: 21592644 NR Description: glutathione transferase, putative [Arabidopsis
  misc_feature (1)..(198): Homolog of NCBI NO: 18411929 NR Description: glutathione transferase, putative
  misc_feature (1)..(152): Homolog of NCBI NO: 8052534 NR Description: F3F9.11 [Arabidopsis thaliana]
  misc_feature (1)..(201): Homolog of NCBI NO: 21592638 NR Description: 2,4-D inducible glutathione S-transferase,
  misc_feature (1)..(201): Homolog of NCBI NO: 15218311 NR Description: glutathione transferase, putative
MRARVALREKGVEFEYREEDFSNKSPLLLQSNPIHKKIPVLVHNGKPVCESLNVVQYVDEAWPEKNPFFPSDPYGRAQARFWADFVDKKFTDAQFKVWGKKGEEQEAGKKEFIEAVKILESELGDKPYFGGDSFGYVDISLITFSSWFQAYEKFGNFSIESESPKLIAWAKRCMEKESVSKSLPDSEKIVAYAAEYRKNNL

SEQ ID NO: 21620 - DNA, 776 bp, Arabidopsis thaliana
  misc_feature (1)..(776): Ceres Seq. ID no. 12333448
  misc_feature: MA Experiment ID: 108573 Result: Up-regulated in Transcription
  misc_feature: MA Experiment 108573 PARAMETER Experiment Name: At_Drought_cDNA_P Parameter: Timepoint (hr) Value: 6
  misc_feature: MA Experiment 108573 PARAMETER Experiment Name: At_Drought_cDNA_P Parameter: Tissue Value: Aerial
  misc_feature: MA Experiment 108573 PARAMETER Experiment Name: At_Drought_cDNA_P Parameter: Treatment Value: Drought vs. No Drought
  misc_feature: MA Experiment ID: 108594 Result: Down-regulated in Transcription
  misc_feature: MA Experiment 108594 PARAMETER Experiment Name: At_Ler-rhl_Root_cDNA_P Parameter: Plant Line Value: null
  misc_feature: MA Experiment ID: 20000224 Result: Down-regulated in Transcription
  misc_feature: MA Experiment ID: 20000355 Result: Up-regulated in Transcription
  misc_feature: MA Experiment 20000355 PARAMETER Experiment Name: At_Siliques_Sub_P Parameter: Age (day) Value: 21
  misc_feature: MA Experiment 20000355 PARAMETER Experiment Name: At_Siliques_Sub_P Parameter: Organism Value: A. thaliana
  misc_feature: MA Experiment 20000355 PARAMETER Experiment Name: At_Siliques_Sub_P Parameter: Plant Line Value: WS
  misc_feature: MA Experiment 20000355 PARAMETER Experiment Name: At_Siliques_Sub_P Parameter: Tissue Value: Less Than 5mm Siliques vs. Whole Plant
  misc_feature: MA Experiment ID: 20000440 Result: Up-regulated in Transcription
  misc_feature: MA Experiment 20000440 PARAMETER Experiment Name: At_Closed-Flower__Sub_P Parameter: Tissue Value: Closed Flower vs. Whole Plant
ataagttgcctaataaacctatttctccgttcgttctctccctctctctcgcttcacgttggatcgaaatcggacaaaagtaaacgacaatggcggaagaattggagaaatctatgcacaaggaagaatctctgatggaaaagatcgctgataagatccacgatcacgactcttcgtcgtcgtctgattccgagcacgagaaaccagagtctccgtcagctttgaaggccaagatatatcgtttgtttggtagagagaagcctgttcataaggttctcggtggtggcttaccggctgatgtgttcttgtggagggacaaaaaactctcagcttctgttcttggtgtagcgactgcgatatgggttctgtttgaattggttgagtatcatttcttgagtcttgtgtgtcacattttgatattcgctctcgcagccctgtttttattgtccaatgctcatgcctttatgaacaagactccacctaaaattcctgaaatccatattaaagaggaacatttccttttgattgtttctgcactgagaaacgagctcaaccaggcctttgttattctaaggagcattgccctaggaagggacttgaagaaatttctcatggtggtttgtgggctgtggataatctcggttgtgggaaactggttcaacttcttgactcttgtatacatctgttttgtggtgttacatacagtaccaatgttgtatgagaaacatgaggacaaggtagatccagtggcagagaagacgttgaaggagctgaag

SEQ ID NO: 21621 - protein, 229 aa, Arabidopsis thaliana
  peptide (1)..(229): Ceres Seq. ID no. 12333449
  misc_feature (3)..(228): Homolog of NCBI NO: 15234108 NR Description: hypothetical protein; protein id: At4g01230.1
  misc_feature (10)..(228): Homolog of NCBI NO: 34909318 NR Description: OSJNBb0021A09.5 [Oryza sativa (japonica
  misc_feature (1)..(44): Homolog of NCBI NO: 34904202 NR Description: P0492F05.25 [Oryza sativa (japonica
  misc_feature (46)..(228): Homolog of NCBI NO: 34904202 NR Description: P0492F05.25 [Oryza sativa (japonica
  misc_feature (1)..(228): Homolog of NCBI NO: 15222616 NR Description: hypothetical protein
  misc_feature (11)..(228): Homolog of NCBI NO: 15237093 NR Description: putative protein
  misc_feature (10)..(228): Homolog of NCBI NO: 15238125 NR Description: putative protein
  misc_feature (1)..(228): Homolog of NCBI NO: 15236556 NR Description: putative protein
  misc_feature (1)..(228): Homolog of NCBI NO: 15233147 NR Description: putative protein; protein id: At3g61560.1
  misc_feature (1)..(228): Homolog of NCBI NO: 18406991 NR Description: expressed protein
MAEELEKSMHKEESLMEKIADKIHDHDSSSSSDSEHEKPESPSALKAKIYRLFGREKPVHKVLGGGLPADVFLWRDKKLSASVLGVATAIWVLFELVEYHFLSLVCHILIFALAALFLLSNAHAFMNKTPPKIPEIHIKEEHFLLIVSALRNELNQAFVILRSIALGRDLKKFLMVVCGLWIISVVGNWFNFLTLVYICFVVLHTVPMLYEKHEDKVDPVAEKTLKELK

SEQ ID NO: 21622 - protein, 221 aa, Arabidopsis thaliana
  peptide (1)..(221): Ceres Seq. ID no. 12333450
  misc_feature (1)..(220): Homolog of NCBI NO: 15234108 NR Description: hypothetical protein; protein id: At4g01230.1
  misc_feature (2)..(220): Homolog of NCBI NO: 34909318 NR Description: OSJNBb0021A09.5 [Oryza sativa (japonica
  misc_feature (1)..(36): Homolog of NCBI NO: 34904202 NR Description: P0492F05.25 [Oryza sativa (japonica
  misc_feature (38)..(220): Homolog of NCBI NO: 34904202 NR Description: P0492F05.25 [Oryza sativa (japonica
  misc_feature (1)..(220): Homolog of NCBI NO: 15222616 NR Description: hypothetical protein
  misc_feature (3)..(220): Homolog of NCBI NO: 15237093 NR Description: putative protein
  misc_feature (2)..(220): Homolog of NCBI NO: 15238125 NR Description: putative protein
  misc_feature (1)..(220): Homolog of NCBI NO: 15236556 NR Description: putative protein
  misc_feature (1)..(220): Homolog of NCBI NO: 15233147 NR Description: putative protein; protein id: At3g61560.1
  misc_feature (1)..(220): Homolog of NCBI NO: 18406991 NR Description: expressed protein
MHKEESLMEKIADKIHDHDSSSSSDSEHEKPESPSALKAKIYRLFGREKPVHKVLGGGLPADVFLWRDKKLSASVLGVATAIWVLFELVEYHFLSLVCHILIFALAALFLLSNAHAFMNKTPPKIPEIHIKEEHFLLIVSALRNELNQAFVILRSIALGRDLKKFLMVVCGLWIISVVGNWFNFLTLVYICFVVLHTVPMLYEKHEDKVDPVAEKTLKELK

SEQ ID NO: 21623 - protein, 214 aa, Arabidopsis thaliana
  peptide (1)..(214): Ceres Seq. ID no. 12333451
  misc_feature (1)..(213): Homolog of NCBI NO: 34909318 NR Description: OSJNBb0021A09.5 [Oryza sativa (japonica
  misc_feature (1)..(29): Homolog of NCBI NO: 34904202 NR Description: P0492F05.25 [Oryza sativa (japonica
  misc_feature (31)..(213): Homolog of NCBI NO: 34904202 NR Description: P0492F05.25 [Oryza sativa (japonica
  misc_feature (1)..(213): Homolog of NCBI NO: 15222616 NR Description: hypothetical protein
  misc_feature (1)..(213): Homolog of NCBI NO: 15237093 NR Description: putative protein
  misc_feature (1)..(213): Homolog of NCBI NO: 15238125 NR Description: putative protein
  misc_feature (1)..(213): Homolog of NCBI NO: 15236556 NR Description: putative protein
  misc_feature (1)..(213): Homolog of NCBI NO: 15233147 NR Description: putative protein; protein id: At3g61560.1
  misc_feature (1)..(213): Homolog of NCBI NO: 18406991 NR Description: expressed protein
  misc_feature (1)..(213): Homolog of NCBI NO: 15234108 NR Description: hypothetical protein; protein id: At4g01230.1
MEKIADKIHDHDSSSSSDSEHEKPESPSALKAKIYRLFGREKPVHKVLGGGLPADVFLWRDKKLSASVLGVATAIWVLFELVEYHFLSLVCHILIFALAALFLLSNAHAFMNKTPPKIPEIHIKEEHFLLIVSALRNELNQAFVILRSIALGRDLKKFLMVVCGLWIISVVGNWFNFLTLVYICFVVLHTVPMLYEKHEDKVDPVAEKTLKELK

SEQ ID NO: 21624 - DNA, 1625 bp, Arabidopsis thaliana
  misc_feature (1)..(1625): Ceres Seq. ID no. 13603067
  misc_feature: MA Experiment ID: 20000184 Result: Up-regulated in Transcription
  misc_feature: MA Experiment 20000184 PARAMETER Experiment Name: At_Shoots__P Parameter: Age (day) Value: 7
  misc_feature: MA Experiment 20000184 PARAMETER Experiment Name: At_Shoots__P Parameter: Tissue Value: Shoots vs. Whole Plant
  misc_feature: MA Experiment ID: 20001557 Result: Up-regulated in Transcription
  misc_feature: MA Experiment 20001557 PARAMETER Experiment Name: At_Drought_Soil_Dry_P Parameter: Age (day) Value: 27
  misc_feature: MA Experiment 20001557 PARAMETER Experiment Name: At_Drought_Soil_Dry_P Parameter: Organism Value: A. thaliana
  misc_feature: MA Experiment 20001557 PARAMETER Experiment Name: At_Drought_Soil_Dry_P Parameter: Plant Line Value: WS
  misc_feature: MA Experiment 20001557 PARAMETER Experiment Name: At_Drought_Soil_Dry_P Parameter: Post Timepoint (hr) Value: 3
  misc_feature: MA Experiment 20001557 PARAMETER Experiment Name: At_Drought_Soil_Dry_P Parameter: Post-Treatment Value: Re-Water vs. No Drought
  misc_feature: MA Experiment 20001557 PARAMETER Experiment Name: At_Drought_Soil_Dry_P Parameter: Timepoint (day) Value: 13
  misc_feature: MA Experiment 20001557 PARAMETER Experiment Name: At_Drought_Soil_Dry_P Parameter: Treatment Value: Drought vs. No Drought
  misc_feature: MA Experiment ID: 20001558 Result: Up-regulated in Transcription
  misc_feature: MA Experiment 20001558 PARAMETER Experiment Name: At_Drought_Soil_Dry_P Parameter: Age (day) Value: 27
  misc_feature: MA Experiment 20001558 PARAMETER Experiment Name: At_Drought_Soil_Dry_P Parameter: Organism Value: A. thaliana
  misc_feature: MA Experiment 20001558 PARAMETER Experiment Name: At_Drought_Soil_Dry_P Parameter: Plant Line Value: WS
  misc_feature: MA Experiment 20001558 PARAMETER Experiment Name: At_Drought_Soil_Dry_P Parameter: Post Timepoint (hr) Value: 6
  misc_feature: MA Experiment 20001558 PARAMETER Experiment Name: At_Drought_Soil_Dry_P Parameter: Post-Treatment Value: Re-Water vs. No Drought
  misc_feature: MA Experiment 20001558 PARAMETER Experiment Name: At_Drought_Soil_Dry_P Parameter: Timepoint (day) Value: 13
  misc_feature: MA Experiment 20001558 PARAMETER Experiment Name: At_Drought_Soil_Dry_P Parameter: Treatment Value: Drought vs. No Drought
ctctttcggatattccaccagtctctcgcaatcttcgctcttctctttgctctctctctctcaacgcggttcagatccgagtttgggagattcaagctccctgaaaaaagccctttactctcgcttaccaactttgctccagcatggcaggatctgcaccagaaggcacacagtttgatgcacgtcagtttgaccagaaactcaatgaagtacttgagggacaagatgagttcttcacatcctatgatgatgttcatgagagctttgatgccatgggtcttcaagagaaccttctcaggggtatttatgcttatggttttgagaagccttctgctattcagcaaagaggaatcgtccccttctgtaagggtcttgatgtgattcaacaggctcagtctggtactgggaaaacagcaactttctgctctggtgtcttgcagcagctggacttctcccttatccagtgtcaggctttggttctagctccaactagagagcttgctcagcaaattgagaaggtcatgagggcccttggtgattaccttggtgtcaaggttcacgcctgtgttggtggaaccagtgtccgtgaggatcagcgcatcctccaagctggtgtccatgttgttgttggaactccagggcgtgtctttgacatgttgaagaggcagtctcttcgtgctgacaacatcaagatgtttgttctcgatgaagctgatgaaatgctctcccgtggtttcaaggaccagatctatgacatattccagcttcttccaccaaagatccaagttggtgtgttctccgcaacaatgccaccagaagctcttgagatcacaaggaagttcatgagcaagccagtgagaatcttggtgaagcgtgatgagcttacccttgaaggtatcaagcagttctacgtcaacgttgagaaagaagagtggaagctcgagacactctgtgatctctacgagactcttgccatcactcagagtgtcatcttcgtgaacaccaggcgtaaggttgattggctcacagacaaaatgagaagccgtgaccacacagtctctgcaactcacggagacatggaccagaacaccagggacatcatcatgagagagttcaggtctggttcctcccgtgttctcatcaccactgacctcttagctcgtggtattgatgtccaacaagtctccctggttatcaacttcgatctcccaactcagccagagaactaccttcaccgtatcggaagaagtggaaggttcgggagaaagggtgttgcgatcaatttcgtgacccgtgatgatgagaggatgctgtttgatattcagaaattctacaatgtggttgtcgaagagctgccttcgaacgtggccgatctgctgtgaagggagaaaagaagtcggttctgttgctgtgtttgctctgccgtactagtatcaccggagaagaaaggttttcttgttttgcaaggcactctttgatctgattttgacccgtcgtctatcagcgatttacatttcttaaattttcttagttgttgttctctcctctctctcccagctacgaacatatctctctcttcttgaccatttttaagtttaagtcatatggagtatttatttcttcac

SEQ ID NO: 21625 - protein, 412 aa, Arabidopsis thaliana; identical to SEQ ID NO: 21228
  peptide (1)..(412): Ceres Seq. ID no. 13603068
  misc_feature (52)..(255): Pfam Name: DEAD/DEAH box helicase Pfam Description: DEAD/DEAH box helicase
  misc_feature (1)..(412): Homolog of NCBI NO: 1170511 NR Description: Eukaryotic initiation factor 4A-10 (eIF-4A-10)
  misc_feature (1)..(412): Homolog of NCBI NO: 2119933 NR Description: translation initiation factor eIF-4A.11 - common
  misc_feature (1)..(412): Homolog of NCBI NO: 2500518 NR Description: Eukaryotic initiation factor 4A-11 (eIF-4A-11)
  misc_feature (1)..(412): Homolog of NCBI NO: 2500520 NR Description: Eukaryotic initiation factor 4A-14 (eIF-4A-14)
  misc_feature (1)..(412): Homolog of NCBI NO: 2119938 NR Description: translation initiation factor eIF-4A.14 - common
  misc_feature (1)..(412): Homolog of NCBI NO: 1170506 NR Description: Eukaryotic initiation factor 4A-2 (eIF-4A-2)
  misc_feature (1)..(412): Homolog of NCBI NO: 15221761 NR Description: eukaryotic translation initiation factor 4A-2
  misc_feature (1)..(412): Homolog of NCBI NO: 21555870 NR Description: Eukaryotic initiation factor 4A, putative
  misc_feature (1)..(412): Homolog of NCBI NO: 19698881 NR Description: eukaryotic translation initiation factor
  misc_feature (1)..(412): Homolog of NCBI NO: 18400210 NR Description: eukaryotic translation initiation factor 4A-1

SEQ ID NO: 21626 - protein, 369 aa, Arabidopsis thaliana; identical to SEQ ID NO: 21229
  peptide (1)..(369): Ceres Seq. ID no. 13603069
  misc_feature (9)..(212): Pfam Name: DEAD/DEAH box helicase Pfam Description: DEAD/DEAH box helicase
  misc_feature (1)..(369): Homolog of NCBI NO: 1170511 NR Description: Eukaryotic initiation factor 4A-10 (eIF-4A-10)
  misc_feature (1)..(369): Homolog of NCBI NO: 2119933 NR Description: translation initiation factor eIF-4A.11 - common
  misc_feature (1)..(369): Homolog of NCBI NO: 2500518 NR Description: Eukaryotic initiation factor 4A-11 (eIF-4A-11)
  misc_feature (1)..(369): Homolog of NCBI NO: 2500520 NR Description: Eukaryotic initiation factor 4A-14 (eIF-4A-14)
  misc_feature (1)..(369): Homolog of NCBI NO: 2119938 NR Description: translation initiation factor eIF-4A.14 - common
  misc_feature (1)..(369): Homolog of NCBI NO: 1170506 NR Description: Eukaryotic initiation factor 4A-2 (eIF-4A-2)
  misc_feature (1)..(369): Homolog of NCBI NO: 15221761 NR Description: eukaryotic translation initiation factor 4A-2
  misc_feature (1)..(369): Homolog of NCBI NO: 21555870 NR Description: Eukaryotic initiation factor 4A, putative
  misc_feature (1)..(369): Homolog of NCBI NO: 19698881 NR Description: eukaryotic translation initiation factor
  misc_feature (1)..(369): Homolog of NCBI NO: 18400210 NR Description: eukaryotic translation initiation factor 4A-1

SEQ ID NO: 21627 - protein, 286 aa, Arabidopsis thaliana; identical to SEQ ID NO: 21230
  peptide (1)..(286): Ceres Seq. ID no. 13603070
  misc_feature (1)..(129): Pfam Name: DEAD/DEAH box helicase Pfam Description: DEAD/DEAH box helicase
  misc_feature (1)..(286): Homolog of NCBI NO: 1170511 NR Description: Eukaryotic initiation factor 4A-10 (eIF-4A-10)
  misc_feature (1)..(286): Homolog of NCBI NO: 2119933 NR Description: translation initiation factor eIF-4A.11 - common
  misc_feature (1)..(286): Homolog of NCBI NO: 2500518 NR Description: Eukaryotic initiation factor 4A-11 (eIF-4A-11)
  misc_feature (1)..(286): Homolog of NCBI NO: 2500520 NR Description: Eukaryotic initiation factor 4A-14 (eIF-4A-14)
  misc_feature (1)..(286): Homolog of NCBI NO: 2119938 NR Description: translation initiation factor eIF-4A.14 - common
  misc_feature (1)..(286): Homolog of NCBI NO: 1170506 NR Description: Eukaryotic initiation factor 4A-2 (eIF-4A-2)
  misc_feature (1)..(286): Homolog of NCBI NO: 15221761 NR Description: eukaryotic translation initiation factor 4A-2
  misc_feature (1)..(286): Homolog of NCBI NO: 21555870 NR Description: Eukaryotic initiation factor 4A, putative
  misc_feature (1)..(286): Homolog of NCBI NO: 19698881 NR Description: eukaryotic translation initiation factor
  misc_feature (1)..(286): Homolog of NCBI NO: 18400210 NR Description: eukaryotic translation initiation factor 4A-1

SEQ ID NO: 21628 - DNA, 903 bp, Arabidopsis thaliana
  misc_feature (1)..(903): Ceres Seq. ID no. 12333566
  misc_feature: MA Experiment ID: 20000090 Result: Up-regulated in Transcription
  misc_feature: MA Experiment ID: 20000184 Result: Down-regulated in Transcription
  misc_feature: MA Experiment 20000184 PARAMETER Experiment Name: At_Shoots__P Parameter: Age (day) Value: 7
  misc_feature: MA Experiment 20000184 PARAMETER Experiment Name: At_Shoots__P Parameter: Tissue Value: Shoots vs. Whole Plant
  misc_feature: MA Experiment ID: 20001905 Result: Down-regulated in Transcription
  misc_feature: MA Experiment 20001905 PARAMETER Experiment Name: At_Drought_Reproduction_P Parameter: Age (day) Value: 40
  misc_feature: MA Experiment 20001905 PARAMETER Experiment Name: At_Drought_Reproduction_P Parameter: Organism Value: A. thaliana
  misc_feature: MA Experiment 20001905 PARAMETER Experiment Name: At_Drought_Reproduction_P Parameter: Plant Line Value: WS
  misc_feature: MA Experiment 20001905 PARAMETER Experiment Name: At_Drought_Reproduction_P Parameter: Timepoint (day) Value: 10
  misc_feature: MA Experiment 20001905 PARAMETER Experiment Name: At_Drought_Reproduction_P Parameter: Tissue Value: Rosettes
  misc_feature: MA Experiment 20001905 PARAMETER Experiment Name: At_Drought_Reproduction_P Parameter: Treatment Value: Drought vs. No Drought
gacttctgagatcgtcttgttcaccaaagagaagaagactaactgtgttttttttttctttcctcgatgcctagatcaagcagatgggtcaatcagcgagctacctctaagattaaaaaatttatactctttttgggtgtagcctttgtcttctacctctacagatacccttcttcgccatcgacggtggaacaatcatccacttccatctacaacatttccgttaaggatattgaagggaaagatgtgagtttgagcaagtttaccgggaaagtgcttcttatagtcaatgtagcctctaagtgtggtctaacacatggaaactacaaagaaatgaacattctgtatgccaagtacaaaactcaggggtttgagatcttagcatttccttgcaaccaatttggtagtcaagagccaggcagcaacatggagatcaaggaaaccgtttgcaatatcttcaaagcagaattcccaatctttgacaagattgaagtaaatggaaagaacacttgtcccctttacaatttcttaaaagaacaaaaaggaggattgtttggggatgctattaagtggaatttcgcaaagtttctggtagacagacaaggaaatgtcgttgaccgatatgctccaactacatcacctcttgaaattgagaaggatatcgtcaagctattggcatctgcttgaacatatatgtcaaaggacaggagagcaaaaagcatcgcatcaaacatgtctgagactgagaatgaaaaccactttctatacttattctttacctttcatgtttatccaaaaccatccatggaaaagaagatgcttgtctgaatctgtgaacctcattttctgtaacaaaaccccaaaaatgcttatgaaacatcaataaagaacaaagttttattt

SEQ ID NO: 21629 - protein, 206 aa, Arabidopsis thaliana
  peptide (1)..(206): Ceres Seq. ID no. 12333567
  misc_feature (47)..(156): Pfam Name: Glutathione peroxidase Pfam Description: Glutathione peroxidase
  misc_feature (44)..(205): Homolog of NCBI NO: 22268405 NR Description: putative glutathione peroxidase [Zea mays]
  misc_feature (43)..(206): Homolog of NCBI NO: 544437 NR Description: Probable phospholipid hydroperoxide glutathione
  misc_feature (43)..(206): Homolog of NCBI NO: 485512 NR Description: glutathione peroxidase (EC 1.11.1.9) - sweet
  misc_feature (43)..(206): Homolog of NCBI NO: 34786892 NR Description: phospholipid hydroperoxide glutathione peroxidase
  misc_feature (44)..(206): Homolog of NCBI NO: 34334012 NR Description: cytosolic glutathione peroxidase [Triticum
  misc_feature (44)..(206): Homolog of NCBI NO: 21360380 NR Description: glutathione peroxidase 1 [Oryza sativa]
  misc_feature (42)..(206): Homolog of NCBI NO: 21068666 NR Description: putative phospholipid hydroperoxide glutathione
  misc_feature (42)..(206): Homolog of NCBI NO: 17646156 NR Description: phospholipid hydroperoxide glutathione peroxidase
  misc_feature (14)..(205): Homolog of NCBI NO: 18028086 NR Description: phospholipid hydroperoxide glutathione peroxidase
  misc_feature (1)..(206): Homolog of NCBI NO: 15224272 NR Description: glutathione peroxidase, putative
MPRSSRWVNQRATSKIKKFILFLGVAFVFYLYRYPSSPSTVEQSSTSIYNISVKDIEGKDVSLSKFTGKVLLIVNVASKCGLTHGNYKEMNILYAKYKTQGFEILAFPCNQFGSQEPGSNMEIKETVCNIFKAEFPIFDKIEVNGKNTCPLYNFLKEQKGGLFGDAIKWNFAKFLVDRQGNVVDRYAPTTSPLEIEKDIVKLLASA

SEQ ID NO: 21630 - protein, 117 aa, Arabidopsis thaliana
  peptide (1)..(117): Ceres Seq. ID no. 12333568
  misc_feature (1)..(67): Pfam Name: Glutathione peroxidase Pfam Description: Glutathione peroxidase
  misc_feature (1)..(116): Homolog of NCBI NO: 22268405 NR Description: putative glutathione peroxidase [Zea mays]
  misc_feature (1)..(117): Homolog of NCBI NO: 544437 NR Description: Probable phospholipid hydroperoxide glutathione
  misc_feature (1)..(117): Homolog of NCBI NO: 485512 NR Description: glutathione peroxidase (EC 1.11.1.9) - sweet
  misc_feature (1)..(117): Homolog of NCBI NO: 34786892 NR Description: phospholipid hydroperoxide glutathione peroxidase
  misc_feature (1)..(117): Homolog of NCBI NO: 34334012 NR Description: cytosolic glutathione peroxidase [Triticum
  misc_feature (1)..(117): Homolog of NCBI NO: 21360380 NR Description: glutathione peroxidase 1 [Oryza sativa]
  misc_feature (1)..(117): Homolog of NCBI NO: 21068666 NR Description: putative phospholipid hydroperoxide glutathione
  misc_feature (1)..(117): Homolog of NCBI NO: 17646156 NR Description: phospholipid hydroperoxide glutathione peroxidase
  misc_feature (1)..(116): Homolog of NCBI NO: 18028086 NR Description: phospholipid hydroperoxide glutathione peroxidase
  misc_feature (1)..(117): Homolog of NCBI NO: 15224272 NR Description: glutathione peroxidase, putative
MNILYAKYKTQGFEILAFPCNQFGSQEPGSNMEIKETVCNIFKAEFPIFDKIEVNGKNTCPLYNFLKEQKGGLFGDAIKWNFAKFLVDRQGNVVDRYAPTTSPLEIEKDIVKLLASA

SEQ ID NO: 21631 - DNA, 775 bp, Arabidopsis thaliana
  misc_feature (1)..(775): Ceres Seq. ID no. 12332713
  misc_feature: MA Experiment ID: 108463 Result: Down-regulated in Transcription
  misc_feature: MA Experiment 108463 PARAMETER Experiment Name: At_Germinating_Seeds_cDNA_P Parameter: Age (day) Value: 3 vs. 0
  misc_feature: MA Experiment 108463 PARAMETER Experiment Name: At_Germinating_Seeds_cDNA_P Parameter: Tissue Value: Germinating Seeds
  misc_feature: MA Experiment ID: 108464 Result: Down-regulated in Transcription
  misc_feature: MA Experiment 108464 PARAMETER Experiment Name: At_Germinating_Seeds_cDNA_P Parameter: Age (day) Value: 4 vs. 0
  misc_feature: MA Experiment 108464 PARAMETER Experiment Name: At_Germinating_Seeds_cDNA_P Parameter: Tissue Value: Germinating Seeds
  misc_feature: MA Experiment ID: 108608 Result: Up-regulated in Transcription
  misc_feature: MA Experiment 108608 PARAMETER Experiment Name: At_100uM_ABA_cDNA_P Parameter: Timepoint (hr) Value: 1
  misc_feature: MA Experiment 108608 PARAMETER Experiment Name: At_100uM_ABA_cDNA_P Parameter: Tissue Value: Aerial
  misc_feature: MA Experiment 108608 PARAMETER Experiment Name: At_100uM_ABA_cDNA_P Parameter: Treatment Value: 100uM ABA vs. No Treatment
  misc_feature: MA Experiment ID: 108668 Result: Up-regulated in Transcription
  misc_feature: MA Experiment 108668 PARAMETER Experiment Name: At_2mM_SA_cDNA_P Parameter: Plant Line Value: WS
  misc_feature: MA Experiment 108668 PARAMETER Experiment Name: At_2mM_SA_cDNA_P Parameter: Timepoint (hr) Value: 6
  misc_feature: MA Experiment 108668 PARAMETER Experiment Name: At_2mM_SA_cDNA_P Parameter: Treatment Value: 2mM SA vs. No Treatment
  misc_feature: MA Experiment ID: 20000070 Result: Up-regulated in Transcription
  misc_feature: MA Experiment 20000070 PARAMETER Experiment Name: At_100uM_ABA_Mutants_cDNA_P Parameter: Plant Line Value: CS24
  misc_feature: MA Experiment 20000070 PARAMETER Experiment Name: At_100uM_ABA_Mutants_cDNA_P Parameter: Timepoint (hr) Value: 6
  misc_feature: MA Experiment 20000070 PARAMETER Experiment Name: At_100uM_ABA_Mutants_cDNA_P Parameter: Tissue Value: Aerial
  misc_feature: MA Experiment 20000070 PARAMETER Experiment Name: At_100uM_ABA_Mutants_cDNA_P Parameter: Treatment Value: 100uM ABA vs. No Treatment
  misc_feature: MA Experiment ID: 20000090 Result: Up-regulated in Transcription
  misc_feature: MA Experiment ID: 20000144 Result: Down-regulated in Transcription
  misc_feature: MA Experiment 20000144 PARAMETER Experiment Name: At_42deg_Heat_cDNA_P Parameter: Temperature (deg C) Value: 42 vs. 22
  misc_feature: MA Experiment 20000144 PARAMETER Experiment Name: At_42deg_Heat_cDNA_P Parameter: Timepoint (hr) Value: 1
  misc_feature: MA Experiment 20000144 PARAMETER Experiment Name: At_42deg_Heat_cDNA_P Parameter: Tissue Value: Aerial
  misc_feature: MA Experiment ID: 20000166 Result: Up-regulated in Transcription
  misc_feature: MA Experiment 20000166 PARAMETER Experiment Name: At_100uM_ABA_P Parameter: Age (day) Value: 14
  misc_feature: MA Experiment 20000166 PARAMETER Experiment Name: At_100uM_ABA_P Parameter: Organism Value: A. thaliana
  misc_feature: MA Experiment 20000166 PARAMETER Experiment Name: At_100uM_ABA_P Parameter: Plant Line Value: WS
  misc_feature: MA Experiment 20000166 PARAMETER Experiment Name: At_100uM_ABA_P Parameter: Timepoint (hr) Value: 1
  misc_feature: MA Experiment 20000166 PARAMETER Experiment Name: At_100uM_ABA_P Parameter: Tissue Value: Aerial
  misc_feature: MA Experiment 20000166 PARAMETER Experiment Name: At_100uM_ABA_P Parameter: Treatment Value: 100uM ABA vs. No Treatment
  misc_feature: MA Experiment ID: 20000171 Result: Down-regulated in Transcription
  misc_feature: MA Experiment 20000171 PARAMETER Experiment Name: At_42deg_Heat_P Parameter: Age (day) Value: 14
  misc_feature: MA Experiment 20000171 PARAMETER Experiment Name: At_42deg_Heat_P Parameter: Organism Value: A. thaliana
  misc_feature: MA Experiment 20000171 PARAMETER Experiment Name: At_42deg_Heat_P Parameter: Plant Line Value: WS
  misc_feature: MA Experiment 20000171 PARAMETER Experiment Name: At_42deg_Heat_P Parameter: Temperature (deg C) Value: 42 vs. 22
  misc_feature: MA Experiment 20000171 PARAMETER Experiment Name: At_42deg_Heat_P Parameter: Timepoint (hr) Value: 1
  misc_feature: MA Experiment 20000171 PARAMETER Experiment Name: At_42deg_Heat_P Parameter: Tissue Value: Aerial
  misc_feature: MA Experiment ID: 20000173 Result: Down-regulated in Transcription
  misc_feature: MA Experiment 20000173 PARAMETER Experiment Name: At_42deg_Heat_P Parameter: Age (day) Value: 14
  misc_feature: MA Experiment 20000173 PARAMETER Experiment Name: At_42deg_Heat_P Parameter: Organism Value: A. thaliana
  misc_feature: MA Experiment 20000173 PARAMETER Experiment Name: At_42deg_Heat_P Parameter: Plant Line Value: WS
  misc_feature: MA Experiment 20000173 PARAMETER Experiment Name: At_42deg_Heat_P Parameter: Temperature (deg C) Value: 42 vs. 22
  misc_feature: MA Experiment 20000173 PARAMETER Experiment Name: At_42deg_Heat_P Parameter: Timepoint (hr) Value: 6
  misc_feature: MA Experiment 20000173 PARAMETER Experiment Name: At_42deg_Heat_P Parameter: Tissue Value: Aerial
  misc_feature: MA Experiment ID: 20000182 Result: Up-regulated in Transcription
  misc_feature: MA Experiment 20000182 PARAMETER Experiment Name: At_2mM_SA_P Parameter: Age (day) Value: 14
  misc_feature: MA Experiment 20000182 PARAMETER Experiment Name: At_2mM_SA_P Parameter: Organism Value: A. thaliana
  misc_feature: MA Experiment 20000182 PARAMETER Experiment Name: At_2mM_SA_P Parameter: Plant Line Value: WS
  misc_feature: MA Experiment 20000182 PARAMETER Experiment Name: At_2mM_SA_P Parameter: Timepoint (hr) Value: 6
  misc_feature: MA Experiment 20000182 PARAMETER Experiment Name: At_2mM_SA_P Parameter: Tissue Value: Aerial
  misc_feature: MA Experiment 20000182 PARAMETER Experiment Name: At_2mM_SA_P Parameter: Treatment Value: 2mM SA vs. No Treatment
  misc_feature: MA Experiment ID: 20000185 Result: Up-regulated in Transcription
  misc_feature: MA Experiment 20000185 PARAMETER Experiment Name: At_Roots__P Parameter: Age (day) Value: 7 vs. 21
  misc_feature: MA Experiment 20000185 PARAMETER Experiment Name: At_Roots__P Parameter: Organism Value: A. thaliana
  misc_feature: MA Experiment 20000185 PARAMETER Experiment Name: At_Roots__P Parameter: Tissue Value: Roots vs. Whole Plant
  misc_feature: MA Experiment ID: 20000227 Result: Up-regulated in Transcription
  misc_feature: MA Experiment 20000227 PARAMETER Experiment Name: At_Root-Tips-vs-Tops_P Parameter: Tissue Value: Root Tips vs. Root Tops
  misc_feature: MA Experiment ID: 20000438 Result: Down-regulated in Transcription
  misc_feature: MA Experiment 20000438 PARAMETER Experiment Name: At_Shoots__P Parameter: Age (day) Value: 14
  misc_feature: MA Experiment 20000438 PARAMETER Experiment Name: At_Shoots__P Parameter: Tissue Value: Shoots vs. Whole Plant
  misc_feature: MA Experiment ID: 20000527 Result: Down-regulated in Transcription
  misc_feature: MA Experiment 20000527 PARAMETER Experiment Name: At_10percent_PEG_P Parameter: Age (day) Value: 20
  misc_feature: MA Experiment 20000527 PARAMETER Experiment Name: At_10percent_PEG_P Parameter: Organism Value: A. thaliana
  misc_feature: MA Experiment 20000527 PARAMETER Experiment Name: At_10percent_PEG_P Parameter: Plant Line Value: WS
  misc_feature: MA Experiment 20000527 PARAMETER Experiment Name: At_10percent_PEG_P Parameter: Timepoint (day) Value: 20
  misc_feature: MA Experiment 20000527 PARAMETER Experiment Name: At_10percent_PEG_P Parameter: Tissue Value: Whole Plant
  misc_feature: MA Experiment 20000527 PARAMETER Experiment Name: At_10percent_PEG_P Parameter: Treatment Value: 10percent PEG vs. No Treatment
caatgaagattatggagaagcagtttctggattctttggtgttaccggcgctgcccccaaggttcttgtatacactggtaatgaagatatgaggaagtttattctggacggtgaattgaccgtaaataacattaagacacttgcggaagatttcctagcagacaaactgaagcctttctacaagtcagatccactaccggaaaataacgatggtgatgttaaggtcattgtgggaaacaattttgatgagattgttcttgacgagtcaaaggatgttcttctcgagatatatgctccttggtgtggccactgccaatcatttgagccgatttacaacaagcttggaaagtatttaaaaggcattgactcgttagttgtagcaaagatggatggtaccagcaatgagcatcctagagcaaaggctgatgggttcccaacaatcctgttcttccctggtggaaacaaaagcttcgatccgatcgctgtggatgttgaccgtacagtagtggaactgtacaaattcctgaagaagcacgcatcaatcccatttaaacttgagaaaccggcgacacctgaaccggtgatctcgaccatgaaatctgatgagaagatcgagggtgatagttccaaggatgagttgtgatgatcggaacagagtgtgtaacaaggctatagatgatgactcttctataaatgatagaaaatgttttgccctttgtttttttccattgttgtatgctatgaaatgaataattaaaagaagttttggtttctc

SEQ ID NO: 21632 - protein, 213 aa, Arabidopsis thaliana
  peptide (1)..(213): Ceres Seq. ID no. 12332714
  misc_feature (72)..(180): Pfam Name: Thioredoxin Pfam Description: Thioredoxin
  misc_feature (72)..(180): Pfam Name: Thioredoxin Pfam Description: Thioredoxin
  misc_feature (1)..(213): Homolog of NCBI NO: 5902592 NR Description: protein disulfide isomerase precursor
  misc_feature (1)..(213): Homolog of NCBI NO: 7437394 NR Description: protein disulfide-isomerase (EC 5.3.4.1) RB60 -
  misc_feature (1)..(213): Homolog of NCBI NO: 20805287 NR Description: protein disulfide isomerase-like PDI-M
  misc_feature (1)..(193): Homolog of NCBI NO: 20805285 NR Description: protein disulfide isomerase-like PDI-H
  misc_feature (1)..(161): Homolog of NCBI NO: 30697408 NR Description: protein disulfide isomerase family [Arabidopsis
  misc_feature (1)..(213): Homolog of NCBI NO: 5902592 NR Description: protein disulfide isomerase precursor
  misc_feature (1)..(213): Homolog of NCBI NO: 20805287 NR Description: protein disulfide isomerase-like PDI-M
  misc_feature (1)..(161): Homolog of NCBI NO: 30697408 NR Description: protein disulfide isomerase family [Arabidopsis
  misc_feature (1)..(213): Homolog of NCBI NO: 22331799 NR Description: protein disulfide-isomerase-like protein
  misc_feature (1)..(213): Homolog of NCBI NO: 7437396 NR Description: protein disulfide-isomerase homolog F28P10.60 -
  misc_feature (1)..(213): Homolog of NCBI NO: 28140231 NR Description: protein disulphide isomerase [Elaeis guineensis]
  misc_feature (1)..(211): Homolog of NCBI NO: 21593313 NR Description: protein disulfide isomerase precursor-like
  misc_feature (1)..(211): Homolog of NCBI NO: 30697404 NR Description: protein disulfide isomerase family [Arabidopsis
  misc_feature (1)..(193): Homolog of NCBI NO: 20805285 NR Description: protein disulfide isomerase-like PDI-H
  misc_feature (1)..(213): Homolog of NCBI NO: 7437394 NR Description: protein disulfide-isomerase (EC 5.3.4.1) RB60 -
  misc_feature (1)..(211): Homolog of NCBI NO: 30697404 NR Description: protein disulfide isomerase family [Arabidopsis
  misc_feature (1)..(211): Homolog of NCBI NO: 21593313 NR Description: protein disulfide isomerase precursor-like
  misc_feature (1)..(213): Homolog of NCBI NO: 28140231 NR Description: protein disulphide isomerase [Elaeis guineensis]
  misc_feature (1)..(213): Homolog of NCBI NO: 7437396 NR Description: protein disulfide-isomerase homolog F28P10.60 -
  misc_feature (1)..(213): Homolog of NCBI NO: 22331799 NR Description: protein disulfide-isomerase-like protein
NEDYGEAVSGFFGVTGAAPKVLVYTGNEDMRKFILDGELTVNNIKTLAEDFLADKLKPFYKSDPLPENNDGDVKVIVGNNFDEIVLDESKDVLLEIYAPWCGHCQSFEPIYNKLGKYLKGIDSLVVAKMDGTSNEHPRAKADGFPTILFFPGGNKSFDPIAVDVDRTVVELYKFLKKHASIPFKLEKPATPEPVISTMKSDEKIEGDSSKDEL

SEQ ID NO: 21633 - protein, 184 aa, Arabidopsis thaliana
  peptide (1)..(184): Ceres Seq. ID no. 12332715
  misc_feature (43)..(151): Pfam Name: Thioredoxin Pfam Description: Thioredoxin
  misc_feature (43)..(151): Pfam Name: Thioredoxin Pfam Description: Thioredoxin
  misc_feature (1)..(184): Homolog of NCBI NO: 5902592 NR Description: protein disulfide isomerase precursor
  misc_feature (1)..(184): Homolog of NCBI NO: 7437394 NR Description: protein disulfide-isomerase (EC 5.3.4.1) RB60 -
  misc_feature (1)..(184): Homolog of NCBI NO: 20805287 NR Description: protein disulfide isomerase-like PDI-M
  misc_feature (1)..(164): Homolog of NCBI NO: 20805285 NR Description: protein disulfide isomerase-like PDI-H
  misc_feature (1)..(132): Homolog of NCBI NO: 30697408 NR Description: protein disulfide isomerase family [Arabidopsis
  misc_feature (1)..(184): Homolog of NCBI NO: 28140231 NR Description: protein disulphide isomerase [Elaeis guineensis]
  misc_feature (1)..(184): Homolog of NCBI NO: 5902592 NR Description: protein disulfide isomerase precursor
  misc_feature (1)..(182): Homolog of NCBI NO: 21593313 NR Description: protein disulfide isomerase precursor-like
  misc_feature (1)..(182): Homolog of NCBI NO: 30697404 NR Description: protein disulfide isomerase family [Arabidopsis
  misc_feature (1)..(132): Homolog of NCBI NO: 30697408 NR Description: protein disulfide isomerase family [Arabidopsis
  misc_feature (1)..(164): Homolog of NCBI NO: 20805285 NR Description: protein disulfide isomerase-like PDI-H
  misc_feature (1)..(184): Homolog of NCBI NO: 20805287 NR Description: protein disulfide isomerase-like PDI-M
  misc_feature (1)..(184): Homolog of NCBI NO: 7437394 NR Description: protein disulfide-isomerase (EC 5.3.4.1) RB60 -
  misc_feature (1)..(184): Homolog of NCBI NO: 22331799 NR Description: protein disulfide-isomerase-like protein
  misc_feature (1)..(184): Homolog of NCBI NO: 7437396 NR Description: protein disulfide-isomerase homolog F28P10.60 -
  misc_feature (1)..(182): Homolog of NCBI NO: 30697404 NR Description: protein disulfide isomerase family [Arabidopsis
  misc_feature (1)..(182): Homolog of NCBI NO: 21593313 NR Description: protein disulfide isomerase precursor-like
  misc_feature (1)..(184): Homolog of NCBI NO: 28140231 NR Description: protein disulphide isomerase [Elaeis guineensis]
  misc_feature (1)..(184): Homolog of NCBI NO: 7437396 NR Description: protein disulfide-isomerase homolog F28P10.60 -
  misc_feature (1)..(184): Homolog of NCBI NO: 22331799 NR Description: protein disulfide-isomerase-like protein
MRKFILDGELTVNNIKTLAEDFLADKLKPFYKSDPLPENNDGDVKVIVGNNFDEIVLDESKDVLLEIYAPWCGHCQSFEPIYNKLGKYLKGIDSLVVAKMDGTSNEHPRAKADGFPTILFFPGGNKSFDPIAVDVDRTVVELYKFLKKHASIPFKLEKPATPEPVISTMKSDEKIEGDSSKDEL

SEQ ID NO: 21634 - DNA, 638 bp, Arabidopsis thaliana
  misc_feature (1)..(638): Ceres Seq. ID no. 12332709
  misc_feature: MA Experiment ID: 20001248 Result: Down-regulated in Transcription
  misc_feature: MA Experiment 20001248 PARAMETER Experiment Name: At_Far-red-induction_P Parameter: Age (day) Value: 7
  misc_feature: MA Experiment 20001248 PARAMETER Experiment Name: At_Far-red-induction_P Parameter: Light Value: Far-red vs. White
  misc_feature: MA Experiment 20001248 PARAMETER Experiment Name: At_Far-red-induction_P Parameter: Organism Value: A. thaliana
  misc_feature: MA Experiment 20001248 PARAMETER Experiment Name: At_Far-red-induction_P Parameter: Plant Line Value: Columbia
  misc_feature: MA Experiment 20001248 PARAMETER Experiment Name: At_Far-red-induction_P Parameter: Timepoint (hr) Value: 4
  misc_feature: MA Experiment 20001248 PARAMETER Experiment Name: At_Far-red-induction_P Parameter: Tissue Value: Whole Plant
aaaatcaatcagacgagaagaagattatccatcgccatgggacaagtctttaacaagctccgaggtaaagagtggagacataagcaggtacaagcgatatgtgatcgtgttttcgatcggttcaagatgcaaaccggaagagccaatcttacgtttgaagagttatacatcgctgttcttctcgtttacaatgacataaacaagagattgcctggtcctcatttcgatccaccttctaaggatctagtcaatagcattatgacggactgtgatatcaacttggatggagaacttgatagggaagagtttgtgaagtttattgagcagattacggctgagacgtttaacgtggttagtcagggtttgatcatagctttgattgttgctcccactgtggctattgcgacgaagaaggccacggaaggtgtccctggagttggcaaagttgtgcagaagctgcctacttcaatctatgcttctcttgtgactcttgcagttatgtgggtgaattctgattcaagttaagcttctcatattgtcaccataataaatgtgtttataactcaactgctacgaaaatatagaaacaacgcacggattggttgaacggttggataatactatttttttctgatttg

SEQ ID NO: 21635 - protein, 174 aa, Arabidopsis thaliana
  peptide (1)..(174): Ceres Seq. ID no. 12332710
  misc_feature (82)..(110): Pfam Name: EF hand Pfam Description: EF hand
  misc_feature (41)..(167): Homolog of NCBI NO: 26453144 NR Description: unknown protein [Arabidopsis thaliana]
  misc_feature (41)..(167): Homolog of NCBI NO: 18420040 NR Description: Expressed protein
  misc_feature (13)..(169): Homolog of NCBI NO: 38344138 NR Description: OSJNBa0041A02.5 [Oryza sativa (japonica
  misc_feature (13)..(167): Homolog of NCBI NO: 38344137 NR Description: OSJNBa0041A02.4 [Oryza sativa (japonica
  misc_feature (13)..(174): Homolog of NCBI NO: 18408144 NR Description: expressed protein
KINQTRRRLSIAMGQVFNKLRGKEWRHKQVQAICDRVFDRFKMQTGRANLTFEELYIAVLLVYNDINKRLPGPHFDPPSKDLVNSIMTDCDINLDGELDREEFVKFIEQITAETFNVVSQGLIIALIVAPTVAIATKKATEGVPGVGKVVQKLPTSIYASLVTLAVMWVNSDSS

SEQ ID NO: 21636 - protein, 162 aa, Arabidopsis thaliana
  peptide (1)..(162): Ceres Seq. ID no. 12332711
  misc_feature (70)..(98): Pfam Name: EF hand Pfam Description: EF hand
  misc_feature (29)..(155): Homolog of NCBI NO: 26453144 NR Description: unknown protein [Arabidopsis thaliana]
  misc_feature (29)..(155): Homolog of NCBI NO: 18420040 NR Description: Expressed protein
  misc_feature (1)..(157): Homolog of NCBI NO: 38344138 NR Description: OSJNBa0041A02.5 [Oryza sativa (japonica
  misc_feature (1)..(155): Homolog of NCBI NO: 38344137 NR Description: OSJNBa0041A02.4 [Oryza sativa (japonica
  misc_feature (1)..(162): Homolog of NCBI NO: 18408144 NR Description: expressed protein
MGQVFNKLRGKEWRHKQVQAICDRVFDRFKMQTGRANLTFEELYIAVLLVYNDINKRLPGPHFDPPSKDLVNSIMTDCDINLDGELDREEFVKFIEQITAETFNVVSQGLIIALIVAPTVAIATKKATEGVPGVGKVVQKLPTSIYASLVTLAVMWVNSDSS

SEQ ID NO: 21637 - protein, 132 aa, Arabidopsis thaliana
  peptide (1)..(132): Ceres Seq. ID no. 12332712
  misc_feature (40)..(68): Pfam Name: EF hand Pfam Description: EF hand
  misc_feature (1)..(125): Homolog of NCBI NO: 26453144 NR Description: unknown protein [Arabidopsis thaliana]
  misc_feature (1)..(125): Homolog of NCBI NO: 18420040 NR Description: Expressed protein
  misc_feature (1)..(127): Homolog of NCBI NO: 38344138 NR Description: OSJNBa0041A02.5 [Oryza sativa (japonica
  misc_feature (1)..(125): Homolog of NCBI NO: 38344137 NR Description: OSJNBa0041A02.4 [Oryza sativa (japonica
  misc_feature (1)..(132): Homolog of NCBI NO: 18408144 NR Description: expressed protein
MQTGRANLTFEELYIAVLLVYNDINKRLPGPHFDPPSKDLVNSIMTDCDINLDGELDREEFVKFIEQITAETFNVVSQGLIIALIVAPTVAIATKKATEGVPGVGKVVQKLPTSIYASLVTLAVMWVNSDSS

SEQ ID NO: 21638 - DNA, 981 bp, Arabidopsis thaliana
  misc_feature (1)..(981): Ceres Seq. ID no. 12574569
  misc_feature: MA Experiment ID: 108434 Result: Down-regulated in Transcription
  misc_feature: MA Experiment 108434 PARAMETER Experiment Name: At_Root_Tips_cDNA_P Parameter: Tissue Value: Root Tips
  misc_feature: MA Experiment ID: 108435 Result: Down-regulated in Transcription
  misc_feature: MA Experiment 108435 PARAMETER Experiment Name: At_stm_Mutants_cDNA_P Parameter: Plant Line Value: wt Landsburg vs stm
  misc_feature: MA Experiment 108435 PARAMETER Experiment Name: At_stm_Mutants_cDNA_P Parameter: Tissue Value: Shoot Apical Meristem Region
  misc_feature: MA Experiment ID: 108469 Result: Up-regulated in Transcription
  misc_feature: MA Experiment ID: 108576 Result: Up-regulated in Transcription
  misc_feature: MA Experiment 108576 PARAMETER Experiment Name: At_42deg_Heat_cDNA_P Parameter: Temperature (deg C) Value: 42 vs. 22
  misc_feature: MA Experiment 108576 PARAMETER Experiment Name: At_42deg_Heat_cDNA_P Parameter: Timepoint (hr) Value: 1
  misc_feature: MA Experiment 108576 PARAMETER Experiment Name: At_42deg_Heat_cDNA_P Parameter: Tissue Value: Aerial
  misc_feature: MA Experiment ID: 108577 Result: Up-regulated in Transcription
  misc_feature: MA Experiment 108577 PARAMETER Experiment Name: At_42deg_Heat_cDNA_P Parameter: Temperature (deg C) Value: 42 vs. 22
  misc_feature: MA Experiment 108577 PARAMETER Experiment Name: At_42deg_Heat_cDNA_P Parameter: Timepoint (hr) Value: 6
  misc_feature: MA Experiment 108577 PARAMETER Experiment Name: At_42deg_Heat_cDNA_P Parameter: Tissue Value: Aerial
  misc_feature: MA Experiment ID: 108594 Result: Down-regulated in Transcription
  misc_feature: MA Experiment 108594 PARAMETER Experiment Name: At_Ler-rhl_Root_cDNA_P Parameter: Plant Line Value: null
  misc_feature: MA Experiment ID: 20000069 Result: Up-regulated in Transcription
  misc_feature: MA Experiment 20000069 PARAMETER Experiment Name: At_100uM_ABA_Mutants_cDNA_P Parameter: Plant Line Value: CS23
  misc_feature: MA Experiment 20000069 PARAMETER Experiment Name: At_100uM_ABA_Mutants_cDNA_P Parameter: Timepoint (hr) Value: 6
  misc_feature: MA Experiment 20000069 PARAMETER Experiment Name: At_100uM_ABA_Mutants_cDNA_P Parameter: Tissue Value: Aerial
  misc_feature: MA Experiment 20000069 PARAMETER Experiment Name: At_100uM_ABA_Mutants_cDNA_P Parameter: Treatment Value: 100uM ABA vs. No Treatment
  misc_feature: MA Experiment ID: 20000070 Result: Up-regulated in Transcription
  misc_feature: MA Experiment 20000070 PARAMETER Experiment Name: At_100uM_ABA_Mutants_cDNA_P Parameter: Plant Line Value: CS24
  misc_feature: MA Experiment 20000070 PARAMETER Experiment Name: At_100uM_ABA_Mutants_cDNA_P Parameter: Timepoint (hr) Value: 6
  misc_feature: MA Experiment 20000070 PARAMETER Experiment Name: At_100uM_ABA_Mutants_cDNA_P Parameter: Tissue Value: Aerial
  misc_feature: MA Experiment 20000070 PARAMETER Experiment Name: At_100uM_ABA_Mutants_cDNA_P Parameter: Treatment Value: 100uM ABA vs. No Treatment
  misc_feature: MA Experiment ID: 20000071 Result: Up-regulated in Transcription
  misc_feature: MA Experiment 20000071 PARAMETER Experiment Name: At_100uM_ABA_Mutants_cDNA_P Parameter: Plant Line Value: CS8104
  misc_feature: MA Experiment 20000071 PARAMETER Experiment Name: At_100uM_ABA_Mutants_cDNA_P Parameter: Timepoint (hr) Value: 6
  misc_feature: MA Experiment 20000071 PARAMETER Experiment Name: At_100uM_ABA_Mutants_cDNA_P Parameter: Tissue Value: Aerial
  misc_feature: MA Experiment 20000071 PARAMETER Experiment Name: At_100uM_ABA_Mutants_cDNA_P Parameter: Treatment Value: 100uM ABA vs. No Treatment
  misc_feature: MA Experiment ID: 20000072 Result: Up-regulated in Transcription
  misc_feature: MA Experiment 20000072 PARAMETER Experiment Name: At_100uM_ABA_Mutants_cDNA_P Parameter: Plant Line Value: CS8105
  misc_feature: MA Experiment 20000072 PARAMETER Experiment Name: At_100uM_ABA_Mutants_cDNA_P Parameter: Timepoint (hr) Value: 6
  misc_feature: MA Experiment 20000072 PARAMETER Experiment Name: At_100uM_ABA_Mutants_cDNA_P Parameter: Tissue Value: Aerial
  misc_feature: MA Experiment 20000072 PARAMETER Experiment Name: At_100uM_ABA_Mutants_cDNA_P Parameter: Treatment Value: 100uM ABA vs. No Treatment
  misc_feature: MA Experiment ID: 20000086 Result: Up-regulated in Transcription
  misc_feature: MA Experiment 20000086 PARAMETER Experiment Name: At_100uM_ABA_Mutants_cDNA_P Parameter: Plant Line Value: CS22
  misc_feature: MA Experiment 20000086 PARAMETER Experiment Name: At_100uM_ABA_Mutants_cDNA_P Parameter: Timepoint (hr) Value: 6
  misc_feature: MA Experiment 20000086 PARAMETER Experiment Name: At_100uM_ABA_Mutants_cDNA_P Parameter: Tissue Value: Aerial
  misc_feature: MA Experiment 20000086 PARAMETER Experiment Name: At_100uM_ABA_Mutants_cDNA_P Parameter: Treatment Value: 100uM ABA vs. No Treatment
  misc_feature: MA Experiment ID: 20000087 Result: Up-regulated in Transcription
  misc_feature: MA Experiment 20000087 PARAMETER Experiment Name: At_100uM_ABA_Mutants_cDNA_P Parameter: Plant Line Value: WS
  misc_feature: MA Experiment 20000087 PARAMETER Experiment Name: At_100uM_ABA_Mutants_cDNA_P Parameter: Timepoint (hr) Value: 6
  misc_feature: MA Experiment 20000087 PARAMETER Experiment Name: At_100uM_ABA_Mutants_cDNA_P Parameter: Tissue Value: Aerial
  misc_feature: MA Experiment 20000087 PARAMETER Experiment Name: At_100uM_ABA_Mutants_cDNA_P Parameter: Treatment Value: 100uM ABA vs. No Treatment
  misc_feature: MA Experiment ID: 20000088 Result: Up-regulated in Transcription
  misc_feature: MA Experiment 20000088 PARAMETER Experiment Name: At_100uM_ABA_Mutants_cDNA_P Parameter: Plant Line Value: Landsberg
  misc_feature: MA Experiment 20000088 PARAMETER Experiment Name: At_100uM_ABA_Mutants_cDNA_P Parameter: Timepoint (hr) Value: 6
  misc_feature: MA Experiment 20000088 PARAMETER Experiment Name: At_100uM_ABA_Mutants_cDNA_P Parameter: Tissue Value: Aerial
  misc_feature: MA Experiment 20000088 PARAMETER Experiment Name: At_100uM_ABA_Mutants_cDNA_P Parameter: Treatment Value: 100uM ABA vs. No Treatment
  misc_feature: MA Experiment ID: 20000089 Result: Up-regulated in Transcription
  misc_feature: MA Experiment ID: 20000090 Result: Up-regulated in Transcription
  misc_feature: MA Experiment ID: 20000093 Result: Up-regulated in Transcription
  misc_feature: MA Experiment 20000093 PARAMETER Experiment Name: At_42deg_Heat_cDNA_P Parameter: Temperature (deg C) Value: 42 vs. 22
  misc_feature: MA Experiment 20000093 PARAMETER Experiment Name: At_42deg_Heat_cDNA_P Parameter: Timepoint (hr) Value: 0.5
  misc_feature: MA Experiment 20000093 PARAMETER Experiment Name: At_42deg_Heat_cDNA_P Parameter: Tissue Value: Aerial
  misc_feature: MA Experiment ID: 20000111 Result: Up-regulated in Transcription
  misc_feature: MA Experiment 20000111 PARAMETER Experiment Name: At_42deg_Heat_cDNA_P Parameter: Temperature (deg C) Value: 42 vs. 22
  misc_feature: MA Experiment 20000111 PARAMETER Experiment Name: At_42deg_Heat_cDNA_P Parameter: Timepoint (hr) Value: 6
  misc_feature: MA Experiment 20000111 PARAMETER Experiment Name: At_42deg_Heat_cDNA_P Parameter: Tissue Value: Aerial
  misc_feature: MA Experiment ID: 20000112 Result: Up-regulated in Transcription
  misc_feature: MA Experiment 20000112 PARAMETER Experiment Name: At_42deg_Heat_cDNA_P Parameter: Temperature (deg C) Value: 42 vs. 22
  misc_feature: MA Experiment 20000112 PARAMETER Experiment Name: At_42deg_Heat_cDNA_P Parameter: Timepoint (hr) Value: 2
  misc_feature: MA Experiment 20000112 PARAMETER Experiment Name: At_42deg_Heat_cDNA_P Parameter: Tissue Value: Aerial
  misc_feature: MA Experiment ID: 20000113 Result: Up-regulated in Transcription
  misc_feature: MA Experiment 20000113 PARAMETER Experiment Name: At_42deg_Heat_cDNA_P Parameter: Temperature (deg C) Value: 42 vs. 22
  misc_feature: MA Experiment 20000113 PARAMETER Experiment Name: At_42deg_Heat_cDNA_P Parameter: Timepoint (hr) Value: 8
  misc_feature: MA Experiment 20000113 PARAMETER Experiment Name: At_42deg_Heat_cDNA_P Parameter: Tissue Value: Aerial
  misc_feature: MA Experiment ID: 20000117 Result: Up-regulated in Transcription
  misc_feature: MA Experiment 20000117 PARAMETER Experiment Name: At_100uM_ABA_Mutants_cDNA_P Parameter: Plant Line Value: Columbia
  misc_feature: MA Experiment 20000117 PARAMETER Experiment Name: At_100uM_ABA_Mutants_cDNA_P Parameter: Timepoint (hr) Value: 6
  misc_feature: MA Experiment 20000117 PARAMETER Experiment Name: At_100uM_ABA_Mutants_cDNA_P Parameter: Tissue Value: Aerial
  misc_feature: MA Experiment 20000117 PARAMETER Experiment Name: At_100uM_ABA_Mutants_cDNA_P Parameter: Treatment Value: 100uM ABA vs. No Treatment
  misc_feature: MA Experiment ID: 20000144 Result: Up-regulated in Transcription
  misc_feature: MA Experiment 20000144 PARAMETER Experiment Name: At_42deg_Heat_cDNA_P Parameter: Temperature (deg C) Value: 42 vs. 22
  misc_feature: MA Experiment 20000144 PARAMETER Experiment Name: At_42deg_Heat_cDNA_P Parameter: Timepoint (hr) Value: 1
  misc_feature: MA Experiment 20000144 PARAMETER Experiment Name: At_42deg_Heat_cDNA_P Parameter: Tissue Value: Aerial
  misc_feature: MA Experiment ID: 20000171 Result: Up-regulated in Transcription
  misc_feature: MA Experiment 20000171 PARAMETER Experiment Name: At_42deg_Heat_P Parameter: Age (day) Value: 14
  misc_feature: MA Experiment 20000171 PARAMETER Experiment Name: At_42deg_Heat_P Parameter: Organism Value: A. thaliana
  misc_feature: MA Experiment 20000171 PARAMETER Experiment Name: At_42deg_Heat_P Parameter: Plant Line Value: WS
  misc_feature: MA Experiment 20000171 PARAMETER Experiment Name: At_42deg_Heat_P Parameter: Temperature (deg C) Value: 42 vs. 22
  misc_feature: MA Experiment 20000171 PARAMETER Experiment Name: At_42deg_Heat_P Parameter: Timepoint (hr) Value: 1
  misc_feature: MA Experiment 20000171 PARAMETER Experiment Name: At_42deg_Heat_P Parameter: Tissue Value: Aerial
  misc_feature: MA Experiment ID: 20000173 Result: Up-regulated in Transcription
  misc_feature: MA Experiment 20000173 PARAMETER Experiment Name: At_42deg_Heat_P Parameter: Age (day) Value: 14
  misc_feature: MA Experiment 20000173 PARAMETER Experiment Name: At_42deg_Heat_P Parameter: Organism Value: A. thaliana
  misc_feature: MA Experiment 20000173 PARAMETER Experiment Name: At_42deg_Heat_P Parameter: Plant Line Value: WS
  misc_feature: MA Experiment 20000173 PARAMETER Experiment Name: At_42deg_Heat_P Parameter: Temperature (deg C) Value: 42 vs. 22
  misc_feature: MA Experiment 20000173 PARAMETER Experiment Name: At_42deg_Heat_P Parameter: Timepoint (hr) Value: 6
  misc_feature: MA Experiment 20000173 PARAMETER Experiment Name: At_42deg_Heat_P Parameter: Tissue Value: Aerial
  misc_feature: MA Experiment ID: 20000182 Result: Up-regulated in Transcription
  misc_feature: MA Experiment 20000182 PARAMETER Experiment Name: At_2mM_SA_P Parameter: Age (day) Value: 14
  misc_feature: MA Experiment 20000182 PARAMETER Experiment Name: At_2mM_SA_P Parameter: Organism Value: A. thaliana
  misc_feature: MA Experiment 20000182 PARAMETER Experiment Name: At_2mM_SA_P Parameter: Plant Line Value: WS
  misc_feature: MA Experiment 20000182 PARAMETER Experiment Name: At_2mM_SA_P Parameter: Timepoint (hr) Value: 6
  misc_feature: MA Experiment 20000182 PARAMETER Experiment Name: At_2mM_SA_P Parameter: Tissue Value: Aerial
  misc_feature: MA Experiment 20000182 PARAMETER Experiment Name: At_2mM_SA_P Parameter: Treatment Value: 2mM SA vs. No Treatment
  misc_feature: MA Experiment ID: 20000185 Result: Up-regulated in Transcription
  misc_feature: MA Experiment 20000185 PARAMETER Experiment Name: At_Roots__P Parameter: Age (day) Value: 7 vs. 21
  misc_feature: MA Experiment 20000185 PARAMETER Experiment Name: At_Roots__P Parameter: Organism Value: A. thaliana
  misc_feature: MA Experiment 20000185 PARAMETER Experiment Name: At_Roots__P Parameter: Tissue Value: Roots vs. Whole Plant
  misc_feature: MA Experiment ID: 20000234 Result: Down-regulated in Transcription
  misc_feature: MA Experiment 20000234 PARAMETER Experiment Name: At_Siliques_P Parameter: Age (day) Value: 21
  misc_feature: MA Experiment 20000234 PARAMETER Experiment Name: At_Siliques_P Parameter: Organism Value: A. thaliana
  misc_feature: MA Experiment 20000234 PARAMETER Experiment Name: At_Siliques_P Parameter: Plant Line Value: WS
  misc_feature: MA Experiment 20000234 PARAMETER Experiment Name: At_Siliques_P Parameter: Tissue Value: Less Than 5mm Siliques vs. Whole Plant
  misc_feature: MA Experiment ID: 20000235 Result: Down-regulated in Transcription
  misc_feature: MA Experiment 20000235 PARAMETER Experiment Name: At_Siliques_P Parameter: Age (day) Value: 21
  misc_feature: MA Experiment 20000235 PARAMETER Experiment Name: At_Siliques_P Parameter: Organism Value: A. thaliana
  misc_feature: MA Experiment 20000235 PARAMETER Experiment Name: At_Siliques_P Parameter: Plant Line Value: WS
  misc_feature: MA Experiment 20000235 PARAMETER Experiment Name: At_Siliques_P Parameter: Tissue Value: 5-10mm Siliques vs. Whole Plant
  misc_feature: MA Experiment ID: 20000286 Result: Down-regulated in Transcription
  misc_feature: MA Experiment 20000286 PARAMETER Experiment Name: At_Open_Flower_P Parameter: Age (day) Value: 21
  misc_feature: MA Experiment 20000286 PARAMETER Experiment Name: At_Open_Flower_P Parameter: Plant Line Value: WS
  misc_feature: MA Experiment 20000286 PARAMETER Experiment Name: At_Open_Flower_P Parameter: Tissue Value: Half Open vs. Whole Plant
  misc_feature: MA Experiment ID: 20000709 Result: Up-regulated in Transcription
  misc_feature: MA Experiment 20000709 PARAMETER Experiment Name: At_15mM_NH4NO3_L-to-H_P Parameter: Age (hr) Value: 14
  misc_feature: MA Experiment 20000709 PARAMETER Experiment Name: At_15mM_NH4NO3_L-to-H_P Parameter: Organism Value: A. thaliana
  misc_feature: MA Experiment 20000709 PARAMETER Experiment Name: At_15mM_NH4NO3_L-to-H_P Parameter: Plant Line Value: WS
  misc_feature: MA Experiment 20000709 PARAMETER Experiment Name: At_15mM_NH4NO3_L-to-H_P Parameter: Timepoint (hr) Value: 4
  misc_feature: MA Experiment 20000709 PARAMETER Experiment Name: At_15mM_NH4NO3_L-to-H_P Parameter: Tissue Value: Aerial
  misc_feature: MA Experiment 20000709 PARAMETER Experiment Name: At_15mM_NH4NO3_L-to-H_P Parameter: Treatment Value: 15mM NH4NO3 vs. 30mM Mannitol
  misc_feature: MA Experiment ID: 20000794 Result: Down-regulated in Transcription
  misc_feature: MA Experiment 20000794 PARAMETER Experiment Name: At_Petals_P Parameter: Age (day) Value: 23-25 days
  misc_feature: MA Experiment 20000794 PARAMETER Experiment Name: At_Petals_P Parameter: Plant Line Value: WS
  misc_feature: MA Experiment 20000794 PARAMETER Experiment Name: At_Petals_P Parameter: Tissue Value: Petals vs. Whole plant
  misc_feature: MA Experiment ID: 20001450 Result: Down-regulated in Transcription
  misc_feature: MA Experiment 20001450 PARAMETER Experiment Name: At_Far-red-induction_P Parameter: Age (day) Value: 7
  misc_feature: MA Experiment 20001450 PARAMETER Experiment Name: At_Far-red-induction_P Parameter: Light Value: Far-red vs. White
  misc_feature: MA Experiment 20001450 PARAMETER Experiment Name: At_Far-red-induction_P Parameter: Organism Value: A. thaliana
  misc_feature: MA Experiment 20001450 PARAMETER Experiment Name: At_Far-red-induction_P Parameter: Plant Line Value: Columbia
  misc_feature: MA Experiment 20001450 PARAMETER Experiment Name: At_Far-red-induction_P Parameter: Timepoint (hr) Value: 8
  misc_feature: MA Experiment 20001450 PARAMETER Experiment Name: At_Far-red-induction_P Parameter: Tissue Value: Whole Plant
  misc_feature: MA Experiment ID: 20001451 Result: Down-regulated in Transcription
  misc_feature: MA Experiment 20001451 PARAMETER Experiment Name: At_Far-red-induction_P Parameter: Age (day) Value: 7
  misc_feature: MA Experiment 20001451 PARAMETER Experiment Name: At_Far-red-induction_P Parameter: Light Value: Far-red vs. White
  misc_feature: MA Experiment 20001451 PARAMETER Experiment Name: At_Far-red-induction_P Parameter: Organism Value: A. thaliana
  misc_feature: MA Experiment 20001451 PARAMETER Experiment Name: At_Far-red-induction_P Parameter: Plant Line Value: Columbia
  misc_feature: MA Experiment 20001451 PARAMETER Experiment Name: At_Far-red-induction_P Parameter: Timepoint (hr) Value: 24
  misc_feature: MA Experiment 20001451 PARAMETER Experiment Name: At_Far-red-induction_P Parameter: Tissue Value: Whole Plant
  misc_feature: MA Experiment ID: 20001557 Result: Up-regulated in Transcription
  misc_feature: MA Experiment 20001557 PARAMETER Experiment Name: At_Drought_Soil_Dry_P Parameter: Age (day) Value: 27
  misc_feature: MA Experiment 20001557 PARAMETER Experiment Name: At_Drought_Soil_Dry_P Parameter: Organism Value: A. thaliana
  misc_feature: MA Experiment 20001557 PARAMETER Experiment Name: At_Drought_Soil_Dry_P Parameter: Plant Line Value: WS
  misc_feature: MA Experiment 20001557 PARAMETER Experiment Name: At_Drought_Soil_Dry_P Parameter: Post Timepoint (hr) Value: 3
  misc_feature: MA Experiment 20001557 PARAMETER Experiment Name: At_Drought_Soil_Dry_P Parameter: Post-Treatment Value: Re-Water vs. No Drought
  misc_feature: MA Experiment 20001557 PARAMETER Experiment Name: At_Drought_Soil_Dry_P Parameter: Timepoint (day) Value: 13
  misc_feature: MA Experiment 20001557 PARAMETER Experiment Name: At_Drought_Soil_Dry_P Parameter: Treatment Value: Drought vs. No Drought
cttacaggtagtgtcccaaccaaacaaatcgagaaagacgaacacttacaaaaaaaaatctctttgtgagctttagcgatcgtaacaatggcgaacgaggtgattcttcttgatttctggccgagtatgttcgggatgaggacaaggatcgcattgagggagaaaggtgttgaatttgagtacagagaagaagatctaaggaacaagagtcctttgcttctccagatgaatccgattcacaagaagattcctgttctcatccacaatggtaaaccggttaacgaatctatcatccaggttcagtacattgacgaggtctggtctcacaagaaccctatccttccttctgatccttacctgagagctcaagctaggttctgggctgatttcattgacaagaagctgtatgatgctcagaggaaggtgtgggcgacaaagggtgaggaacaagaggcagggaagaaggatttcattgagatactcaagactcttgaatctgagcttggagacaaaccttactttagtggcgatgactttggctatgtagacattgcgttgattggattctacacatggtttccagcatacgagaagtttgctaacttcagtatcgaatctgaggttccgaaactgattgcttgggttaagaagtgtttgcagagggagagcgtggctaagtccttgcctgatcctgagaaggttactgaattcgtctctgagctcaggaagaaatttgtacctgagtaaatatgtttctcttgtcatatggttcggacttaagatgctctctgttttactttcgtgtgttgtctttcttaaataatgcagagcatctgtgaggtggtttgagtgtagagaatgtatgtctttgctgtagcagattcctgtgttttctggatttaatggcttgtcctagtttttatgcattgtaactatgagtttaattaatgatcgttaatctataatgattattaatttgtt

SEQ ID NO: 21639 - protein, 219 aa, Arabidopsis thaliana
  peptide (1)..(219): Ceres Seq. ID no. 12574570
  misc_feature (1)..(219): Homolog of NCBI NO: 18411929 NR Description: glutathione transferase, putative
  misc_feature (1)..(214): Homolog of NCBI NO: 15218311 NR Description: glutathione transferase, putative
  misc_feature (1)..(216): Homolog of NCBI NO: 100302 NR Description: auxin-induced protein (clone pCNT107) - common
  misc_feature (1)..(214): Homolog of NCBI NO: 7447307 NR Description: glutathione transferase (EC 2.5.1.18) - papaya
  misc_feature (1)..(216): Homolog of NCBI NO: 416652 NR Description: PROBABLE GLUTATHIONE S-TRANSFERASE (AUXIN-INDUCED
  misc_feature (1)..(216): Homolog of NCBI NO: 1346215 NR Description: PROBABLE GLUTATHIONE S-TRANSFERASE PARC
  misc_feature (1)..(215): Homolog of NCBI NO: 15220041 NR Description: glutathione transferase, putative; protein id:
  misc_feature (1)..(219): Homolog of NCBI NO: 8052534 NR Description: F3F9.11 [Arabidopsis thaliana]
  misc_feature (1)..(219): Homolog of NCBI NO: 21592644 NR Description: glutathione transferase, putative [Arabidopsis
MANEVILLDFWPSMFGMRTRIALREKGVEFEYREEDLRNKSPLLLQMNPIHKKIPVLIHNGKPVNESIIQVQYIDEVWSHKNPILPSDPYLRAQARFWADFIDKKLYDAQRKVWATKGEEQEAGKKDFIEILKTLESELGDKPYFSGDDFGYVDIALIGFYTWFPAYEKFANFSIESEVPKLIAWVKKCLQRESVAKSLPDPEKVTEFVSELRKKFVPE

SEQ ID NO: 21640 - protein, 206 aa, Arabidopsis thaliana
  peptide (1)..(206): Ceres Seq. ID no. 12574571
  misc_feature (1)..(201): Homolog of NCBI NO: 15218311 NR Description: glutathione transferase, putative
  misc_feature (1)..(203): Homolog of NCBI NO: 100302 NR Description: auxin-induced protein (clone pCNT107) - common
  misc_feature (1)..(201): Homolog of NCBI NO: 7447307 NR Description: glutathione transferase (EC 2.5.1.18) - papaya
  misc_feature (1)..(203): Homolog of NCBI NO: 416652 NR Description: PROBABLE GLUTATHIONE S-TRANSFERASE (AUXIN-INDUCED
  misc_feature (1)..(203): Homolog of NCBI NO: 1346215 NR Description: PROBABLE GLUTATHIONE S-TRANSFERASE PARC
  misc_feature (1)..(202): Homolog of NCBI NO: 15220041 NR Description: glutathione transferase, putative; protein id:
  misc_feature (1)..(206): Homolog of NCBI NO: 8052534 NR Description: F3F9.11 [Arabidopsis thaliana]
  misc_feature (1)..(206): Homolog of NCBI NO: 21592644 NR Description: glutathione transferase, putative [Arabidopsis
  misc_feature (1)..(206): Homolog of NCBI NO: 18411929 NR Description: glutathione transferase, putative
MFGMRTRIALREKGVEFEYREEDLRNKSPLLLQMNPIHKKIPVLIHNGKPVNESIIQVQYIDEVWSHKNPILPSDPYLRAQARFWADFIDKKLYDAQRKVWATKGEEQEAGKKDFIEILKTLESELGDKPYFSGDDFGYVDIALIGFYTWFPAYEKFANFSIESEVPKLIAWVKKCLQRESVAKSLPDPEKVTEFVSELRKKFVPE

SEQ ID NO: 21641 - protein, 203 aa, Arabidopsis thaliana
  peptide (1)..(203): Ceres Seq. ID no. 12574572
  misc_feature (1)..(198): Homolog of NCBI NO: 15218311 NR Description: glutathione transferase, putative
  misc_feature (1)..(200): Homolog of NCBI NO: 100302 NR Description: auxin-induced protein (clone pCNT107) - common
  misc_feature (1)..(198): Homolog of NCBI NO: 7447307 NR Description: glutathione transferase (EC 2.5.1.18) - papaya
  misc_feature (1)..(200): Homolog of NCBI NO: 416652 NR Description: PROBABLE GLUTATHIONE S-TRANSFERASE (AUXIN-INDUCED
  misc_feature (1)..(200): Homolog of NCBI NO: 1346215 NR Description: PROBABLE GLUTATHIONE S-TRANSFERASE PARC
  misc_feature (1)..(199): Homolog of NCBI NO: 15220041 NR Description: glutathione transferase, putative; protein id:
  misc_feature (1)..(203): Homolog of NCBI NO: 8052534 NR Description: F3F9.11 [Arabidopsis thaliana]
  misc_feature (1)..(203): Homolog of NCBI NO: 21592644 NR Description: glutathione transferase, putative [Arabidopsis
  misc_feature (1)..(203): Homolog of NCBI NO: 18411929 NR Description: glutathione transferase, putative
MRTRIALREKGVEFEYREEDLRNKSPLLLQMNPIHKKIPVLIHNGKPVNESIIQVQYIDEVWSHKNPILPSDPYLRAQARFWADFIDKKLYDAQRKVWATKGEEQEAGKKDFIEILKTLESELGDKPYFSGDDFGYVDIALIGFYTWFPAYEKFANFSIESEVPKLIAWVKKCLQRESVAKSLPDPEKVTEFVSELRKKFVPE

SEQ ID NO: 21642 - DNA, 1940 bp, Arabidopsis thaliana
  misc_feature (1)..(1940): Ceres Seq. ID no. 12466491
  misc_feature: MA Experiment ID: 108434 Result: Up-regulated in Transcription
  misc_feature: MA Experiment 108434 PARAMETER Experiment Name: At_Root_Tips_cDNA_P Parameter: Tissue Value: Root Tips
  misc_feature: MA Experiment ID: 108573 Result: Up-regulated in Transcription
  misc_feature: MA Experiment 108573 PARAMETER Experiment Name: At_Drought_cDNA_P Parameter: Timepoint (hr) Value: 6
  misc_feature: MA Experiment 108573 PARAMETER Experiment Name: At_Drought_cDNA_P Parameter: Tissue Value: Aerial
  misc_feature: MA Experiment 108573 PARAMETER Experiment Name: At_Drought_cDNA_P Parameter: Treatment Value: Drought vs. No Drought
ctctcttgcccgcttcgtgcccgtctcttctctcttcttcgtattctctctccacagacatgaattccctttttgactaacctcctttttcccctaataagtgaatcttacttcttcttctcgccaagatcaaatttctgggattcttcttcttctctctaattcccttgcgtttgtttcctctgatcaagttccgtcctttttcctttttttgttcttgagttctcgtttgagctgctttttgggggagatgggtttcgattctgttaaagttatggagaattggcaatccaagacatctaatgagaatgagaagaagaagaagaagcggaggaggaagaagaacaacaatgtcagaaacagtgaacattatgaagaagaagcaaatgggtgttgggtcaaatttaggtatatagtctgttgcgcttcttcaacatcagacgttgagacctctctcactctctctactagcactgtgggaagtcagtccgcaattgtgcaatcaaatgaccaaccggttggcccagtctcttctactactacaactagcaatgcagaaagctctttgtccactcctatcataagtgaagaacttaacatctattctcaccttaagaagttttctttcattgatctcaagttggctactagaaatttcagacctgaaagccttctcggagaaggtggctttggttgtgtcttcaaaggctgggtcgaggagaacggaactgctcctgttaagcctggcactggccttactgttgccgtcaaaaccttaaatcctgatggccttcagggtcataaagagtggcttgctgagattaattatcttggtaatcttctccatcccaatcttgttaaactggtgggttattgtatcgaagatgatcaaaggctgcttgtatatgagtttatgcctcgaggaagtttggagaatcaccttttcagaaggtccttgcctcttccatggtcaattcggatgaagattgcattaggtgctgcaaagggtctcagtttccttcacgaagaagctttaaagccggtcatttatcgagatttcaaaacctcaaatattttactggatggggagtacaatgctaaattatcagattttgggcttgccaaagatgctcctgatgaaggcaaaactcatgtgtctactcgagtcatgggcacttatggttacgctgcccccgagtatgtaatgaccggtcacttgacatcaaaaagcgacgtttacagtttcggtgtggttcttctcgaaatgctgactggtagaagatcaatggacaaaaatcgaccaaacggtgaacacaacctcgttgaatgggcgagaccgcatctcctggacaaaagaagattctaccggttacttgatccgaggctggagggtcatttctcagttaaaggagcacaaaaagtgactcagcttgcagcacaatgccttagccgtgactccaaaataagacccaaaatgagtgaagtggtggaagtacttaagcctctcccacacctcaaggacatggctagcgcttcttactacttccagacaatgcaagctgaacgtttgaaagctggttctggttctggttctggtcgtggattcgggtcaagaaacgggcaaccagtgtttcggacattgtctagtcctcatggtcaagctggttcgtcgccttatcgtcatcagattccgtctcctaagcctaaaggtgcaactacttagattggctcgcaagtgtggacgcaagcaaacgtcttttttaaccgatgtaaaaccgacattgttaaccgatttaaagaaggaaaattaaggttgttccgaagaagatccgaatttgtgtatttactacctttgtgacctcatgtttcttcgtctgttgtaactcttgaacaaattgtctgttagggtaatattgtcattatgtattagtcgtttcgta

SEQ ID NO: 21643 - protein, 490 aa, Arabidopsis thaliana
  peptide (1)..(490): Ceres Seq. ID no. 12466492
  misc_feature (76)..(459): Homolog of NCBI NO: 14719339 NR Description: putative protein kinase [Oryza sativa]
  misc_feature (57)..(467): Homolog of NCBI NO: 34906046 NR Description: putative serine/threonine-specific protein kinase
  misc_feature (121)..(438): Homolog of NCBI NO: 34898434 NR Description: ESTs C98382(C2985),D22444(C11129) correspond to a of the predicted gene.~Similar to Arabidopsis thaliana APK1 gene
  misc_feature (58)..(486): Homolog of NCBI NO: 28804505 NR Description: serine/threonine protein kinase [Aster tripolium]
  misc_feature (15)..(483): Homolog of NCBI NO: 34912198 NR Description: putative protein kinase [Oryza sativa (japonica
  misc_feature (21)..(487): Homolog of NCBI NO: 9294282 NR Description: protein kinase [Arabidopsis thaliana]
  misc_feature (21)..(487): Homolog of NCBI NO: 15233058 NR Description: protein kinase, putative; protein id: At3g28690.1
  misc_feature (1)..(490): Homolog of NCBI NO: 15242204 NR Description: serine/threonine specific protein kinase -like
  misc_feature (9)..(490): Homolog of NCBI NO: 21592646 NR Description: putative protein kinase [Arabidopsis thaliana]
  misc_feature (1)..(490): Homolog of NCBI NO: 15232085 NR Description: putative protein kinase
MGFDSVKVMENWQSKTSNENEKKKKKRRRKKNNNVRNSEHYEEEANGCWVKFRYIVCCASSTSDVETSLTLSTSTVGSQSAIVQSNDQPVGPVSSTTTTSNAESSLSTPIISEELNIYSHLKKFSFIDLKLATRNFRPESLLGEGGFGCVFKGWVEENGTAPVKPGTGLTVAVKTLNPDGLQGHKEWLAEINYLGNLLHPNLVKLVGYCIEDDQRLLVYEFMPRGSLENHLFRRSLPLPWSIRMKIALGAAKGLSFLHEEALKPVIYRDFKTSNILLDGEYNAKLSDFGLAKDAPDEGKTHVSTRVMGTYGYAAPEYVMTGHLTSKSDVYSFGVVLLEMLTGRRSMDKNRPNGEHNLVEWARPHLLDKRRFYRLLDPRLEGHFSVKGAQKVTQLAAQCLSRDSKIRPKMSEVVEVLKPLPHLKDMASASYYFQTMQAERLKAGSGSGSGRGFGSRNGQPVFRTLSSPHGQAGSSPYRHQIPSPKPKGATT

SEQ ID NO: 21644 - protein, 482 aa, Arabidopsis thaliana
  peptide (1)..(482): Ceres Seq. ID no. 12466493
  misc_feature (68)..(451): Homolog of NCBI NO: 14719339 NR Description: putative protein kinase [Oryza sativa]
  misc_feature (49)..(459): Homolog of NCBI NO: 34906046 NR Description: putative serine/threonine-specific protein kinase
  misc_feature (113)..(430): Homolog of NCBI NO: 34898434 NR Description: ESTs C98382(C2985),D22444(C11129) correspond to a of the predicted gene.~Similar to Arabidopsis thaliana APK1 gene
  misc_feature (50)..(478): Homolog of NCBI NO: 28804505 NR Description: serine/threonine protein kinase [Aster tripolium]
  misc_feature (7)..(475): Homolog of NCBI NO: 34912198 NR Description: putative protein kinase [Oryza sativa (japonica
  misc_feature (13)..(479): Homolog of NCBI NO: 9294282 NR Description: protein kinase [Arabidopsis thaliana]
  misc_feature (13)..(479): Homolog of NCBI NO: 15233058 NR Description: protein kinase, putative; protein id: At3g28690.1
  misc_feature (1)..(482): Homolog of NCBI NO: 15242204 NR Description: serine/threonine specific protein kinase -like
  misc_feature (1)..(482): Homolog of NCBI NO: 21592646 NR Description: putative protein kinase [Arabidopsis thaliana]
  misc_feature (1)..(482): Homolog of NCBI NO: 15232085 NR Description: putative protein kinase
MENWQSKTSNENEKKKKKRRRKKNNNVRNSEHYEEEANGCWVKFRYIVCCASSTSDVETSLTLSTSTVGSQSAIVQSNDQPVGPVSSTTTTSNAESSLSTPIISEELNIYSHLKKFSFIDLKLATRNFRPESLLGEGGFGCVFKGWVEENGTAPVKPGTGLTVAVKTLNPDGLQGHKEWLAEINYLGNLLHPNLVKLVGYCIEDDQRLLVYEFMPRGSLENHLFRRSLPLPWSIRMKIALGAAKGLSFLHEEALKPVIYRDFKTSNILLDGEYNAKLSDFGLAKDAPDEGKTHVSTRVMGTYGYAAPEYVMTGHLTSKSDVYSFGVVLLEMLTGRRSMDKNRPNGEHNLVEWARPHLLDKRRFYRLLDPRLEGHFSVKGAQKVTQLAAQCLSRDSKIRPKMSEVVEVLKPLPHLKDMASASYYFQTMQAERLKAGSGSGSGRGFGSRNGQPVFRTLSSPHGQAGSSPYRHQIPSPKPKGATT

SEQ ID NO: 21645 - protein, 269 aa, Arabidopsis thaliana
  peptide (1)..(269): Ceres Seq. ID no. 12466494
  misc_feature (1)..(238): Homolog of NCBI NO: 14719339 NR Description: putative protein kinase [Oryza sativa]
  misc_feature (1)..(246): Homolog of NCBI NO: 34906046 NR Description: putative serine/threonine-specific protein kinase
  misc_feature (1)..(217): Homolog of NCBI NO: 34898434 NR Description: ESTs C98382(C2985),D22444(C11129) correspond to a of the predicted gene.~Similar to Arabidopsis thaliana APK1 gene
  misc_feature (1)..(265): Homolog of NCBI NO: 28804505 NR Description: serine/threonine protein kinase [Aster tripolium]
  misc_feature (1)..(262): Homolog of NCBI NO: 34912198 NR Description: putative protein kinase [Oryza sativa (japonica
  misc_feature (1)..(266): Homolog of NCBI NO: 9294282 NR Description: protein kinase [Arabidopsis thaliana]
  misc_feature (1)..(266): Homolog of NCBI NO: 15233058 NR Description: protein kinase, putative; protein id: At3g28690.1
  misc_feature (1)..(269): Homolog of NCBI NO: 15242204 NR Description: serine/threonine specific protein kinase -like
  misc_feature (1)..(269): Homolog of NCBI NO: 21592646 NR Description: putative protein kinase [Arabidopsis thaliana]
  misc_feature (1)..(269): Homolog of NCBI NO: 15232085 NR Description: putative protein kinase
MPRGSLENHLFRRSLPLPWSIRMKIALGAAKGLSFLHEEALKPVIYRDFKTSNILLDGEYNAKLSDFGLAKDAPDEGKTHVSTRVMGTYGYAAPEYVMTGHLTSKSDVYSFGVVLLEMLTGRRSMDKNRPNGEHNLVEWARPHLLDKRRFYRLLDPRLEGHFSVKGAQKVTQLAAQCLSRDSKIRPKMSEVVEVLKPLPHLKDMASASYYFQTMQAERLKAGSGSGSGRGFGSRNGQPVFRTLSSPHGQAGSSPYRHQIPSPKPKGATT

SEQ ID NO: 21646 - DNA, 2202 bp, Arabidopsis thaliana
  misc_feature (1)..(2202): Ceres Seq. ID no. 12327044
  misc_feature: MA Experiment ID: 108434 Result: Down-regulated in Transcription
  misc_feature: MA Experiment 108434 PARAMETER Experiment Name: At_Root_Tips_cDNA_P Parameter: Tissue Value: Root Tips
  misc_feature: MA Experiment ID: 108569 Result: Up-regulated in Transcription
  misc_feature: MA Experiment 108569 PARAMETER Experiment Name: At_0.001%_MeJA__cDNA_P Parameter: Timepoint (hr) Value: 6
  misc_feature: MA Experiment 108569 PARAMETER Experiment Name: At_0.001%_MeJA__cDNA_P Parameter: Tissue Value: Aerial
  misc_feature: MA Experiment 108569 PARAMETER Experiment Name: At_0.001%_MeJA__cDNA_P Parameter: Treatment Value: 0.001% MeJA vs. No Treatment
  misc_feature: MA Experiment ID: 108573 Result: Up-regulated in Transcription
  misc_feature: MA Experiment 108573 PARAMETER Experiment Name: At_Drought_cDNA_P Parameter: Timepoint (hr) Value: 6
  misc_feature: MA Experiment 108573 PARAMETER Experiment Name: At_Drought_cDNA_P Parameter: Tissue Value: Aerial
  misc_feature: MA Experiment 108573 PARAMETER Experiment Name: At_Drought_cDNA_P Parameter: Treatment Value: Drought vs. No Drought
  misc_feature: MA Experiment ID: 108585 Result: Up-regulated in Transcription
  misc_feature: MA Experiment 108585 PARAMETER Experiment Name: At_5mM_NaNP_cDNA_P Parameter: Timepoint (hr) Value: 6
  misc_feature: MA Experiment 108585 PARAMETER Experiment Name: At_5mM_NaNP_cDNA_P Parameter: Tissue Value: Aerial
  misc_feature: MA Experiment 108585 PARAMETER Experiment Name: At_5mM_NaNP_cDNA_P Parameter: Treatment Value: null
  misc_feature: MA Experiment ID: 108668 Result: Up-regulated in Transcription
  misc_feature: MA Experiment 108668 PARAMETER Experiment Name: At_2mM_SA_cDNA_P Parameter: Plant Line Value: WS
  misc_feature: MA Experiment 108668 PARAMETER Experiment Name: At_2mM_SA_cDNA_P Parameter: Timepoint (hr) Value: 6
  misc_feature: MA Experiment 108668 PARAMETER Experiment Name: At_2mM_SA_cDNA_P Parameter: Treatment Value: 2mM SA vs. No Treatment
  misc_feature: MA Experiment ID: 20000182 Result: Up-regulated in Transcription
  misc_feature: MA Experiment 20000182 PARAMETER Experiment Name: At_2mM_SA_P Parameter: Age (day) Value: 14
  misc_feature: MA Experiment 20000182 PARAMETER Experiment Name: At_2mM_SA_P Parameter: Organism Value: A. thaliana
  misc_feature: MA Experiment 20000182 PARAMETER Experiment Name: At_2mM_SA_P Parameter: Plant Line Value: WS
  misc_feature: MA Experiment 20000182 PARAMETER Experiment Name: At_2mM_SA_P Parameter: Timepoint (hr) Value: 6
  misc_feature: MA Experiment 20000182 PARAMETER Experiment Name: At_2mM_SA_P Parameter: Tissue Value: Aerial
  misc_feature: MA Experiment 20000182 PARAMETER Experiment Name: At_2mM_SA_P Parameter: Treatment Value: 2mM SA vs. No Treatment
  misc_feature: MA Experiment ID: 20001247 Result: Up-regulated in Transcription
  misc_feature: MA Experiment 20001247 PARAMETER Experiment Name: At_Far-red-induction_P Parameter: Age (day) Value: 7
  misc_feature: MA Experiment 20001247 PARAMETER Experiment Name: At_Far-red-induction_P Parameter: Light Value: Far-red vs. White
  misc_feature: MA Experiment 20001247 PARAMETER Experiment Name: At_Far-red-induction_P Parameter: Organism Value: A. thaliana
  misc_feature: MA Experiment 20001247 PARAMETER Experiment Name: At_Far-red-induction_P Parameter: Plant Line Value: Columbia
  misc_feature: MA Experiment 20001247 PARAMETER Experiment Name: At_Far-red-induction_P Parameter: Timepoint (hr) Value: 1
  misc_feature: MA Experiment 20001247 PARAMETER Experiment Name: At_Far-red-induction_P Parameter: Tissue Value: Whole Plant
agtggtcttcatttaacaaacgccttctctcttttttcctttaaatctctgagctcttttttcttcatttgtttttttgccaaaaaataaaatatatattgaatcttcattcattaaaaaaacaatttttatttttccctattcatcttcggttcctcaccgtccgatgctttgactctgaccaatcagtcaatttgagcttcacaatcaacggtcatgggtcattgttacagccggaacatctccgccgtcgaggacgacgagatccccaccggtaacggcgaggtttcgaatcaaccatctcaaaatcaccggcatgcttcgattcctcagtctccggttgcttctggtactcctgaagtcaactcatataacattagccctttccaaagcccgttaccggcgggagtagctccatcaccggcgagaactccgggacggaagttcaaatggccgtttcctccaccgtcacctgccaaaccgattatggcggctttgagaagacgacgtggcgctccgcctcagcctcgagatgagccgatcccggaggatagtgaagatgtagtagatcacggtggtgacagtggcggcggagagaggttagataagaatttcgggtttgggaagaacttcgaagggaagtatgagttagggaaagaagtagggcgagggcattttggtcatacttgttgggcaaaagcgaagaaaggcaagatgaagaaccaaaccgtggctgtcaaaatcatctctaaagctaagatgacgtcgacgttatctattgaagatgttcgtagagaagtgaaattgctgaaagctttatcagggcataggcatatggttaagttctatgatgtatatgaggatgctgataatgtctttgttgttatggagttatgcgaaggtggagagctattggatagaattttggcgagaggtggacgataccctgaagtcgatgccaaacgtattcttgtgcagattttgtctgcaacagcattttttcaccttcaaggtgtcgtgcaccgtgatctgaagccggagaattttctctttaccagcagaaatgaggatgcgatactcaaggtcatagattttggcttgtctgatttcattagatacgatcagcgtctcaatgatgttgtaggaagtgcatactatgttgcacctgaagtactccataggtcttacagcactgaagcagatatgtggagcatcggtgtcataagttacatacttctctgtggaagcagacctttctatggaagaactgagtctgcaatattccgttgtgtgcttagagcaaaccctaattttgaggatatgccttggccttctatatctcctactgccaaagacttcgtgaaaaggcttttgaacaaggaccataggaaacgaatgacagctgctcaagctctagctcatccgtggttacgtgacgaaaaccccggtttgcttcttgatttctcggtctacaagttggtcaagtcctatatccgtgcctcacctttccgacgatcagcacttaaggctctctcgaaagctatacctgatgaagaacttgtgttccttaaggcacagttcatgctcctggatcctaaagacggagacctatcccttaactgtttcacaatggctttaacaagatatgctactgatgctatgatggaatcaaggcttcctgacattttaaatacgatgcaacctctggcgcaaaagaagcttgactttgaagagttctgtgcggctgcggtcagtgtttaccaactggaggctcttgaagaatgggaacagattgcaacttcagcatttgagcactttgaacatgaaggaaaccgaatcatatctgtccaagaactcgccggggagatgagcgtgggaccgagtgcatatcctctgctcaaggattggatccgaagttcggatggaaagctgagtttcttggggtacgctaagttcttgcatggtgtgaccgtacgaagctcaagctcgagacctaggtgacacaccatgatgtaaaaagtcttctaacatgtgaattgagtttcaagaaacatcctaaacaatgtcgtcgtcagagaccttggattcaaagattaaaaaaaaaaaacttgaaatggaagtgaagtcaggtaggtatttcctttgtaaatgattctttgagcattttgttttcgaaacaaactaaaaaaggaaaaacatatt

SEQ ID NO: 21647 - protein, 594 aa, Arabidopsis thaliana
  peptide (1)..(594): Ceres Seq. ID no. 12327045
  misc_feature (143)..(405): Pfam Name: Protein kinase domain Pfam Description: Protein kinase domain
  misc_feature (1)..(590): Homolog of NCBI NO: 33146627 NR Description: putative CDPK-related protein kinase
  misc_feature (10)..(592): Homolog of NCBI NO: 7446432 NR Description: calcium/calmodulin-dependent protein kinase
  misc_feature (1)..(594): Homolog of NCBI NO: 18087555 NR Description: At2g46700/T3A4.8 [Arabidopsis thaliana]
  misc_feature (1)..(594): Homolog of NCBI NO: 15226426 NR Description: putative calcium-dependent protein kinase
  misc_feature (1)..(592): Homolog of NCBI NO: 7446431 NR Description: calcium-dependent protein kinase-related protein
  misc_feature (1)..(592): Homolog of NCBI NO: 19547871 NR Description: serine/threonine protein kinase pk23
  misc_feature (1)..(592): Homolog of NCBI NO: 16904222 NR Description: calcium/calmodulin-dependent protein kinase CaMK1
  misc_feature (142)..(594): Homolog of NCBI NO: 4741927 NR Description: calcium dependent protein kinase CP4 [Arabidopsis
  misc_feature (167)..(594): Homolog of NCBI NO: 22136058 NR Description: calcium dependent protein kinase-like protein
  misc_feature (1)..(593): Homolog of NCBI NO: 15229129 NR Description: calcium dependent protein kinase - like; protein
MGHCYSRNISAVEDDEIPTGNGEVSNQPSQNHRHASIPQSPVASGTPEVNSYNISPFQSPLPAGVAPSPARTPGRKFKWPFPPPSPAKPIMAALRRRRGAPPQPRDEPIPEDSEDVVDHGGDSGGGERLDKNFGFGKNFEGKYELGKEVGRGHFGHTCWAKAKKGKMKNQTVAVKIISKAKMTSTLSIEDVRREVKLLKALSGHRHMVKFYDVYEDADNVFVVMELCEGGELLDRILARGGRYPEVDAKRILVQILSATAFFHLQGVVHRDLKPENFLFTSRNEDAILKVIDFGLSDFIRYDQRLNDVVGSAYYVAPEVLHRSYSTEADMWSIGVISYILLCGSRPFYGRTESAIFRCVLRANPNFEDMPWPSISPTAKDFVKRLLNKDHRKRMTAAQALAHPWLRDENPGLLLDFSVYKLVKSYIRASPFRRSALKALSKAIPDEELVFLKAQFMLLDPKDGDLSLNCFTMALTRYATDAMMESRLPDILNTMQPLAQKKLDFEEFCAAAVSVYQLEALEEWEQIATSAFEHFEHEGNRIISVQELAGEMSVGPSAYPLLKDWIRSSDGKLSFLGYAKFLHGVTVRSSSSRPR

SEQ ID NO: 21648 - protein, 504 aa, Arabidopsis thaliana
  peptide (1)..(504): Ceres Seq. ID no. 12327046
  misc_feature (53)..(315): Pfam Name: Protein kinase domain Pfam Description: Protein kinase domain
  misc_feature (1)..(500): Homolog of NCBI NO: 33146627 NR Description: putative CDPK-related protein kinase
  misc_feature (1)..(502): Homolog of NCBI NO: 7446432 NR Description: calcium/calmodulin-dependent protein kinase
  misc_feature (1)..(504): Homolog of NCBI NO: 18087555 NR Description: At2g46700/T3A4.8 [Arabidopsis thaliana]
  misc_feature (1)..(504): Homolog of NCBI NO: 15226426 NR Description: putative calcium-dependent protein kinase
  misc_feature (1)..(502): Homolog of NCBI NO: 7446431 NR Description: calcium-dependent protein kinase-related protein
  misc_feature (1)..(502): Homolog of NCBI NO: 19547871 NR Description: serine/threonine protein kinase pk23
  misc_feature (1)..(502): Homolog of NCBI NO: 16904222 NR Description: calcium/calmodulin-dependent protein kinase CaMK1
  misc_feature (52)..(504): Homolog of NCBI NO: 4741927 NR Description: calcium dependent protein kinase CP4 [Arabidopsis
  misc_feature (77)..(504): Homolog of NCBI NO: 22136058 NR Description: calcium dependent protein kinase-like protein
  misc_feature (1)..(503): Homolog of NCBI NO: 15229129 NR Description: calcium dependent protein kinase - like; protein
MAALRRRRGAPPQPRDEPIPEDSEDVVDHGGDSGGGERLDKNFGFGKNFEGKYELGKEVGRGHFGHTCWAKAKKGKMKNQTVAVKIISKAKMTSTLSIEDVRREVKLLKALSGHRHMVKFYDVYEDADNVFVVMELCEGGELLDRILARGGRYPEVDAKRILVQILSATAFFHLQGVVHRDLKPENFLFTSRNEDAILKVIDFGLSDFIRYDQRLNDVVGSAYYVAPEVLHRSYSTEADMWSIGVISYILLCGSRPFYGRTESAIFRCVLRANPNFEDMPWPSISPTAKDFVKRLLNKDHRKRMTAAQALAHPWLRDENPGLLLDFSVYKLVKSYIRASPFRRSALKALSKAIPDEELVFLKAQFMLLDPKDGDLSLNCFTMALTRYATDAMMESRLPDILNTMQPLAQKKLDFEEFCAAAVSVYQLEALEEWEQIATSAFEHFEHEGNRIISVQELAGEMSVGPSAYPLLKDWIRSSDGKLSFLGYAKFLHGVTVRSSSSRPR

SEQ ID NO: 21649 - protein, 428 aa, Arabidopsis thaliana
  peptide (1)..(428): Ceres Seq. ID no. 12327047
  misc_feature (1)..(239): Pfam Name: Protein kinase domain Pfam Description: Protein kinase domain
  misc_feature (1)..(426): Homolog of NCBI NO: 7446432 NR Description: calcium/calmodulin-dependent protein kinase
  misc_feature (1)..(428): Homolog of NCBI NO: 18087555 NR Description: At2g46700/T3A4.8 [Arabidopsis thaliana]
  misc_feature (1)..(428): Homolog of NCBI NO: 15226426 NR Description: putative calcium-dependent protein kinase
  misc_feature (1)..(426): Homolog of NCBI NO: 7446431 NR Description: calcium-dependent protein kinase-related protein
  misc_feature (1)..(426): Homolog of NCBI NO: 19547871 NR Description: serine/threonine protein kinase pk23
  misc_feature (1)..(424): Homolog of NCBI NO: 33146627 NR Description: putative CDPK-related protein kinase
  misc_feature (1)..(426): Homolog of NCBI NO: 16904222 NR Description: calcium/calmodulin-dependent protein kinase CaMK1
  misc_feature (1)..(428): Homolog of NCBI NO: 4741927 NR Description: calcium dependent protein kinase CP4 [Arabidopsis
  misc_feature (1)..(428): Homolog of NCBI NO: 22136058 NR Description: calcium dependent protein kinase-like protein
  misc_feature (1)..(427): Homolog of NCBI NO: 15229129 NR Description: calcium dependent protein kinase - like; protein
MKNQTVAVKIISKAKMTSTLSIEDVRREVKLLKALSGHRHMVKFYDVYEDADNVFVVMELCEGGELLDRILARGGRYPEVDAKRILVQILSATAFFHLQGVVHRDLKPENFLFTSRNEDAILKVIDFGLSDFIRYDQRLNDVVGSAYYVAPEVLHRSYSTEADMWSIGVISYILLCGSRPFYGRTESAIFRCVLRANPNFEDMPWPSISPTAKDFVKRLLNKDHRKRMTAAQALAHPWLRDENPGLLLDFSVYKLVKSYIRASPFRRSALKALSKAIPDEELVFLKAQFMLLDPKDGDLSLNCFTMALTRYATDAMMESRLPDILNTMQPLAQKKLDFEEFCAAAVSVYQLEALEEWEQIATSAFEHFEHEGNRIISVQELAGEMSVGPSAYPLLKDWIRSSDGKLSFLGYAKFLHGVTVRSSSSRPR

SEQ ID NO: 21650 - DNA, 752 bp, Arabidopsis thaliana
  misc_feature (1)..(752): Ceres Seq. ID no. 12466396
  misc_feature: MA Experiment ID: 108434 Result: Down-regulated in Transcription
  misc_feature: MA Experiment 108434 PARAMETER Experiment Name: At_Root_Tips_cDNA_P Parameter: Tissue Value: Root Tips
  misc_feature: MA Experiment ID: 108488 Result: Down-regulated in Transcription
  misc_feature: MA Experiment ID: 20000071 Result: Up-regulated in Transcription
  misc_feature: MA Experiment 20000071 PARAMETER Experiment Name: At_100uM_ABA_Mutants_cDNA_P Parameter: Plant Line Value: CS8104
  misc_feature: MA Experiment 20000071 PARAMETER Experiment Name: At_100uM_ABA_Mutants_cDNA_P Parameter: Timepoint (hr) Value: 6
  misc_feature: MA Experiment 20000071 PARAMETER Experiment Name: At_100uM_ABA_Mutants_cDNA_P Parameter: Tissue Value: Aerial
  misc_feature: MA Experiment 20000071 PARAMETER Experiment Name: At_100uM_ABA_Mutants_cDNA_P Parameter: Treatment Value: 100uM ABA vs. No Treatment
  misc_feature: MA Experiment ID: 20000113 Result: Up-regulated in Transcription
  misc_feature: MA Experiment 20000113 PARAMETER Experiment Name: At_42deg_Heat_cDNA_P Parameter: Temperature (deg C) Value: 42 vs. 22
  misc_feature: MA Experiment 20000113 PARAMETER Experiment Name: At_42deg_Heat_cDNA_P Parameter: Timepoint (hr) Value: 8
  misc_feature: MA Experiment 20000113 PARAMETER Experiment Name: At_42deg_Heat_cDNA_P Parameter: Tissue Value: Aerial
  misc_feature: MA Experiment ID: 20000117 Result: Up-regulated in Transcription
  misc_feature: MA Experiment 20000117 PARAMETER Experiment Name: At_100uM_ABA_Mutants_cDNA_P Parameter: Plant Line Value: Columbia
  misc_feature: MA Experiment 20000117 PARAMETER Experiment Name: At_100uM_ABA_Mutants_cDNA_P Parameter: Timepoint (hr) Value: 6
  misc_feature: MA Experiment 20000117 PARAMETER Experiment Name: At_100uM_ABA_Mutants_cDNA_P Parameter: Tissue Value: Aerial
  misc_feature: MA Experiment 20000117 PARAMETER Experiment Name: At_100uM_ABA_Mutants_cDNA_P Parameter: Treatment Value: 100uM ABA vs. No Treatment
  misc_feature: MA Experiment ID: 20000182 Result: Up-regulated in Transcription
  misc_feature: MA Experiment 20000182 PARAMETER Experiment Name: At_2mM_SA_P Parameter: Age (day) Value: 14
  misc_feature: MA Experiment 20000182 PARAMETER Experiment Name: At_2mM_SA_P Parameter: Organism Value: A. thaliana
  misc_feature: MA Experiment 20000182 PARAMETER Experiment Name: At_2mM_SA_P Parameter: Plant Line Value: WS
  misc_feature: MA Experiment 20000182 PARAMETER Experiment Name: At_2mM_SA_P Parameter: Timepoint (hr) Value: 6
  misc_feature: MA Experiment 20000182 PARAMETER Experiment Name: At_2mM_SA_P Parameter: Tissue Value: Aerial
  misc_feature: MA Experiment 20000182 PARAMETER Experiment Name: At_2mM_SA_P Parameter: Treatment Value: 2mM SA vs. No Treatment
  misc_feature: MA Experiment ID: 20000234 Result: Down-regulated in Transcription
  misc_feature: MA Experiment 20000234 PARAMETER Experiment Name: At_Siliques_P Parameter: Age (day) Value: 21
  misc_feature: MA Experiment 20000234 PARAMETER Experiment Name: At_Siliques_P Parameter: Organism Value: A. thaliana
  misc_feature: MA Experiment 20000234 PARAMETER Experiment Name: At_Siliques_P Parameter: Plant Line Value: WS
  misc_feature: MA Experiment 20000234 PARAMETER Experiment Name: At_Siliques_P Parameter: Tissue Value: Less Than 5mm Siliques vs. Whole Plant
  misc_feature: MA Experiment ID: 20000265 Result: Down-regulated in Transcription
  misc_feature: MA Experiment 20000265 PARAMETER Experiment Name: At_Open_Flower_P Parameter: Age (day) Value: 21
  misc_feature: MA Experiment 20000265 PARAMETER Experiment Name: At_Open_Flower_P Parameter: Plant Line Value: WS
  misc_feature: MA Experiment 20000265 PARAMETER Experiment Name: At_Open_Flower_P Parameter: Tissue Value: Closed Flower vs. Whole Plant
  misc_feature: MA Experiment ID: 20000436 Result: Up-regulated in Transcription
  misc_feature: MA Experiment 20000436 PARAMETER Experiment Name: At_Drought_P Parameter: Age (day) Value: 7
  misc_feature: MA Experiment 20000436 PARAMETER Experiment Name: At_Drought_P Parameter: Organism Value: A. thaliana
  misc_feature: MA Experiment 20000436 PARAMETER Experiment Name: At_Drought_P Parameter: Plant Line Value: WS
  misc_feature: MA Experiment 20000436 PARAMETER Experiment Name: At_Drought_P Parameter: Timepoint (hr) Value: 12
  misc_feature: MA Experiment 20000436 PARAMETER Experiment Name: At_Drought_P Parameter: Tissue Value: Whole Plant
  misc_feature: MA Experiment 20000436 PARAMETER Experiment Name: At_Drought_P Parameter: Treatment Value: Drought vs. No Drought
  misc_feature: MA Experiment ID: 20000437 Result: Up-regulated in Transcription
  misc_feature: MA Experiment 20000437 PARAMETER Experiment Name: At_Drought_P Parameter: Age (day) Value: 8
  misc_feature: MA Experiment 20000437 PARAMETER Experiment Name: At_Drought_P Parameter: Organism Value: A. thaliana
  misc_feature: MA Experiment 20000437 PARAMETER Experiment Name: At_Drought_P Parameter: Plant Line Value: WS
  misc_feature: MA Experiment 20000437 PARAMETER Experiment Name: At_Drought_P Parameter: Timepoint (hr) Value: 24
  misc_feature: MA Experiment 20000437 PARAMETER Experiment Name: At_Drought_P Parameter: Tissue Value: Whole Plant
  misc_feature: MA Experiment 20000437 PARAMETER Experiment Name: At_Drought_P Parameter: Treatment Value: Drought vs. No Drought
  misc_feature: MA Experiment ID: 20000794 Result: Up-regulated in Transcription
  misc_feature: MA Experiment 20000794 PARAMETER Experiment Name: At_Petals_P Parameter: Age (day) Value: 23-25 days
  misc_feature: MA Experiment 20000794 PARAMETER Experiment Name: At_Petals_P Parameter: Plant Line Value: WS
  misc_feature: MA Experiment 20000794 PARAMETER Experiment Name: At_Petals_P Parameter: Tissue Value: Petals vs. Whole plant
  misc_feature: MA Experiment ID: 20001555 Result: Up-regulated in Transcription
  misc_feature: MA Experiment 20001555 PARAMETER Experiment Name: At_Drought_Soil_Dry_P Parameter: Age (day) Value: 24
  misc_feature: MA Experiment 20001555 PARAMETER Experiment Name: At_Drought_Soil_Dry_P Parameter: Organism Value: A. thaliana
  misc_feature: MA Experiment 20001555 PARAMETER Experiment Name: At_Drought_Soil_Dry_P Parameter: Plant Line Value: WS
  misc_feature: MA Experiment 20001555 PARAMETER Experiment Name: At_Drought_Soil_Dry_P Parameter: Post Timepoint (hr) Value: None
  misc_feature: MA Experiment 20001555 PARAMETER Experiment Name: At_Drought_Soil_Dry_P Parameter: Post-Treatment Value: None
  misc_feature: MA Experiment 20001555 PARAMETER Experiment Name: At_Drought_Soil_Dry_P Parameter: Timepoint (day) Value: 10
  misc_feature: MA Experiment 20001555 PARAMETER Experiment Name: At_Drought_Soil_Dry_P Parameter: Treatment Value: Drought vs. No Drought
  misc_feature: MA Experiment ID: 20001559 Result: Up-regulated in Transcription
  misc_feature: MA Experiment 20001559 PARAMETER Experiment Name: At_Drought_Soil_Dry_P Parameter: Age (day) Value: 28
  misc_feature: MA Experiment 20001559 PARAMETER Experiment Name: At_Drought_Soil_Dry_P Parameter: Organism Value: A. thaliana
  misc_feature: MA Experiment 20001559 PARAMETER Experiment Name: At_Drought_Soil_Dry_P Parameter: Plant Line Value: WS
  misc_feature: MA Experiment 20001559 PARAMETER Experiment Name: At_Drought_Soil_Dry_P Parameter: Post Timepoint (hr) Value: 29
  misc_feature: MA Experiment 20001559 PARAMETER Experiment Name: At_Drought_Soil_Dry_P Parameter: Post-Treatment Value: Re-Water vs. No Drought
  misc_feature: MA Experiment 20001559 PARAMETER Experiment Name: At_Drought_Soil_Dry_P Parameter: Timepoint (day) Value: 14
  misc_feature: MA Experiment 20001559 PARAMETER Experiment Name: At_Drought_Soil_Dry_P Parameter: Treatment Value: Drought vs. No Drought
  misc_feature: MA Experiment ID: 20001904 Result: Up-regulated in Transcription
  misc_feature: MA Experiment 20001904 PARAMETER Experiment Name: At_Drought_Reproduction_P Parameter: Age (day) Value: 37
  misc_feature: MA Experiment 20001904 PARAMETER Experiment Name: At_Drought_Reproduction_P Parameter: Organism Value: A. thaliana
  misc_feature: MA Experiment 20001904 PARAMETER Experiment Name: At_Drought_Reproduction_P Parameter: Plant Line Value: WS
  misc_feature: MA Experiment 20001904 PARAMETER Experiment Name: At_Drought_Reproduction_P Parameter: Timepoint (day) Value: 7
  misc_feature: MA Experiment 20001904 PARAMETER Experiment Name: At_Drought_Reproduction_P Parameter: Tissue Value: Rosettes
  misc_feature: MA Experiment 20001904 PARAMETER Experiment Name: At_Drought_Reproduction_P Parameter: Treatment Value: Drought vs. No Drought
  misc_feature: MA Experiment ID: 20001906 Result: Up-regulated in Transcription
  misc_feature: MA Experiment 20001906 PARAMETER Experiment Name: At_Drought_Reproduction_P Parameter: Age (day) Value: 35
  misc_feature: MA Experiment 20001906 PARAMETER Experiment Name: At_Drought_Reproduction_P Parameter: Organism Value: A. thaliana
  misc_feature: MA Experiment 20001906 PARAMETER Experiment Name: At_Drought_Reproduction_P Parameter: Plant Line Value: WS
  misc_feature: MA Experiment 20001906 PARAMETER Experiment Name: At_Drought_Reproduction_P Parameter: Timepoint (day) Value: 5
  misc_feature: MA Experiment 20001906 PARAMETER Experiment Name: At_Drought_Reproduction_P Parameter: Tissue Value: Siliques
  misc_feature: MA Experiment 20001906 PARAMETER Experiment Name: At_Drought_Reproduction_P Parameter: Treatment Value: Drought vs. No Drought
  misc_feature: MA Experiment ID: 20001908 Result: Up-regulated in Transcription
  misc_feature: MA Experiment 20001908 PARAMETER Experiment Name: At_Drought_Reproduction_P Parameter: Age (day) Value: 40
  misc_feature: MA Experiment 20001908 PARAMETER Experiment Name: At_Drought_Reproduction_P Parameter: Organism Value: A. thaliana
  misc_feature: MA Experiment 20001908 PARAMETER Experiment Name: At_Drought_Reproduction_P Parameter: Plant Line Value: WS
  misc_feature: MA Experiment 20001908 PARAMETER Experiment Name: At_Drought_Reproduction_P Parameter: Timepoint (day) Value: 10
  misc_feature: MA Experiment 20001908 PARAMETER Experiment Name: At_Drought_Reproduction_P Parameter: Tissue Value: Siliques
  misc_feature: MA Experiment 20001908 PARAMETER Experiment Name: At_Drought_Reproduction_P Parameter: Treatment Value: Drought vs. No Drought
  misc_feature: MA Experiment ID: 20001910 Result: Up-regulated in Transcription
  misc_feature: MA Experiment 20001910 PARAMETER Experiment Name: At_Drought_Reproduction_P Parameter: Age (day) Value: 37
  misc_feature: MA Experiment 20001910 PARAMETER Experiment Name: At_Drought_Reproduction_P Parameter: Organism Value: A. thaliana
  misc_feature: MA Experiment 20001910 PARAMETER Experiment Name: At_Drought_Reproduction_P Parameter: Plant Line Value: WS
  misc_feature: MA Experiment 20001910 PARAMETER Experiment Name: At_Drought_Reproduction_P Parameter: Timepoint (day) Value: 7
  misc_feature: MA Experiment 20001910 PARAMETER Experiment Name: At_Drought_Reproduction_P Parameter: Tissue Value: Flowers
  misc_feature: MA Experiment 20001910 PARAMETER Experiment Name: At_Drought_Reproduction_P Parameter: Treatment Value: Drought vs. No Drought
  misc_feature: MA Experiment ID: 20001911 Result: Up-regulated in Transcription
  misc_feature: MA Experiment 20001911 PARAMETER Experiment Name: At_Drought_Reproduction_P Parameter: Age (day) Value: 40
  misc_feature: MA Experiment 20001911 PARAMETER Experiment Name: At_Drought_Reproduction_P Parameter: Organism Value: A. thaliana
  misc_feature: MA Experiment 20001911 PARAMETER Experiment Name: At_Drought_Reproduction_P Parameter: Plant Line Value: WS
  misc_feature: MA Experiment 20001911 PARAMETER Experiment Name: At_Drought_Reproduction_P Parameter: Timepoint (day) Value: 10
  misc_feature: MA Experiment 20001911 PARAMETER Experiment Name: At_Drought_Reproduction_P Parameter: Tissue Value: Flowers
  misc_feature: MA Experiment 20001911 PARAMETER Experiment Name: At_Drought_Reproduction_P Parameter: Treatment Value: Drought vs. No Drought
ctataaaaactaaactccattcgctgacttcgcaaagaagaacactttctctctgaaatctcaaattcatctcttctcttccgatttcgctgaatcatgtcagacgacgagcatcacttcgaatccagcgacgccggagcttctaagacttatcctcaacaagccggtaacattcgtaaaggtggtcacatcgtcatcaagggacgtccctgcaaggtggttgaggtatcgacttcgaagactgggaagcatggtcacgccaagtgtcactttgttgccattgatatctttacttctaagaagcttgaagatatcgttccttcttcccacaattgtgatgttccacatgtgaatcgtgttgattatcagttgattgatatctctgaagatggctttgttagtcttcttactgataatggtagcactaaggatgatctgaagctgccaacagatgaagctttactcacacagctcaagaatggatttgaggagggtaaggatattgttgtgtctgtcatgtctgcaatgggagaggagcagatgtgtgctctcaaggaagttggtcccaagtaataataataagtaagcattctctcttttacagaggctatgtattatcaagtttgacagagtcaaatgttataagaacaaagtttggtccttttttttggtcttcttagtataatttaagcccacatgtgtttcccatgcaagacactcttatatttactagtatatcttactattggttt

SEQ ID NO: 21651 - protein, 158 aa, Arabidopsis thaliana
  peptide (1)..(158): Ceres Seq. ID no. 12466397
  misc_feature (84)..(153): Pfam Name: Eukaryotic initiation factor 5A hypusine, Pfam Description: Eukaryotic initiation factor 5A hypusine,
  misc_feature (1)..(156): Homolog of NCBI NO: 15222741 NR Description: initiation factor 5A-4, putative
  misc_feature (1)..(156): Homolog of NCBI NO: 9295717 NR Description: T24P13.1 [Arabidopsis thaliana]
  misc_feature (1)..(158): Homolog of NCBI NO: 20138786 NR Description: Eukaryotic translation initiation factor 5A
  misc_feature (1)..(158): Homolog of NCBI NO: 20138708 NR Description: Eukaryotic translation initiation factor 5A-1
  misc_feature (1)..(158): Homolog of NCBI NO: 15223002 NR Description: initiation factor 5A-4
  misc_feature (1)..(158): Homolog of NCBI NO: 20138664 NR Description: Eukaryotic translation initiation factor 5A-2
  misc_feature (1)..(158): Homolog of NCBI NO: 124226 NR Description: Eukaryotic translation initiation factor 5A-2
  misc_feature (1)..(156): Homolog of NCBI NO: 40805177 NR Description: eukaryotic translation initiation factor-5A
  misc_feature (1)..(158): Homolog of NCBI NO: 13937159 NR Description: At1g69410/F10D13.8 [Arabidopsis thaliana]
  misc_feature (1)..(158): Homolog of NCBI NO: 15222317 NR Description: Eukaryotic initiation  factor 5A , putative
MSDDEHHFESSDAGASKTYPQQAGNIRKGGHIVIKGRPCKVVEVSTSKTGKHGHAKCHFVAIDIFTSKKLEDIVPSSHNCDVPHVNRVDYQLIDISEDGFVSLLTDNGSTKDDLKLPTDEALLTQLKNGFEEGKDIVVSVMSAMGEEQMCALKEVGPK

SEQ ID NO: 21652 - DNA, 869 bp, Arabidopsis thaliana
  misc_feature (1)..(869): Ceres Seq. ID no. 12393543
  misc_feature: MA Experiment ID: 108434 Result: Down-regulated in Transcription
  misc_feature: MA Experiment 108434 PARAMETER Experiment Name: At_Root_Tips_cDNA_P Parameter: Tissue Value: Root Tips
  misc_feature: MA Experiment ID: 108464 Result: Up-regulated in Transcription
  misc_feature: MA Experiment 108464 PARAMETER Experiment Name: At_Germinating_Seeds_cDNA_P Parameter: Age (day) Value: 4 vs. 0
  misc_feature: MA Experiment 108464 PARAMETER Experiment Name: At_Germinating_Seeds_cDNA_P Parameter: Tissue Value: Germinating Seeds
  misc_feature: MA Experiment ID: 108501 Result: Up-regulated in Transcription
  misc_feature: MA Experiment 108501 PARAMETER Experiment Name: At_ap2_floral_buds_cDNA_P Parameter: Plant Line Value: ap2 (Ler.)
  misc_feature: MA Experiment 108501 PARAMETER Experiment Name: At_ap2_floral_buds_cDNA_P Parameter: Tissue Value: Closed Flower
  misc_feature: MA Experiment ID: 108561 Result: Up-regulated in Transcription
  misc_feature: MA Experiment 108561 PARAMETER Experiment Name: At_100uM_ABA_cDNA_P Parameter: Timepoint (hr) Value: 6
  misc_feature: MA Experiment 108561 PARAMETER Experiment Name: At_100uM_ABA_cDNA_P Parameter: Tissue Value: Aerial
  misc_feature: MA Experiment 108561 PARAMETER Experiment Name: At_100uM_ABA_cDNA_P Parameter: Treatment Value: 100uM ABA vs. No Treatment
  misc_feature: MA Experiment ID: 108576 Result: Up-regulated in Transcription
  misc_feature: MA Experiment 108576 PARAMETER Experiment Name: At_42deg_Heat_cDNA_P Parameter: Temperature (deg C) Value: 42 vs. 22
  misc_feature: MA Experiment 108576 PARAMETER Experiment Name: At_42deg_Heat_cDNA_P Parameter: Timepoint (hr) Value: 1
  misc_feature: MA Experiment 108576 PARAMETER Experiment Name: At_42deg_Heat_cDNA_P Parameter: Tissue Value: Aerial
  misc_feature: MA Experiment ID: 108577 Result: Up-regulated in Transcription
  misc_feature: MA Experiment 108577 PARAMETER Experiment Name: At_42deg_Heat_cDNA_P Parameter: Temperature (deg C) Value: 42 vs. 22
  misc_feature: MA Experiment 108577 PARAMETER Experiment Name: At_42deg_Heat_cDNA_P Parameter: Timepoint (hr) Value: 6
  misc_feature: MA Experiment 108577 PARAMETER Experiment Name: At_42deg_Heat_cDNA_P Parameter: Tissue Value: Aerial
  misc_feature: MA Experiment ID: 20000111 Result: Up-regulated in Transcription
  misc_feature: MA Experiment 20000111 PARAMETER Experiment Name: At_42deg_Heat_cDNA_P Parameter: Temperature (deg C) Value: 42 vs. 22
  misc_feature: MA Experiment 20000111 PARAMETER Experiment Name: At_42deg_Heat_cDNA_P Parameter: Timepoint (hr) Value: 6
  misc_feature: MA Experiment 20000111 PARAMETER Experiment Name: At_42deg_Heat_cDNA_P Parameter: Tissue Value: Aerial
  misc_feature: MA Experiment ID: 20000112 Result: Up-regulated in Transcription
  misc_feature: MA Experiment 20000112 PARAMETER Experiment Name: At_42deg_Heat_cDNA_P Parameter: Temperature (deg C) Value: 42 vs. 22
  misc_feature: MA Experiment 20000112 PARAMETER Experiment Name: At_42deg_Heat_cDNA_P Parameter: Timepoint (hr) Value: 2
  misc_feature: MA Experiment 20000112 PARAMETER Experiment Name: At_42deg_Heat_cDNA_P Parameter: Tissue Value: Aerial
  misc_feature: MA Experiment ID: 20000113 Result: Up-regulated in Transcription
  misc_feature: MA Experiment 20000113 PARAMETER Experiment Name: At_42deg_Heat_cDNA_P Parameter: Temperature (deg C) Value: 42 vs. 22
  misc_feature: MA Experiment 20000113 PARAMETER Experiment Name: At_42deg_Heat_cDNA_P Parameter: Timepoint (hr) Value: 8
  misc_feature: MA Experiment 20000113 PARAMETER Experiment Name: At_42deg_Heat_cDNA_P Parameter: Tissue Value: Aerial
  misc_feature: MA Experiment ID: 20000144 Result: Up-regulated in Transcription
  misc_feature: MA Experiment 20000144 PARAMETER Experiment Name: At_42deg_Heat_cDNA_P Parameter: Temperature (deg C) Value: 42 vs. 22
  misc_feature: MA Experiment 20000144 PARAMETER Experiment Name: At_42deg_Heat_cDNA_P Parameter: Timepoint (hr) Value: 1
  misc_feature: MA Experiment 20000144 PARAMETER Experiment Name: At_42deg_Heat_cDNA_P Parameter: Tissue Value: Aerial
  misc_feature: MA Experiment ID: 20000573 Result: Up-regulated in Transcription
  misc_feature: MA Experiment 20000573 PARAMETER Experiment Name: At_100uM_ABA_Mutants__P Parameter: Organism Value: A. thaliana
  misc_feature: MA Experiment 20000573 PARAMETER Experiment Name: At_100uM_ABA_Mutants__P Parameter: Plant Line Value: CS22 vs. Ler wt
  misc_feature: MA Experiment 20000573 PARAMETER Experiment Name: At_100uM_ABA_Mutants__P Parameter: Timepoint (hr) Value: N/A
  misc_feature: MA Experiment 20000573 PARAMETER Experiment Name: At_100uM_ABA_Mutants__P Parameter: Tissue Value: Whole Plant
  misc_feature: MA Experiment 20000573 PARAMETER Experiment Name: At_100uM_ABA_Mutants__P Parameter: Treatment Value: None
atcctgttggaccagtgttgcatctcgaaaacggcaatgacgatgatgagaagcaatcggaaattttgcggtggctcgacgagcaaccgtctaaatctgttgtgtttctctgctttgggagcttgggaggtttcactgaagaacaaacaagagaaaccgctgtggccctagatagaagcggtcagcggtttctttggtgtcttcgtcacgcatcgccaaatataaaaacagatcgtcccagagattacacgaatcttgaggaggttttaccggaggggttcttggaacggactttggatagagggaaagtgattggatgggcaccacaagtggcggtactagagaagccggcgataggagggtttgttactcattgcggctggaactctattttagagagcttgtggttcggtgttccaatggtgacgtggccgctatacgcggagcagaaggttaacgcgtttgagatggttgaggagctgggtttggcggtggagatacggaagtacttaaaaggagatttgttcgccggagagatggagacggttaccggggaggatatagagagagccattaggcgtgtgatggagcaagacagtgacgttaggaacaacgtgaaagagatggcggagaagtgccacttggcgttaatggacggtggatcttcgaaggcggctttggaaaagtttattcaagacgtgatagagaatatggattaaattggatagagagaatagcatgttgactatgactctatgagatacgatgactcagatccaaatgttactttgtatattatgtacgatatgtcaaaagaaaaatgtttgtttttcatttggtataagactttttgttcaaagtttaaatcc

SEQ ID NO: 21653 - protein, 238 aa, Arabidopsis thaliana
  peptide (1)..(238): Ceres Seq. ID no. 12393544
  misc_feature (1)..(237): Pfam Name: UDP-glucoronosyl and UDP-glucosyl transferase Pfam Description: UDP-glucoronosyl and UDP-glucosyl transferase
  misc_feature (2)..(237): Homolog of NCBI NO: 15233149 NR Description: UDP-glycosyltransferase family; protein id:
  misc_feature (2)..(237): Homolog of NCBI NO: 15233151 NR Description: putative UDP-glucose glucosyltransferase
  misc_feature (1)..(233): Homolog of NCBI NO: 15233158 NR Description: putative UDP-glucose glucosyltransferase; protein
  misc_feature (1)..(237): Homolog of NCBI NO: 15233157 NR Description: putative UDP-glucose glucosyltransferase; protein
  misc_feature (1)..(237): Homolog of NCBI NO: 11994646 NR Description: UTP-glucose glucosyltransferase [Arabidopsis
  misc_feature (1)..(237): Homolog of NCBI NO: 15233155 NR Description: putative UDP-glucose glucosyltransferase; protein
  misc_feature (1)..(237): Homolog of NCBI NO: 11994645 NR Description: UTP-glucose glucosyltransferase [Arabidopsis
  misc_feature (1)..(237): Homolog of NCBI NO: 30683191 NR Description: UDP-glycosyltransferase family [Arabidopsis
  misc_feature (1)..(237): Homolog of NCBI NO: 7488111 NR Description: probable glucosyltransferase - Arabidopsis
  misc_feature (1)..(238): Homolog of NCBI NO: 15233761 NR Description: UTP-glucose glucosyltransferase; protein id:
PVGPVLHLENGNDDDEKQSEILRWLDEQPSKSVVFLCFGSLGGFTEEQTRETAVALDRSGQRFLWCLRHASPNIKTDRPRDYTNLEEVLPEGFLERTLDRGKVIGWAPQVAVLEKPAIGGFVTHCGWNSILESLWFGVPMVTWPLYAEQKVNAFEMVEELGLAVEIRKYLKGDLFAGEMETVTGEDIERAIRRVMEQDSDVRNNVKEMAEKCHLALMDGGSSKAALEKFIQDVIENMD

SEQ ID NO: 21654 - DNA, 1518 bp, Arabidopsis thaliana
  misc_feature (1)..(1518): Ceres Seq. ID no. 12327700
  misc_feature: MA Experiment ID: 108461 Result: Up-regulated in Transcription
  misc_feature: MA Experiment 108461 PARAMETER Experiment Name: At_Germinating_Seeds_cDNA_P Parameter: Age (day) Value: 1 vs. 0
  misc_feature: MA Experiment 108461 PARAMETER Experiment Name: At_Germinating_Seeds_cDNA_P Parameter: Tissue Value: Germinating Seeds
  misc_feature: MA Experiment ID: 108577 Result: Down-regulated in Transcription
  misc_feature: MA Experiment 108577 PARAMETER Experiment Name: At_42deg_Heat_cDNA_P Parameter: Temperature (deg C) Value: 42 vs. 22
  misc_feature: MA Experiment 108577 PARAMETER Experiment Name: At_42deg_Heat_cDNA_P Parameter: Timepoint (hr) Value: 6
  misc_feature: MA Experiment 108577 PARAMETER Experiment Name: At_42deg_Heat_cDNA_P Parameter: Tissue Value: Aerial
  misc_feature: MA Experiment ID: 20000171 Result: Down-regulated in Transcription
  misc_feature: MA Experiment 20000171 PARAMETER Experiment Name: At_42deg_Heat_P Parameter: Age (day) Value: 14
  misc_feature: MA Experiment 20000171 PARAMETER Experiment Name: At_42deg_Heat_P Parameter: Organism Value: A. thaliana
  misc_feature: MA Experiment 20000171 PARAMETER Experiment Name: At_42deg_Heat_P Parameter: Plant Line Value: WS
  misc_feature: MA Experiment 20000171 PARAMETER Experiment Name: At_42deg_Heat_P Parameter: Temperature (deg C) Value: 42 vs. 22
  misc_feature: MA Experiment 20000171 PARAMETER Experiment Name: At_42deg_Heat_P Parameter: Timepoint (hr) Value: 1
  misc_feature: MA Experiment 20000171 PARAMETER Experiment Name: At_42deg_Heat_P Parameter: Tissue Value: Aerial
  misc_feature: MA Experiment ID: 20000173 Result: Down-regulated in Transcription
  misc_feature: MA Experiment 20000173 PARAMETER Experiment Name: At_42deg_Heat_P Parameter: Age (day) Value: 14
  misc_feature: MA Experiment 20000173 PARAMETER Experiment Name: At_42deg_Heat_P Parameter: Organism Value: A. thaliana
  misc_feature: MA Experiment 20000173 PARAMETER Experiment Name: At_42deg_Heat_P Parameter: Plant Line Value: WS
  misc_feature: MA Experiment 20000173 PARAMETER Experiment Name: At_42deg_Heat_P Parameter: Temperature (deg C) Value: 42 vs. 22
  misc_feature: MA Experiment 20000173 PARAMETER Experiment Name: At_42deg_Heat_P Parameter: Timepoint (hr) Value: 6
  misc_feature: MA Experiment 20000173 PARAMETER Experiment Name: At_42deg_Heat_P Parameter: Tissue Value: Aerial
  misc_feature: MA Experiment ID: 20000179 Result: Up-regulated in Transcription
  misc_feature: MA Experiment 20000179 PARAMETER Experiment Name: At_Germinating_Seeds_P Parameter: Age (hr) Value: 6 vs. 0
  misc_feature: MA Experiment 20000179 PARAMETER Experiment Name: At_Germinating_Seeds_P Parameter: Tissue Value: Germinating Seeds
  misc_feature: MA Experiment ID: 20000180 Result: Up-regulated in Transcription
  misc_feature: MA Experiment 20000180 PARAMETER Experiment Name: At_Germinating_Seeds_P Parameter: Age (hr) Value: 24 vs. 0
  misc_feature: MA Experiment 20000180 PARAMETER Experiment Name: At_Germinating_Seeds_P Parameter: Tissue Value: Germinating Seeds
  misc_feature: MA Experiment ID: 20000234 Result: Up-regulated in Transcription
  misc_feature: MA Experiment 20000234 PARAMETER Experiment Name: At_Siliques_P Parameter: Age (day) Value: 21
  misc_feature: MA Experiment 20000234 PARAMETER Experiment Name: At_Siliques_P Parameter: Organism Value: A. thaliana
  misc_feature: MA Experiment 20000234 PARAMETER Experiment Name: At_Siliques_P Parameter: Plant Line Value: WS
  misc_feature: MA Experiment 20000234 PARAMETER Experiment Name: At_Siliques_P Parameter: Tissue Value: Less Than 5mm Siliques vs. Whole Plant
  misc_feature: MA Experiment ID: 20000264 Result: Up-regulated in Transcription
  misc_feature: MA Experiment 20000264 PARAMETER Experiment Name: At_Open_Flower_P Parameter: Age (day) Value: 21
  misc_feature: MA Experiment 20000264 PARAMETER Experiment Name: At_Open_Flower_P Parameter: Plant Line Value: WS
  misc_feature: MA Experiment 20000264 PARAMETER Experiment Name: At_Open_Flower_P Parameter: Tissue Value: Open Flower vs. Whole Plant
  misc_feature: MA Experiment ID: 20000265 Result: Up-regulated in Transcription
  misc_feature: MA Experiment 20000265 PARAMETER Experiment Name: At_Open_Flower_P Parameter: Age (day) Value: 21
  misc_feature: MA Experiment 20000265 PARAMETER Experiment Name: At_Open_Flower_P Parameter: Plant Line Value: WS
  misc_feature: MA Experiment 20000265 PARAMETER Experiment Name: At_Open_Flower_P Parameter: Tissue Value: Closed Flower vs. Whole Plant
  misc_feature: MA Experiment ID: 20000286 Result: Up-regulated in Transcription
  misc_feature: MA Experiment 20000286 PARAMETER Experiment Name: At_Open_Flower_P Parameter: Age (day) Value: 21
  misc_feature: MA Experiment 20000286 PARAMETER Experiment Name: At_Open_Flower_P Parameter: Plant Line Value: WS
  misc_feature: MA Experiment 20000286 PARAMETER Experiment Name: At_Open_Flower_P Parameter: Tissue Value: Half Open vs. Whole Plant
  misc_feature: MA Experiment ID: 20000794 Result: Up-regulated in Transcription
  misc_feature: MA Experiment 20000794 PARAMETER Experiment Name: At_Petals_P Parameter: Age (day) Value: 23-25 days
  misc_feature: MA Experiment 20000794 PARAMETER Experiment Name: At_Petals_P Parameter: Plant Line Value: WS
  misc_feature: MA Experiment 20000794 PARAMETER Experiment Name: At_Petals_P Parameter: Tissue Value: Petals vs. Whole plant
aaattagcttgttcacaaggaaatgcctcaaaagaggaaagacgattgattcatctcaaccttctcgtcttctttcggacaacaatgtcacaaaaagtctgatcctttctctttagatttggcttcgagaaatggctcgcgatcggcgggaaggtctggagatcaaggtggtgaatccaccggcggcggcgacaaacaatgtggctgtagaaacgtctccggcgacggcgacgaggagacggagacaacaacaacgagcttcgttcgcttagtttagaccgtttaagctttggtttccatggcttgttccagctatcgtggtggctaacattgcccttttcgccatttcgatgtttattaacaattgtcctaagaactcggcttattgcttagctaggtttcttgggagatttgcttttcagcctatgaaagagaatcctcttctgggtccttcttctttgacattggagaagatgggggctttaaatgtatcaatggtggttcataagcacgaggtgtggcgcttgttcacttgtatatggctacatgctggggtttttcatgttcttgccaacatgttgagccttatcttcattggcattcgacttgagcaagaatttggatttgtacgcattggattgctttatatgatatctggatttggtggaagtttgttatcttctctatttaaccgggctggtatatccgttggtgcctctggagcattattcggcttgcttggtgctatgctttcagagcttctcactaattggactatttacgctaataagtttgcagctcttttgacactcatcttcatcatagccattaatttagcagtaggtattcttccacatgtagacaactttgcccatcttggaggattcacatcagggtttcttctaggctttgttttcttgatacgtcctcagtatggatacttcaaccagcggaacaatcctcggggttatgctgcaccgtctgctaaatccaaacacaagccataccaatacgttctttggatcacctctttagtgcttttaatagcaggatataccgctggactcgtagtgcttcttcgaggaacggatctaaacaagcattgttcatggtgccattatctcagctgtattcctacgtcgctttggagctgtaaatctcaaaatgtctactgtgagtcgagccaaattgggcagcagatgaacttgacatgtatcacgaatgggaaaacagagatgtacaagctctctaacgatataccgtctcggattcagcagttgtgttcccaattgtgcagatgaataccactaaacgtctaatttttatactcttgtagaaagttaggaatgtgtcttgaggaagagaagattgttcatttaacatgatcatgcacttgtggattcttctttctgatcattgtttgtttccacttcttgttttattgttgcatatgtattgaccatgatctatgtaatgagaacataggtgaagagaaagttgaacaaagtttttgttctt

SEQ ID NO: 21655 - protein, 316 aa, Arabidopsis thaliana
  peptide (1)..(316): Ceres Seq. ID no. 12327701
  misc_feature (1)..(268): Homolog of NCBI NO: 15222058 NR Description: membrane protein, putative
  misc_feature (1)..(270): Homolog of NCBI NO: 294845 NR Description: membrane protein [Saccharum hybrid cultivar
  misc_feature (92)..(243): Homolog of NCBI NO: 7487872 NR Description: hypothetical protein At2g29050 [imported] -
  misc_feature (1)..(268): Homolog of NCBI NO: 15240744 NR Description: membrane protein
  misc_feature (1)..(268): Homolog of NCBI NO: 15221690 NR Description: membrane protein, putative; protein id:
  misc_feature (1)..(38): Homolog of NCBI NO: 7487872 NR Description: hypothetical protein At2g29050 [imported] -
  misc_feature (39)..(191): Homolog of NCBI NO: 7487872 NR Description: hypothetical protein At2g29050 [imported] -
  misc_feature (1)..(316): Homolog of NCBI NO: 11357824 NR Description: hypothetical protein F5K20.80 - Arabidopsis
  misc_feature (1)..(191): Homolog of NCBI NO: 30684102 NR Description: membrane protein, Rhomboid family [Arabidopsis
  misc_feature (1)..(316): Homolog of NCBI NO: 30693911 NR Description: membrane protein, Rhomboid family [Arabidopsis
MFINNCPKNSAYCLARFLGRFAFQPMKENPLLGPSSLTLEKMGALNVSMVVHKHEVWRLFTCIWLHAGVFHVLANMLSLIFIGIRLEQEFGFVRIGLLYMISGFGGSLLSSLFNRAGISVGASGALFGLLGAMLSELLTNWTIYANKFAALLTLIFIIAINLAVGILPHVDNFAHLGGFTSGFLLGFVFLIRPQYGYFNQRNNPRGYAAPSAKSKHKPYQYVLWITSLVLLIAGYTAGLVVLLRGTDLNKHCSWCHYLSCIPTSLWSCKSQNVYCESSQIGQQMNLTCITNGKTEMYKLSNDIPSRIQQLCSQLCR

SEQ ID NO: 21656 - protein, 291 aa, Arabidopsis thaliana
  peptide (1)..(291): Ceres Seq. ID no. 12327702
  misc_feature (1)..(243): Homolog of NCBI NO: 15222058 NR Description: membrane protein, putative
  misc_feature (1)..(245): Homolog of NCBI NO: 294845 NR Description: membrane protein [Saccharum hybrid cultivar
  misc_feature (67)..(218): Homolog of NCBI NO: 7487872 NR Description: hypothetical protein At2g29050 [imported] -
  misc_feature (1)..(243): Homolog of NCBI NO: 15240744 NR Description: membrane protein
  misc_feature (1)..(243): Homolog of NCBI NO: 15221690 NR Description: membrane protein, putative; protein id:
  misc_feature (1)..(13): Homolog of NCBI NO: 7487872 NR Description: hypothetical protein At2g29050 [imported] -
  misc_feature (14)..(166): Homolog of NCBI NO: 7487872 NR Description: hypothetical protein At2g29050 [imported] -
  misc_feature (1)..(291): Homolog of NCBI NO: 11357824 NR Description: hypothetical protein F5K20.80 - Arabidopsis
  misc_feature (1)..(166): Homolog of NCBI NO: 30684102 NR Description: membrane protein, Rhomboid family [Arabidopsis
  misc_feature (1)..(291): Homolog of NCBI NO: 30693911 NR Description: membrane protein, Rhomboid family [Arabidopsis
MKENPLLGPSSLTLEKMGALNVSMVVHKHEVWRLFTCIWLHAGVFHVLANMLSLIFIGIRLEQEFGFVRIGLLYMISGFGGSLLSSLFNRAGISVGASGALFGLLGAMLSELLTNWTIYANKFAALLTLIFIIAINLAVGILPHVDNFAHLGGFTSGFLLGFVFLIRPQYGYFNQRNNPRGYAAPSAKSKHKPYQYVLWITSLVLLIAGYTAGLVVLLRGTDLNKHCSWCHYLSCIPTSLWSCKSQNVYCESSQIGQQMNLTCITNGKTEMYKLSNDIPSRIQQLCSQLCR

SEQ ID NO: 21657 - protein, 275 aa, Arabidopsis thaliana
  peptide (1)..(275): Ceres Seq. ID no. 12327703
  misc_feature (1)..(227): Homolog of NCBI NO: 25402744 NR Description: protein T12C24.28 [imported] - Arabidopsis
  misc_feature (1)..(227): Homolog of NCBI NO: 15222058 NR Description: membrane protein, putative
  misc_feature (1)..(229): Homolog of NCBI NO: 294845 NR Description: membrane protein [Saccharum hybrid cultivar
  misc_feature (51)..(202): Homolog of NCBI NO: 7487872 NR Description: hypothetical protein At2g29050 [imported] -
  misc_feature (1)..(227): Homolog of NCBI NO: 15240744 NR Description: membrane protein
  misc_feature (1)..(227): Homolog of NCBI NO: 15221690 NR Description: membrane protein, putative; protein id:
  misc_feature (1)..(150): Homolog of NCBI NO: 7487872 NR Description: hypothetical protein At2g29050 [imported] -
  misc_feature (1)..(275): Homolog of NCBI NO: 11357824 NR Description: hypothetical protein F5K20.80 - Arabidopsis
  misc_feature (1)..(150): Homolog of NCBI NO: 30684102 NR Description: membrane protein, Rhomboid family [Arabidopsis
  misc_feature (1)..(275): Homolog of NCBI NO: 30693911 NR Description: membrane protein, Rhomboid family [Arabidopsis
MGALNVSMVVHKHEVWRLFTCIWLHAGVFHVLANMLSLIFIGIRLEQEFGFVRIGLLYMISGFGGSLLSSLFNRAGISVGASGALFGLLGAMLSELLTNWTIYANKFAALLTLIFIIAINLAVGILPHVDNFAHLGGFTSGFLLGFVFLIRPQYGYFNQRNNPRGYAAPSAKSKHKPYQYVLWITSLVLLIAGYTAGLVVLLRGTDLNKHCSWCHYLSCIPTSLWSCKSQNVYCESSQIGQQMNLTCITNGKTEMYKLSNDIPSRIQQLCSQLCR

SEQ ID NO: 21658 - DNA, 1082 bp, Arabidopsis thaliana
  misc_feature (1)..(1082): Ceres Seq. ID no. 12334810
  misc_feature: MA Experiment ID: 108434 Result: Up-regulated in Transcription
  misc_feature: MA Experiment 108434 PARAMETER Experiment Name: At_Root_Tips_cDNA_P Parameter: Tissue Value: Root Tips
  misc_feature: MA Experiment ID: 108435 Result: Up-regulated in Transcription
  misc_feature: MA Experiment 108435 PARAMETER Experiment Name: At_stm_Mutants_cDNA_P Parameter: Plant Line Value: wt Landsburg vs stm
  misc_feature: MA Experiment 108435 PARAMETER Experiment Name: At_stm_Mutants_cDNA_P Parameter: Tissue Value: Shoot Apical Meristem Region
  misc_feature: MA Experiment ID: 108462 Result: Down-regulated in Transcription
  misc_feature: MA Experiment 108462 PARAMETER Experiment Name: At_Germinating_Seeds_cDNA_P Parameter: Age (day) Value: 2 vs. 0
  misc_feature: MA Experiment 108462 PARAMETER Experiment Name: At_Germinating_Seeds_cDNA_P Parameter: Tissue Value: Germinating Seeds
  misc_feature: MA Experiment ID: 108463 Result: Down-regulated in Transcription
  misc_feature: MA Experiment 108463 PARAMETER Experiment Name: At_Germinating_Seeds_cDNA_P Parameter: Age (day) Value: 3 vs. 0
  misc_feature: MA Experiment 108463 PARAMETER Experiment Name: At_Germinating_Seeds_cDNA_P Parameter: Tissue Value: Germinating Seeds
  misc_feature: MA Experiment ID: 108464 Result: Down-regulated in Transcription
  misc_feature: MA Experiment 108464 PARAMETER Experiment Name: At_Germinating_Seeds_cDNA_P Parameter: Age (day) Value: 4 vs. 0
  misc_feature: MA Experiment 108464 PARAMETER Experiment Name: At_Germinating_Seeds_cDNA_P Parameter: Tissue Value: Germinating Seeds
  misc_feature: MA Experiment ID: 108488 Result: Up-regulated in Transcription
  misc_feature: MA Experiment ID: 108573 Result: Down-regulated in Transcription
  misc_feature: MA Experiment 108573 PARAMETER Experiment Name: At_Drought_cDNA_P Parameter: Timepoint (hr) Value: 6
  misc_feature: MA Experiment 108573 PARAMETER Experiment Name: At_Drought_cDNA_P Parameter: Tissue Value: Aerial
  misc_feature: MA Experiment 108573 PARAMETER Experiment Name: At_Drought_cDNA_P Parameter: Treatment Value: Drought vs. No Drought
  misc_feature: MA Experiment ID: 108595 Result: Down-regulated in Transcription
  misc_feature: MA Experiment 108595 PARAMETER Experiment Name: At_Ler-pi_Ovule_cDNA_P Parameter: Plant Line Value: null
  misc_feature: MA Experiment ID: 20000111 Result: Up-regulated in Transcription
  misc_feature: MA Experiment 20000111 PARAMETER Experiment Name: At_42deg_Heat_cDNA_P Parameter: Temperature (deg C) Value: 42 vs. 22
  misc_feature: MA Experiment 20000111 PARAMETER Experiment Name: At_42deg_Heat_cDNA_P Parameter: Timepoint (hr) Value: 6
  misc_feature: MA Experiment 20000111 PARAMETER Experiment Name: At_42deg_Heat_cDNA_P Parameter: Tissue Value: Aerial
gttttgtcctccttctacgccgcacactatcttttcctctcactcagacttcctcttcatctcaagagaaatggctgaatccaaggtagtggttccagagtctgtgctaaagaagatcaagaggcaagaggaatgggcattggccaagaaagatgaagctgtagctgctaagaagaagagtgttgaggcccgcaagcttatcttcaagagagctgagcagtatgccaaagaatacgctgagaaggataacgagttgatccgattgaagcgggaggctaagttgaaaggaggtttctacgttgaccctgaggctaagttgctctttatcattcgtatccgtggtatcaatgccattgacccaaaaaccaagaagattctgcagctcctgcgtttgagacaggtaggtttcacagtttgttattttcatccagctatattagcctaacatatgattattgattaatatttgttatatgttcaaactaatatgtgatagttgcctgttcatcatttttaaaagagagtagaagactattgcgttgtcaagaagtttactttcgtatacatttgtgcagatcttcaatggtgtgtttcttaaggtgaacaaggcaacagtaaacatgctgcgccgagttgaaccatacgtgacttacggatacccaaacttgaagagcgttaaggaactgatctacaaaagaggttatggaaagctgaaccaccagaggatagcacttactgacaactccattgtggatcaggctctcggaaagcatgggatcatctgcgttgaggatctcatccacgagatcatgactgttggacctcacttcaaggaagccaacaacttcctgtggccattccaattgaaggcaccactcggtggccttaagaagaagagaaaccactacgtcgaaggtggtgatgctggaaacagggagaatttcatcaacgagcttgtcaggagaatgaattgatgaaagcttccttctttatctttgcaaatttcaaagattttgggaccgagtttttttttttttttgttcaagttatcagagacttgtgatcttttatccgagataggc

SEQ ID NO: 21659 - protein, 147 aa, Arabidopsis thaliana
  peptide (1)..(147): Ceres Seq. ID no. 12334811
  misc_feature (24)..(134): Homolog of NCBI NO: 11383729 NR Description: ribosomal protein L7, cytosolic [validated] - rat
  misc_feature (31)..(134): Homolog of NCBI NO: 28630259 NR Description: ribosomal protein L7 [Branchiostoma lanceolatum]
  misc_feature (27)..(134): Homolog of NCBI NO: 38346542 NR Description: OSJNBa0035M09.3 [Oryza sativa (japonica
  misc_feature (20)..(134): Homolog of NCBI NO: 38637548 NR Description: putative 60S ribosomal protein L7
  misc_feature (24)..(134): Homolog of NCBI NO: 445613 NR Description: ribosomal protein L7
  misc_feature (25)..(134): Homolog of NCBI NO: 15231288 NR Description: ribosomal protein, putative
  misc_feature (24)..(134): Homolog of NCBI NO: 15226212 NR Description: putative ribosomal protein L7
  misc_feature (24)..(134): Homolog of NCBI NO: 27311547 NR Description: Unknown protein [Arabidopsis thaliana]
  misc_feature (24)..(134): Homolog of NCBI NO: 30689617 NR Description: 60S ribosomal protein L7 (RPL7C) [Arabidopsis
  misc_feature (23)..(134): Homolog of NCBI NO: 30689623 NR Description: 60S ribosomal protein L7 (RPL7C) [Arabidopsis
FCPPSTPHTIFSSHSDFLFISREMAESKVVVPESVLKKIKRQEEWALAKKDEAVAAKKKSVEARKLIFKRAEQYAKEYAEKDNELIRLKREAKLKGGFYVDPEAKLLFIIRIRGINAIDPKTKKILQLLRLRQVGFTVCYFHPAILA

SEQ ID NO: 21660 - protein, 124 aa, Arabidopsis thaliana
  peptide (1)..(124): Ceres Seq. ID no. 12334812
  misc_feature (1)..(111): Homolog of NCBI NO: 11383729 NR Description: ribosomal protein L7, cytosolic [validated] - rat
  misc_feature (8)..(111): Homolog of NCBI NO: 28630259 NR Description: ribosomal protein L7 [Branchiostoma lanceolatum]
  misc_feature (4)..(111): Homolog of NCBI NO: 38346542 NR Description: OSJNBa0035M09.3 [Oryza sativa (japonica
  misc_feature (1)..(111): Homolog of NCBI NO: 38637548 NR Description: putative 60S ribosomal protein L7
  misc_feature (1)..(111): Homolog of NCBI NO: 445613 NR Description: ribosomal protein L7
  misc_feature (2)..(111): Homolog of NCBI NO: 15231288 NR Description: ribosomal protein, putative
  misc_feature (1)..(111): Homolog of NCBI NO: 15226212 NR Description: putative ribosomal protein L7
  misc_feature (1)..(111): Homolog of NCBI NO: 27311547 NR Description: Unknown protein [Arabidopsis thaliana]
  misc_feature (1)..(111): Homolog of NCBI NO: 30689617 NR Description: 60S ribosomal protein L7 (RPL7C) [Arabidopsis
  misc_feature (1)..(111): Homolog of NCBI NO: 30689623 NR Description: 60S ribosomal protein L7 (RPL7C) [Arabidopsis
MAESKVVVPESVLKKIKRQEEWALAKKDEAVAAKKKSVEARKLIFKRAEQYAKEYAEKDNELIRLKREAKLKGGFYVDPEAKLLFIIRIRGINAIDPKTKKILQLLRLRQVGFTVCYFHPAILA

SEQ ID NO: 21661 - protein, 117 aa, Arabidopsis thaliana
  peptide (1)..(117): Ceres Seq. ID no. 12334813
  misc_feature (1)..(117): Homolog of NCBI NO: 11383729 NR Description: ribosomal protein L7, cytosolic [validated] - rat
  misc_feature (1)..(116): Homolog of NCBI NO: 28630259 NR Description: ribosomal protein L7 [Branchiostoma lanceolatum]
  misc_feature (1)..(117): Homolog of NCBI NO: 38637548 NR Description: putative 60S ribosomal protein L7
  misc_feature (1)..(117): Homolog of NCBI NO: 38346542 NR Description: OSJNBa0035M09.3 [Oryza sativa (japonica
  misc_feature (1)..(117): Homolog of NCBI NO: 445613 NR Description: ribosomal protein L7
  misc_feature (1)..(117): Homolog of NCBI NO: 15231288 NR Description: ribosomal protein, putative
  misc_feature (1)..(117): Homolog of NCBI NO: 15226212 NR Description: putative ribosomal protein L7
  misc_feature (1)..(117): Homolog of NCBI NO: 27311547 NR Description: Unknown protein [Arabidopsis thaliana]
  misc_feature (1)..(117): Homolog of NCBI NO: 30689617 NR Description: 60S ribosomal protein L7 (RPL7C) [Arabidopsis
  misc_feature (1)..(117): Homolog of NCBI NO: 30689623 NR Description: 60S ribosomal protein L7 (RPL7C) [Arabidopsis
MLRRVEPYVTYGYPNLKSVKELIYKRGYGKLNHQRIALTDNSIVDQALGKHGIICVEDLIHEIMTVGPHFKEANNFLWPFQLKAPLGGLKKKRNHYVEGGDAGNRENFINELVRRMN

SEQ ID NO: 21662 - DNA, 1150 bp, Arabidopsis thaliana
  misc_feature (1)..(1150): Ceres Seq. ID no. 13486886
  misc_feature: MA Experiment ID: 108585 Result: Up-regulated in Transcription
  misc_feature: MA Experiment 108585 PARAMETER Experiment Name: At_5mM_NaNP_cDNA_P Parameter: Timepoint (hr) Value: 6
  misc_feature: MA Experiment 108585 PARAMETER Experiment Name: At_5mM_NaNP_cDNA_P Parameter: Tissue Value: Aerial
  misc_feature: MA Experiment 108585 PARAMETER Experiment Name: At_5mM_NaNP_cDNA_P Parameter: Treatment Value: null
  misc_feature: MA Experiment ID: 20000112 Result: Up-regulated in Transcription
  misc_feature: MA Experiment 20000112 PARAMETER Experiment Name: At_42deg_Heat_cDNA_P Parameter: Temperature (deg C) Value: 42 vs. 22
  misc_feature: MA Experiment 20000112 PARAMETER Experiment Name: At_42deg_Heat_cDNA_P Parameter: Timepoint (hr) Value: 2
  misc_feature: MA Experiment 20000112 PARAMETER Experiment Name: At_42deg_Heat_cDNA_P Parameter: Tissue Value: Aerial
  misc_feature: MA Experiment ID: 20000173 Result: Down-regulated in Transcription
  misc_feature: MA Experiment 20000173 PARAMETER Experiment Name: At_42deg_Heat_P Parameter: Age (day) Value: 14
  misc_feature: MA Experiment 20000173 PARAMETER Experiment Name: At_42deg_Heat_P Parameter: Organism Value: A. thaliana
  misc_feature: MA Experiment 20000173 PARAMETER Experiment Name: At_42deg_Heat_P Parameter: Plant Line Value: WS
  misc_feature: MA Experiment 20000173 PARAMETER Experiment Name: At_42deg_Heat_P Parameter: Temperature (deg C) Value: 42 vs. 22
  misc_feature: MA Experiment 20000173 PARAMETER Experiment Name: At_42deg_Heat_P Parameter: Timepoint (hr) Value: 6
  misc_feature: MA Experiment 20000173 PARAMETER Experiment Name: At_42deg_Heat_P Parameter: Tissue Value: Aerial
  misc_feature: MA Experiment ID: 20000264 Result: Up-regulated in Transcription
  misc_feature: MA Experiment 20000264 PARAMETER Experiment Name: At_Open_Flower_P Parameter: Age (day) Value: 21
  misc_feature: MA Experiment 20000264 PARAMETER Experiment Name: At_Open_Flower_P Parameter: Plant Line Value: WS
  misc_feature: MA Experiment 20000264 PARAMETER Experiment Name: At_Open_Flower_P Parameter: Tissue Value: Open Flower vs. Whole Plant
  misc_feature: MA Experiment ID: 20000265 Result: Up-regulated in Transcription
  misc_feature: MA Experiment 20000265 PARAMETER Experiment Name: At_Open_Flower_P Parameter: Age (day) Value: 21
  misc_feature: MA Experiment 20000265 PARAMETER Experiment Name: At_Open_Flower_P Parameter: Plant Line Value: WS
  misc_feature: MA Experiment 20000265 PARAMETER Experiment Name: At_Open_Flower_P Parameter: Tissue Value: Closed Flower vs. Whole Plant
  misc_feature: MA Experiment ID: 20000453 Result: Down-regulated in Transcription
  misc_feature: MA Experiment 20000453 PARAMETER Experiment Name: At_100uM_ABA_P Parameter: Age (day) Value: 15
  misc_feature: MA Experiment 20000453 PARAMETER Experiment Name: At_100uM_ABA_P Parameter: Organism Value: A. thaliana
  misc_feature: MA Experiment 20000453 PARAMETER Experiment Name: At_100uM_ABA_P Parameter: Plant Line Value: WS
  misc_feature: MA Experiment 20000453 PARAMETER Experiment Name: At_100uM_ABA_P Parameter: Timepoint (hr) Value: 24
  misc_feature: MA Experiment 20000453 PARAMETER Experiment Name: At_100uM_ABA_P Parameter: Tissue Value: Aerial
  misc_feature: MA Experiment 20000453 PARAMETER Experiment Name: At_100uM_ABA_P Parameter: Treatment Value: 100uM ABA vs. No Treatment
  misc_feature: MA Experiment ID: 20000794 Result: Up-regulated in Transcription
  misc_feature: MA Experiment 20000794 PARAMETER Experiment Name: At_Petals_P Parameter: Age (day) Value: 23-25 days
  misc_feature: MA Experiment 20000794 PARAMETER Experiment Name: At_Petals_P Parameter: Plant Line Value: WS
  misc_feature: MA Experiment 20000794 PARAMETER Experiment Name: At_Petals_P Parameter: Tissue Value: Petals vs. Whole plant
  misc_feature: MA Experiment ID: 20001905 Result: Up-regulated in Transcription
  misc_feature: MA Experiment 20001905 PARAMETER Experiment Name: At_Drought_Reproduction_P Parameter: Age (day) Value: 40
  misc_feature: MA Experiment 20001905 PARAMETER Experiment Name: At_Drought_Reproduction_P Parameter: Organism Value: A. thaliana
  misc_feature: MA Experiment 20001905 PARAMETER Experiment Name: At_Drought_Reproduction_P Parameter: Plant Line Value: WS
  misc_feature: MA Experiment 20001905 PARAMETER Experiment Name: At_Drought_Reproduction_P Parameter: Timepoint (day) Value: 10
  misc_feature: MA Experiment 20001905 PARAMETER Experiment Name: At_Drought_Reproduction_P Parameter: Tissue Value: Rosettes
  misc_feature: MA Experiment 20001905 PARAMETER Experiment Name: At_Drought_Reproduction_P Parameter: Treatment Value: Drought vs. No Drought
  misc_feature: MA Experiment ID: 20001910 Result: Up-regulated in Transcription
  misc_feature: MA Experiment 20001910 PARAMETER Experiment Name: At_Drought_Reproduction_P Parameter: Age (day) Value: 37
  misc_feature: MA Experiment 20001910 PARAMETER Experiment Name: At_Drought_Reproduction_P Parameter: Organism Value: A. thaliana
  misc_feature: MA Experiment 20001910 PARAMETER Experiment Name: At_Drought_Reproduction_P Parameter: Plant Line Value: WS
  misc_feature: MA Experiment 20001910 PARAMETER Experiment Name: At_Drought_Reproduction_P Parameter: Timepoint (day) Value: 7
  misc_feature: MA Experiment 20001910 PARAMETER Experiment Name: At_Drought_Reproduction_P Parameter: Tissue Value: Flowers
  misc_feature: MA Experiment 20001910 PARAMETER Experiment Name: At_Drought_Reproduction_P Parameter: Treatment Value: Drought vs. No Drought
catctcttcttgaagctgctttcttcctcaaattctttttttttccagattcttctcctttcttcttccttcttccttatttcgatttcgaattttgaattttctcaatggctcaatcgtgtcttaaaattgttcgaatcaacaatctaaggaacagagtgaatcgtcggattttgattctccgacgattcacacggttgttatggagtagaatcgttgcttgtactcctggcaaatctcggagatatctcttgctttctcgcgctcttccgtctccgactgtttctcgtccttctccttctccgatccccgccgtcgatgtcgtcgtcggtggtggtggtggtggtggtgagtttgttcgtcgttcgtcggttgtttacgataatgataacagtcatcggagatcggattctgatttggtttctttgaagattagtctcttaggagatccagaaatcggaaaaactagcttcctggcgaaatatgttggagaagagaaagaagtagaaatgagagaattggagaaaggtataaattgtacggacaagacgttatacatgggaggtgctcgcatttcatatagtatctgggaattagaagctgagagatcacgagatcaaatccctgtggcttgcaaggactctgttgccattctctttatgtttgatttaaccagtcgttgcacgcttaatagtgtcattagctggtatcaacaagctaggaagtcaaatcagacggcgataccagttatggtaggaaccaagtttgatgagtttattcagcttcctattgatctgcaatggacaattgctagccaggcgagaacatatgcgaaggctttaaacgcgacgctcttcttctcgagtgcttcatacaacataaacgtgaataagatctttaagtttgtgacggcgaagctcttcgacttaccatggacggtggaacgcaatctcacaatcggagaaccaatcatcgacttctagaatatgtatttgtatataatataaaagaagcgaatcctgaagaatgcgttttttttttttttttttttaattcaccgctaaagcttgtcgccgtgggactgatcggactagtcgtatttaagcgaaatggagagatgaagcggcggagatttcgcccgcttttctcc

SEQ ID NO: 21663 - protein, 291 aa, Arabidopsis thaliana
  peptide (1)..(291): Ceres Seq. ID no. 13486887
  misc_feature (111)..(273): Pfam Name: Ras family Pfam Description: Ras family
  misc_feature (1)..(291): Homolog of NCBI NO: 18403119 NR Description: SGP1 monomeric G-protein -related [Arabidopsis
  misc_feature (102)..(291): Homolog of NCBI NO: 28396142 NR Description: Tem-1-like protein [Giardia intestinalis]
  misc_feature (105)..(291): Homolog of NCBI NO: 19114197 NR Description: sid3 protein; gtpase; inducer of septum formation
  misc_feature (105)..(291): Homolog of NCBI NO: 2408103 NR Description: sid3 [Schizosaccharomyces pombe]
  misc_feature (55)..(289): Homolog of NCBI NO: 32421653 NR Description: hypothetical protein [Neurospora crassa]
  misc_feature (55)..(289): Homolog of NCBI NO: 38105787 NR Description: hypothetical protein MG04862.4 [Magnaporthe
  misc_feature (21)..(291): Homolog of NCBI NO: 33146727 NR Description: putative Septum-promoting GTP-binding protein 1
  misc_feature (5)..(291): Homolog of NCBI NO: 15239761 NR Description: SGP1 monomeric G-protein (emb|CAB54517.1)
  misc_feature (1)..(237): Homolog of NCBI NO: 30686347 NR Description: SGP1 monomeric G-protein -related [Arabidopsis
  misc_feature (1)..(291): Homolog of NCBI NO: 30686351 NR Description: SGP1 monomeric G-protein -related [Arabidopsis
MAQSCLKIVRINNLRNRVNRRILILRRFTRLLWSRIVACTPGKSRRYLLLSRALPSPTVSRPSPSPIPAVDVVVGGGGGGGEFVRRSSVVYDNDNSHRRSDSDLVSLKISLLGDPEIGKTSFLAKYVGEEKEVEMRELEKGINCTDKTLYMGGARISYSIWELEAERSRDQIPVACKDSVAILFMFDLTSRCTLNSVISWYQQARKSNQTAIPVMVGTKFDEFIQLPIDLQWTIASQARTYAKALNATLFFSSASYNINVNKIFKFVTAKLFDLPWTVERNLTIGEPIIDF

SEQ ID NO: 21664 - protein, 157 aa, Arabidopsis thaliana
  peptide (1)..(157): Ceres Seq. ID no. 13486888
  misc_feature (1)..(139): Pfam Name: Ras family Pfam Description: Ras family
  misc_feature (1)..(157): Homolog of NCBI NO: 28396142 NR Description: Tem-1-like protein [Giardia intestinalis]
  misc_feature (1)..(157): Homolog of NCBI NO: 19114197 NR Description: sid3 protein; gtpase; inducer of septum formation
  misc_feature (1)..(157): Homolog of NCBI NO: 2408103 NR Description: sid3 [Schizosaccharomyces pombe]
  misc_feature (1)..(155): Homolog of NCBI NO: 32421653 NR Description: hypothetical protein [Neurospora crassa]
  misc_feature (1)..(155): Homolog of NCBI NO: 38105787 NR Description: hypothetical protein MG04862.4 [Magnaporthe
  misc_feature (1)..(157): Homolog of NCBI NO: 33146727 NR Description: putative Septum-promoting GTP-binding protein 1
  misc_feature (1)..(157): Homolog of NCBI NO: 15239761 NR Description: SGP1 monomeric G-protein (emb|CAB54517.1)
  misc_feature (1)..(103): Homolog of NCBI NO: 30686347 NR Description: SGP1 monomeric G-protein -related [Arabidopsis
  misc_feature (1)..(157): Homolog of NCBI NO: 30686351 NR Description: SGP1 monomeric G-protein -related [Arabidopsis
  misc_feature (1)..(157): Homolog of NCBI NO: 18403119 NR Description: SGP1 monomeric G-protein -related [Arabidopsis
MRELEKGINCTDKTLYMGGARISYSIWELEAERSRDQIPVACKDSVAILFMFDLTSRCTLNSVISWYQQARKSNQTAIPVMVGTKFDEFIQLPIDLQWTIASQARTYAKALNATLFFSSASYNINVNKIFKFVTAKLFDLPWTVERNLTIGEPIIDF

SEQ ID NO: 21665 - DNA, 1529 bp, Arabidopsis thaliana
  misc_feature (1)..(1529): Ceres Seq. ID no. 12324289
  misc_feature: MA Experiment ID: 108473 Result: Down-regulated in Transcription
  misc_feature: MA Experiment 108473 PARAMETER Experiment Name: At_Drought_Flowers_cDNA_P Parameter: Timepoint (hr) Value: 7 d
  misc_feature: MA Experiment 108473 PARAMETER Experiment Name: At_Drought_Flowers_cDNA_P Parameter: Tissue Value: Flower
  misc_feature: MA Experiment 108473 PARAMETER Experiment Name: At_Drought_Flowers_cDNA_P Parameter: Treatment Value: Drought vs. No Drought
  misc_feature: MA Experiment ID: 108501 Result: Down-regulated in Transcription
  misc_feature: MA Experiment 108501 PARAMETER Experiment Name: At_ap2_floral_buds_cDNA_P Parameter: Plant Line Value: ap2 (Ler.)
  misc_feature: MA Experiment 108501 PARAMETER Experiment Name: At_ap2_floral_buds_cDNA_P Parameter: Tissue Value: Closed Flower
  misc_feature: MA Experiment ID: 108605 Result: Down-regulated in Transcription
  misc_feature: MA Experiment 108605 PARAMETER Experiment Name: At_100uM_ABA_cDNA_P Parameter: Timepoint (hr) Value: 6
  misc_feature: MA Experiment 108605 PARAMETER Experiment Name: At_100uM_ABA_cDNA_P Parameter: Tissue Value: Aerial
  misc_feature: MA Experiment 108605 PARAMETER Experiment Name: At_100uM_ABA_cDNA_P Parameter: Treatment Value: 100uM ABA vs. No Treatment
  misc_feature: MA Experiment ID: 108607 Result: Down-regulated in Transcription
  misc_feature: MA Experiment 108607 PARAMETER Experiment Name: At_100uM_ABA_cDNA_P Parameter: Timepoint (hr) Value: 4
  misc_feature: MA Experiment 108607 PARAMETER Experiment Name: At_100uM_ABA_cDNA_P Parameter: Tissue Value: Aerial
  misc_feature: MA Experiment 108607 PARAMETER Experiment Name: At_100uM_ABA_cDNA_P Parameter: Treatment Value: 100uM ABA vs. No Treatment
  misc_feature: MA Experiment ID: 108609 Result: Down-regulated in Transcription
  misc_feature: MA Experiment 108609 PARAMETER Experiment Name: At_100uM_ABA_cDNA_P Parameter: Timepoint (hr) Value: 24
  misc_feature: MA Experiment 108609 PARAMETER Experiment Name: At_100uM_ABA_cDNA_P Parameter: Tissue Value: Aerial
  misc_feature: MA Experiment 108609 PARAMETER Experiment Name: At_100uM_ABA_cDNA_P Parameter: Treatment Value: 100uM ABA vs. No Treatment
  misc_feature: MA Experiment ID: 20000070 Result: Down-regulated in Transcription
  misc_feature: MA Experiment 20000070 PARAMETER Experiment Name: At_100uM_ABA_Mutants_cDNA_P Parameter: Plant Line Value: CS24
  misc_feature: MA Experiment 20000070 PARAMETER Experiment Name: At_100uM_ABA_Mutants_cDNA_P Parameter: Timepoint (hr) Value: 6
  misc_feature: MA Experiment 20000070 PARAMETER Experiment Name: At_100uM_ABA_Mutants_cDNA_P Parameter: Tissue Value: Aerial
  misc_feature: MA Experiment 20000070 PARAMETER Experiment Name: At_100uM_ABA_Mutants_cDNA_P Parameter: Treatment Value: 100uM ABA vs. No Treatment
  misc_feature: MA Experiment ID: 20000072 Result: Down-regulated in Transcription
  misc_feature: MA Experiment 20000072 PARAMETER Experiment Name: At_100uM_ABA_Mutants_cDNA_P Parameter: Plant Line Value: CS8105
  misc_feature: MA Experiment 20000072 PARAMETER Experiment Name: At_100uM_ABA_Mutants_cDNA_P Parameter: Timepoint (hr) Value: 6
  misc_feature: MA Experiment 20000072 PARAMETER Experiment Name: At_100uM_ABA_Mutants_cDNA_P Parameter: Tissue Value: Aerial
  misc_feature: MA Experiment 20000072 PARAMETER Experiment Name: At_100uM_ABA_Mutants_cDNA_P Parameter: Treatment Value: 100uM ABA vs. No Treatment
  misc_feature: MA Experiment ID: 20000086 Result: Down-regulated in Transcription
  misc_feature: MA Experiment 20000086 PARAMETER Experiment Name: At_100uM_ABA_Mutants_cDNA_P Parameter: Plant Line Value: CS22
  misc_feature: MA Experiment 20000086 PARAMETER Experiment Name: At_100uM_ABA_Mutants_cDNA_P Parameter: Timepoint (hr) Value: 6
  misc_feature: MA Experiment 20000086 PARAMETER Experiment Name: At_100uM_ABA_Mutants_cDNA_P Parameter: Tissue Value: Aerial
  misc_feature: MA Experiment 20000086 PARAMETER Experiment Name: At_100uM_ABA_Mutants_cDNA_P Parameter: Treatment Value: 100uM ABA vs. No Treatment
  misc_feature: MA Experiment ID: 20000087 Result: Down-regulated in Transcription
  misc_feature: MA Experiment 20000087 PARAMETER Experiment Name: At_100uM_ABA_Mutants_cDNA_P Parameter: Plant Line Value: WS
  misc_feature: MA Experiment 20000087 PARAMETER Experiment Name: At_100uM_ABA_Mutants_cDNA_P Parameter: Timepoint (hr) Value: 6
  misc_feature: MA Experiment 20000087 PARAMETER Experiment Name: At_100uM_ABA_Mutants_cDNA_P Parameter: Tissue Value: Aerial
  misc_feature: MA Experiment 20000087 PARAMETER Experiment Name: At_100uM_ABA_Mutants_cDNA_P Parameter: Treatment Value: 100uM ABA vs. No Treatment
  misc_feature: MA Experiment ID: 20000088 Result: Down-regulated in Transcription
  misc_feature: MA Experiment 20000088 PARAMETER Experiment Name: At_100uM_ABA_Mutants_cDNA_P Parameter: Plant Line Value: Landsberg
  misc_feature: MA Experiment 20000088 PARAMETER Experiment Name: At_100uM_ABA_Mutants_cDNA_P Parameter: Timepoint (hr) Value: 6
  misc_feature: MA Experiment 20000088 PARAMETER Experiment Name: At_100uM_ABA_Mutants_cDNA_P Parameter: Tissue Value: Aerial
  misc_feature: MA Experiment 20000088 PARAMETER Experiment Name: At_100uM_ABA_Mutants_cDNA_P Parameter: Treatment Value: 100uM ABA vs. No Treatment
  misc_feature: MA Experiment ID: 20000089 Result: Down-regulated in Transcription
  misc_feature: MA Experiment ID: 20000090 Result: Down-regulated in Transcription
  misc_feature: MA Experiment ID: 20000180 Result: Up-regulated in Transcription
  misc_feature: MA Experiment 20000180 PARAMETER Experiment Name: At_Germinating_Seeds_P Parameter: Age (hr) Value: 24 vs. 0
  misc_feature: MA Experiment 20000180 PARAMETER Experiment Name: At_Germinating_Seeds_P Parameter: Tissue Value: Germinating Seeds
  misc_feature: MA Experiment ID: 20000184 Result: Up-regulated in Transcription
  misc_feature: MA Experiment 20000184 PARAMETER Experiment Name: At_Shoots__P Parameter: Age (day) Value: 7
  misc_feature: MA Experiment 20000184 PARAMETER Experiment Name: At_Shoots__P Parameter: Tissue Value: Shoots vs. Whole Plant
  misc_feature: MA Experiment ID: 20000267 Result: Down-regulated in Transcription
  misc_feature: MA Experiment 20000267 PARAMETER Experiment Name: At_Drought_P Parameter: Age (day) Value: 7
  misc_feature: MA Experiment 20000267 PARAMETER Experiment Name: At_Drought_P Parameter: Organism Value: A. thaliana
  misc_feature: MA Experiment 20000267 PARAMETER Experiment Name: At_Drought_P Parameter: Plant Line Value: WS
  misc_feature: MA Experiment 20000267 PARAMETER Experiment Name: At_Drought_P Parameter: Timepoint (hr) Value: 6
  misc_feature: MA Experiment 20000267 PARAMETER Experiment Name: At_Drought_P Parameter: Tissue Value: Whole Plant
  misc_feature: MA Experiment 20000267 PARAMETER Experiment Name: At_Drought_P Parameter: Treatment Value: Drought vs. No Drought
  misc_feature: MA Experiment ID: 20000286 Result: Up-regulated in Transcription
  misc_feature: MA Experiment 20000286 PARAMETER Experiment Name: At_Open_Flower_P Parameter: Age (day) Value: 21
  misc_feature: MA Experiment 20000286 PARAMETER Experiment Name: At_Open_Flower_P Parameter: Plant Line Value: WS
  misc_feature: MA Experiment 20000286 PARAMETER Experiment Name: At_Open_Flower_P Parameter: Tissue Value: Half Open vs. Whole Plant
  misc_feature: MA Experiment ID: 20000436 Result: Down-regulated in Transcription
  misc_feature: MA Experiment 20000436 PARAMETER Experiment Name: At_Drought_P Parameter: Age (day) Value: 7
  misc_feature: MA Experiment 20000436 PARAMETER Experiment Name: At_Drought_P Parameter: Organism Value: A. thaliana
  misc_feature: MA Experiment 20000436 PARAMETER Experiment Name: At_Drought_P Parameter: Plant Line Value: WS
  misc_feature: MA Experiment 20000436 PARAMETER Experiment Name: At_Drought_P Parameter: Timepoint (hr) Value: 12
  misc_feature: MA Experiment 20000436 PARAMETER Experiment Name: At_Drought_P Parameter: Tissue Value: Whole Plant
  misc_feature: MA Experiment 20000436 PARAMETER Experiment Name: At_Drought_P Parameter: Treatment Value: Drought vs. No Drought
  misc_feature: MA Experiment ID: 20000437 Result: Down-regulated in Transcription
  misc_feature: MA Experiment 20000437 PARAMETER Experiment Name: At_Drought_P Parameter: Age (day) Value: 8
  misc_feature: MA Experiment 20000437 PARAMETER Experiment Name: At_Drought_P Parameter: Organism Value: A. thaliana
  misc_feature: MA Experiment 20000437 PARAMETER Experiment Name: At_Drought_P Parameter: Plant Line Value: WS
  misc_feature: MA Experiment 20000437 PARAMETER Experiment Name: At_Drought_P Parameter: Timepoint (hr) Value: 24
  misc_feature: MA Experiment 20000437 PARAMETER Experiment Name: At_Drought_P Parameter: Tissue Value: Whole Plant
  misc_feature: MA Experiment 20000437 PARAMETER Experiment Name: At_Drought_P Parameter: Treatment Value: Drought vs. No Drought
  misc_feature: MA Experiment ID: 20000438 Result: Up-regulated in Transcription
  misc_feature: MA Experiment 20000438 PARAMETER Experiment Name: At_Shoots__P Parameter: Age (day) Value: 14
  misc_feature: MA Experiment 20000438 PARAMETER Experiment Name: At_Shoots__P Parameter: Tissue Value: Shoots vs. Whole Plant
  misc_feature: MA Experiment ID: 20000453 Result: Down-regulated in Transcription
  misc_feature: MA Experiment 20000453 PARAMETER Experiment Name: At_100uM_ABA_P Parameter: Age (day) Value: 15
  misc_feature: MA Experiment 20000453 PARAMETER Experiment Name: At_100uM_ABA_P Parameter: Organism Value: A. thaliana
  misc_feature: MA Experiment 20000453 PARAMETER Experiment Name: At_100uM_ABA_P Parameter: Plant Line Value: WS
  misc_feature: MA Experiment 20000453 PARAMETER Experiment Name: At_100uM_ABA_P Parameter: Timepoint (hr) Value: 24
  misc_feature: MA Experiment 20000453 PARAMETER Experiment Name: At_100uM_ABA_P Parameter: Tissue Value: Aerial
  misc_feature: MA Experiment 20000453 PARAMETER Experiment Name: At_100uM_ABA_P Parameter: Treatment Value: 100uM ABA vs. No Treatment
  misc_feature: MA Experiment ID: 20000527 Result: Up-regulated in Transcription
  misc_feature: MA Experiment 20000527 PARAMETER Experiment Name: At_10percent_PEG_P Parameter: Age (day) Value: 20
  misc_feature: MA Experiment 20000527 PARAMETER Experiment Name: At_10percent_PEG_P Parameter: Organism Value: A. thaliana
  misc_feature: MA Experiment 20000527 PARAMETER Experiment Name: At_10percent_PEG_P Parameter: Plant Line Value: WS
  misc_feature: MA Experiment 20000527 PARAMETER Experiment Name: At_10percent_PEG_P Parameter: Timepoint (day) Value: 20
  misc_feature: MA Experiment 20000527 PARAMETER Experiment Name: At_10percent_PEG_P Parameter: Tissue Value: Whole Plant
  misc_feature: MA Experiment 20000527 PARAMETER Experiment Name: At_10percent_PEG_P Parameter: Treatment Value: 10percent PEG vs. No Treatment
  misc_feature: MA Experiment ID: 20000794 Result: Up-regulated in Transcription
  misc_feature: MA Experiment 20000794 PARAMETER Experiment Name: At_Petals_P Parameter: Age (day) Value: 23-25 days
  misc_feature: MA Experiment 20000794 PARAMETER Experiment Name: At_Petals_P Parameter: Plant Line Value: WS
  misc_feature: MA Experiment 20000794 PARAMETER Experiment Name: At_Petals_P Parameter: Tissue Value: Petals vs. Whole plant
  misc_feature: MA Experiment ID: 20001248 Result: Down-regulated in Transcription
  misc_feature: MA Experiment 20001248 PARAMETER Experiment Name: At_Far-red-induction_P Parameter: Age (day) Value: 7
  misc_feature: MA Experiment 20001248 PARAMETER Experiment Name: At_Far-red-induction_P Parameter: Light Value: Far-red vs. White
  misc_feature: MA Experiment 20001248 PARAMETER Experiment Name: At_Far-red-induction_P Parameter: Organism Value: A. thaliana
  misc_feature: MA Experiment 20001248 PARAMETER Experiment Name: At_Far-red-induction_P Parameter: Plant Line Value: Columbia
  misc_feature: MA Experiment 20001248 PARAMETER Experiment Name: At_Far-red-induction_P Parameter: Timepoint (hr) Value: 4
  misc_feature: MA Experiment 20001248 PARAMETER Experiment Name: At_Far-red-induction_P Parameter: Tissue Value: Whole Plant
  misc_feature: MA Experiment ID: 20001554 Result: Down-regulated in Transcription
  misc_feature: MA Experiment 20001554 PARAMETER Experiment Name: At_Drought_Soil_Dry_P Parameter: Age (day) Value: 21
  misc_feature: MA Experiment 20001554 PARAMETER Experiment Name: At_Drought_Soil_Dry_P Parameter: Organism Value: A. thaliana
  misc_feature: MA Experiment 20001554 PARAMETER Experiment Name: At_Drought_Soil_Dry_P Parameter: Plant Line Value: WS
  misc_feature: MA Experiment 20001554 PARAMETER Experiment Name: At_Drought_Soil_Dry_P Parameter: Post Timepoint (hr) Value: None
  misc_feature: MA Experiment 20001554 PARAMETER Experiment Name: At_Drought_Soil_Dry_P Parameter: Post-Treatment Value: None
  misc_feature: MA Experiment 20001554 PARAMETER Experiment Name: At_Drought_Soil_Dry_P Parameter: Timepoint (day) Value: 7
  misc_feature: MA Experiment 20001554 PARAMETER Experiment Name: At_Drought_Soil_Dry_P Parameter: Treatment Value: Drought vs. No Drought
  misc_feature: MA Experiment ID: 20001555 Result: Down-regulated in Transcription
  misc_feature: MA Experiment 20001555 PARAMETER Experiment Name: At_Drought_Soil_Dry_P Parameter: Age (day) Value: 24
  misc_feature: MA Experiment 20001555 PARAMETER Experiment Name: At_Drought_Soil_Dry_P Parameter: Organism Value: A. thaliana
  misc_feature: MA Experiment 20001555 PARAMETER Experiment Name: At_Drought_Soil_Dry_P Parameter: Plant Line Value: WS
  misc_feature: MA Experiment 20001555 PARAMETER Experiment Name: At_Drought_Soil_Dry_P Parameter: Post Timepoint (hr) Value: None
  misc_feature: MA Experiment 20001555 PARAMETER Experiment Name: At_Drought_Soil_Dry_P Parameter: Post-Treatment Value: None
  misc_feature: MA Experiment 20001555 PARAMETER Experiment Name: At_Drought_Soil_Dry_P Parameter: Timepoint (day) Value: 10
  misc_feature: MA Experiment 20001555 PARAMETER Experiment Name: At_Drought_Soil_Dry_P Parameter: Treatment Value: Drought vs. No Drought
  misc_feature: MA Experiment ID: 20001556 Result: Down-regulated in Transcription
  misc_feature: MA Experiment 20001556 PARAMETER Experiment Name: At_Drought_Soil_Dry_P Parameter: Age (day) Value: 26
  misc_feature: MA Experiment 20001556 PARAMETER Experiment Name: At_Drought_Soil_Dry_P Parameter: Organism Value: A. thaliana
  misc_feature: MA Experiment 20001556 PARAMETER Experiment Name: At_Drought_Soil_Dry_P Parameter: Plant Line Value: WS
  misc_feature: MA Experiment 20001556 PARAMETER Experiment Name: At_Drought_Soil_Dry_P Parameter: Post Timepoint (hr) Value: None
  misc_feature: MA Experiment 20001556 PARAMETER Experiment Name: At_Drought_Soil_Dry_P Parameter: Post-Treatment Value: None
  misc_feature: MA Experiment 20001556 PARAMETER Experiment Name: At_Drought_Soil_Dry_P Parameter: Timepoint (day) Value: 12
  misc_feature: MA Experiment 20001556 PARAMETER Experiment Name: At_Drought_Soil_Dry_P Parameter: Treatment Value: Drought vs. No Drought
  misc_feature: MA Experiment ID: 20001557 Result: Down-regulated in Transcription
  misc_feature: MA Experiment 20001557 PARAMETER Experiment Name: At_Drought_Soil_Dry_P Parameter: Age (day) Value: 27
  misc_feature: MA Experiment 20001557 PARAMETER Experiment Name: At_Drought_Soil_Dry_P Parameter: Organism Value: A. thaliana
  misc_feature: MA Experiment 20001557 PARAMETER Experiment Name: At_Drought_Soil_Dry_P Parameter: Plant Line Value: WS
  misc_feature: MA Experiment 20001557 PARAMETER Experiment Name: At_Drought_Soil_Dry_P Parameter: Post Timepoint (hr) Value: 3
  misc_feature: MA Experiment 20001557 PARAMETER Experiment Name: At_Drought_Soil_Dry_P Parameter: Post-Treatment Value: Re-Water vs. No Drought
  misc_feature: MA Experiment 20001557 PARAMETER Experiment Name: At_Drought_Soil_Dry_P Parameter: Timepoint (day) Value: 13
  misc_feature: MA Experiment 20001557 PARAMETER Experiment Name: At_Drought_Soil_Dry_P Parameter: Treatment Value: Drought vs. No Drought
  misc_feature: MA Experiment ID: 20001559 Result: Down-regulated in Transcription
  misc_feature: MA Experiment 20001559 PARAMETER Experiment Name: At_Drought_Soil_Dry_P Parameter: Age (day) Value: 28
  misc_feature: MA Experiment 20001559 PARAMETER Experiment Name: At_Drought_Soil_Dry_P Parameter: Organism Value: A. thaliana
  misc_feature: MA Experiment 20001559 PARAMETER Experiment Name: At_Drought_Soil_Dry_P Parameter: Plant Line Value: WS
  misc_feature: MA Experiment 20001559 PARAMETER Experiment Name: At_Drought_Soil_Dry_P Parameter: Post Timepoint (hr) Value: 29
  misc_feature: MA Experiment 20001559 PARAMETER Experiment Name: At_Drought_Soil_Dry_P Parameter: Post-Treatment Value: Re-Water vs. No Drought
  misc_feature: MA Experiment 20001559 PARAMETER Experiment Name: At_Drought_Soil_Dry_P Parameter: Timepoint (day) Value: 14
  misc_feature: MA Experiment 20001559 PARAMETER Experiment Name: At_Drought_Soil_Dry_P Parameter: Treatment Value: Drought vs. No Drought
  misc_feature: MA Experiment ID: 20001910 Result: Down-regulated in Transcription
  misc_feature: MA Experiment 20001910 PARAMETER Experiment Name: At_Drought_Reproduction_P Parameter: Age (day) Value: 37
  misc_feature: MA Experiment 20001910 PARAMETER Experiment Name: At_Drought_Reproduction_P Parameter: Organism Value: A. thaliana
  misc_feature: MA Experiment 20001910 PARAMETER Experiment Name: At_Drought_Reproduction_P Parameter: Plant Line Value: WS
  misc_feature: MA Experiment 20001910 PARAMETER Experiment Name: At_Drought_Reproduction_P Parameter: Timepoint (day) Value: 7
  misc_feature: MA Experiment 20001910 PARAMETER Experiment Name: At_Drought_Reproduction_P Parameter: Tissue Value: Flowers
  misc_feature: MA Experiment 20001910 PARAMETER Experiment Name: At_Drought_Reproduction_P Parameter: Treatment Value: Drought vs. No Drought
attcgcattacgatggtttatgtaaagagattggttatatcaatcttatcaaacccacctctctcgggattattgactcgatttggatatttatacatgtgactatatttagacatacatagatctcagtcctgtatatatagagctacattcataaaagaaagatctaacataacaaaaggaaaaaagcatcaagaacatggcggagactcaaggaaaggtcatcacttgtaaagctgctgtcgtatggggtccaaaagtgccgcttgtaattcaagaaatatgcgtcgatcctcctcagaaaatggaagtccgtgttaaaattctttactcctccatttgccacaccgatctcggatgttggaacggcacgaacgaagctgaacgagcatttccaaggattcttggccatgaagctgtcgggattgtagagagtgttggagaaggagtaaaagatgtgaaagaaggagactacgtgattccgactttcaatggagaatgtggtgaatgtaaagtgtgtaagagagaagaaagtaatctctgtgagcgatatcatgtggatcctatgaagagggtgatggtgaatgatggagggacgagattctcaaccaccataaacaaggacggtggttcgagccaaagccaacctatatatcacttccttaacacctccttcaccgaatacactgtcttggactcggcttgcgtcgtcaagatcgatcctaattctcctctcaagcaaatgagcctcttgagttgtggtgtctcaactggggttggagcagcttggaacattgcaaatgtgaaggaaggaaaaagcactgctgtctttggattgggttccgttggactcgctgttgctgaaggtgcaagagctagaggagcttctaggatcattggtgttgatgctaatgcttccaaatttgagaaaggtaaactgatgggagtaacagatttcataaaccctaaagacttaactaagccagtacatcagatgatacgagagataacgggaggaggcgtggactatagctttgaatgtacaggaaacgttgatgttcttcgcgaagcctttttatccactcacgtcggttggggatcgacagtacttgttgggatctatccgacgccaagaacattgcctcttcacccaatggagcttttcgacggccgtagaatcaccggttctgtgtttggtggcttcaagcccaaatctcagcttccaaatttcgcccaacaatgcatgaaaggggttgtgaaattggaaccttttattaccaatgagcttccatttgagaagataaacgatgcgtttcagctgcttcgcgatggaaaatctcttcggtgcattcttcaaatctctaaacttctcaagagatgattctacacattcacaaagtttactacactatatataatttacccaacaaacacttattttactgcattattcagtatattatcttacctataaatgtgtatcatcatcatcaataacgcgattatttgtgctgaaggattatatatcc

SEQ ID NO: 21666 - protein, 393 aa, Arabidopsis thaliana
  peptide (1)..(393): Ceres Seq. ID no. 12324290
  misc_feature (1)..(385): Homolog of NCBI NO: 113379 NR Description: ALCOHOL DEHYDROGENASE 2
  misc_feature (2)..(385): Homolog of NCBI NO: 113363 NR Description: ALCOHOL DEHYDROGENASE 1
  misc_feature (1)..(385): Homolog of NCBI NO: 113365 NR Description: Alcohol dehydrogenase 1
  misc_feature (1)..(385): Homolog of NCBI NO: 7427629 NR Description: alcohol dehydrogenase (EC 1.1.1.1) - potato
  misc_feature (3)..(387): Homolog of NCBI NO: 25283039 NR Description: alcohol dehydrogenase (EC 1.-.-.-)
  misc_feature (3)..(387): Homolog of NCBI NO: 15217715 NR Description: alcohol dehydrogenase, putative
  misc_feature (13)..(62): Homolog of NCBI NO: 6714279 NR Description: F6N18.16 [Arabidopsis thaliana]
  misc_feature (79)..(393): Homolog of NCBI NO: 6714279 NR Description: F6N18.16 [Arabidopsis thaliana]
  misc_feature (1)..(393): Homolog of NCBI NO: 18398586 NR Description: alcohol dehydrogenase, putative
  misc_feature (1)..(393): Homolog of NCBI NO: 21592656 NR Description: alcohol dehydrogenase, putative [Arabidopsis
MAETQGKVITCKAAVVWGPKVPLVIQEICVDPPQKMEVRVKILYSSICHTDLGCWNGTNEAERAFPRILGHEAVGIVESVGEGVKDVKEGDYVIPTFNGECGECKVCKREESNLCERYHVDPMKRVMVNDGGTRFSTTINKDGGSSQSQPIYHFLNTSFTEYTVLDSACVVKIDPNSPLKQMSLLSCGVSTGVGAAWNIANVKEGKSTAVFGLGSVGLAVAEGARARGASRIIGVDANASKFEKGKLMGVTDFINPKDLTKPVHQMIREITGGGVDYSFECTGNVDVLREAFLSTHVGWGSTVLVGIYPTPRTLPLHPMELFDGRRITGSVFGGFKPKSQLPNFAQQCMKGVVKLEPFITNELPFEKINDAFQLLRDGKSLRCILQISKLLKR

SEQ ID NO: 21667 - protein, 358 aa, Arabidopsis thaliana
  peptide (1)..(358): Ceres Seq. ID no. 12324291
  misc_feature (1)..(350): Homolog of NCBI NO: 113379 NR Description: ALCOHOL DEHYDROGENASE 2
  misc_feature (1)..(350): Homolog of NCBI NO: 113363 NR Description: ALCOHOL DEHYDROGENASE 1
  misc_feature (1)..(350): Homolog of NCBI NO: 113365 NR Description: Alcohol dehydrogenase 1
  misc_feature (1)..(350): Homolog of NCBI NO: 7427629 NR Description: alcohol dehydrogenase (EC 1.1.1.1) - potato
  misc_feature (1)..(352): Homolog of NCBI NO: 25283039 NR Description: alcohol dehydrogenase (EC 1.-.-.-)
  misc_feature (1)..(352): Homolog of NCBI NO: 15217715 NR Description: alcohol dehydrogenase, putative
  misc_feature (1)..(27): Homolog of NCBI NO: 6714279 NR Description: F6N18.16 [Arabidopsis thaliana]
  misc_feature (44)..(358): Homolog of NCBI NO: 6714279 NR Description: F6N18.16 [Arabidopsis thaliana]
  misc_feature (1)..(358): Homolog of NCBI NO: 18398586 NR Description: alcohol dehydrogenase, putative
  misc_feature (1)..(358): Homolog of NCBI NO: 21592656 NR Description: alcohol dehydrogenase, putative [Arabidopsis
MEVRVKILYSSICHTDLGCWNGTNEAERAFPRILGHEAVGIVESVGEGVKDVKEGDYVIPTFNGECGECKVCKREESNLCERYHVDPMKRVMVNDGGTRFSTTINKDGGSSQSQPIYHFLNTSFTEYTVLDSACVVKIDPNSPLKQMSLLSCGVSTGVGAAWNIANVKEGKSTAVFGLGSVGLAVAEGARARGASRIIGVDANASKFEKGKLMGVTDFINPKDLTKPVHQMIREITGGGVDYSFECTGNVDVLREAFLSTHVGWGSTVLVGIYPTPRTLPLHPMELFDGRRITGSVFGGFKPKSQLPNFAQQCMKGVVKLEPFITNELPFEKINDAFQLLRDGKSLRCILQISKLLKR

SEQ ID NO: 21668 - protein, 271 aa, Arabidopsis thaliana
  peptide (1)..(271): Ceres Seq. ID no. 12324292
  misc_feature (1)..(263): Homolog of NCBI NO: 113386 NR Description: ALCOHOL DEHYDROGENASE 3
  misc_feature (1)..(263): Homolog of NCBI NO: 113379 NR Description: ALCOHOL DEHYDROGENASE 2
  misc_feature (1)..(263): Homolog of NCBI NO: 113363 NR Description: ALCOHOL DEHYDROGENASE 1
  misc_feature (1)..(263): Homolog of NCBI NO: 113365 NR Description: Alcohol dehydrogenase 1
  misc_feature (1)..(263): Homolog of NCBI NO: 7427629 NR Description: alcohol dehydrogenase (EC 1.1.1.1) - potato
  misc_feature (1)..(265): Homolog of NCBI NO: 25283039 NR Description: alcohol dehydrogenase (EC 1.-.-.-)
  misc_feature (1)..(265): Homolog of NCBI NO: 15217715 NR Description: alcohol dehydrogenase, putative
  misc_feature (1)..(271): Homolog of NCBI NO: 6714279 NR Description: F6N18.16 [Arabidopsis thaliana]
  misc_feature (1)..(271): Homolog of NCBI NO: 18398586 NR Description: alcohol dehydrogenase, putative
  misc_feature (1)..(271): Homolog of NCBI NO: 21592656 NR Description: alcohol dehydrogenase, putative [Arabidopsis
MKRVMVNDGGTRFSTTINKDGGSSQSQPIYHFLNTSFTEYTVLDSACVVKIDPNSPLKQMSLLSCGVSTGVGAAWNIANVKEGKSTAVFGLGSVGLAVAEGARARGASRIIGVDANASKFEKGKLMGVTDFINPKDLTKPVHQMIREITGGGVDYSFECTGNVDVLREAFLSTHVGWGSTVLVGIYPTPRTLPLHPMELFDGRRITGSVFGGFKPKSQLPNFAQQCMKGVVKLEPFITNELPFEKINDAFQLLRDGKSLRCILQISKLLKR

SEQ ID NO: 21669 - DNA, 878 bp, Arabidopsis thaliana
  misc_feature (1)..(878): Ceres Seq. ID no. 13492905
  misc_feature: MA Experiment ID: 108434 Result: Down-regulated in Transcription
  misc_feature: MA Experiment 108434 PARAMETER Experiment Name: At_Root_Tips_cDNA_P Parameter: Tissue Value: Root Tips
  misc_feature: MA Experiment ID: 108488 Result: Down-regulated in Transcription
  misc_feature: MA Experiment ID: 20000071 Result: Up-regulated in Transcription
  misc_feature: MA Experiment 20000071 PARAMETER Experiment Name: At_100uM_ABA_Mutants_cDNA_P Parameter: Plant Line Value: CS8104
  misc_feature: MA Experiment 20000071 PARAMETER Experiment Name: At_100uM_ABA_Mutants_cDNA_P Parameter: Timepoint (hr) Value: 6
  misc_feature: MA Experiment 20000071 PARAMETER Experiment Name: At_100uM_ABA_Mutants_cDNA_P Parameter: Tissue Value: Aerial
  misc_feature: MA Experiment 20000071 PARAMETER Experiment Name: At_100uM_ABA_Mutants_cDNA_P Parameter: Treatment Value: 100uM ABA vs. No Treatment
  misc_feature: MA Experiment ID: 20000117 Result: Up-regulated in Transcription
  misc_feature: MA Experiment 20000117 PARAMETER Experiment Name: At_100uM_ABA_Mutants_cDNA_P Parameter: Plant Line Value: Columbia
  misc_feature: MA Experiment 20000117 PARAMETER Experiment Name: At_100uM_ABA_Mutants_cDNA_P Parameter: Timepoint (hr) Value: 6
  misc_feature: MA Experiment 20000117 PARAMETER Experiment Name: At_100uM_ABA_Mutants_cDNA_P Parameter: Tissue Value: Aerial
  misc_feature: MA Experiment 20000117 PARAMETER Experiment Name: At_100uM_ABA_Mutants_cDNA_P Parameter: Treatment Value: 100uM ABA vs. No Treatment
  misc_feature: MA Experiment ID: 20001906 Result: Up-regulated in Transcription
  misc_feature: MA Experiment 20001906 PARAMETER Experiment Name: At_Drought_Reproduction_P Parameter: Age (day) Value: 35
  misc_feature: MA Experiment 20001906 PARAMETER Experiment Name: At_Drought_Reproduction_P Parameter: Organism Value: A. thaliana
  misc_feature: MA Experiment 20001906 PARAMETER Experiment Name: At_Drought_Reproduction_P Parameter: Plant Line Value: WS
  misc_feature: MA Experiment 20001906 PARAMETER Experiment Name: At_Drought_Reproduction_P Parameter: Timepoint (day) Value: 5
  misc_feature: MA Experiment 20001906 PARAMETER Experiment Name: At_Drought_Reproduction_P Parameter: Tissue Value: Siliques
  misc_feature: MA Experiment 20001906 PARAMETER Experiment Name: At_Drought_Reproduction_P Parameter: Treatment Value: Drought vs. No Drought
gcaaacgctagttaccggaagacacgtcttgagtttcgcagcatctctctcctctcctctgttcatatctctctttagaaatttctcaatgaacatactcaacagattgggtttgggatcaagtgggcaaaccaatatggatccttctccgatcgctcagggaaatgacgatgacacaccggcgccggggaatcagtttgcccaattcggagctggatgtttctggggtgtcgagctggcgtttcagagagtcccaggggtgactcagaccgaggctggatacacccaagggaccgtagacaatccttcatacggagatgtttgttctggtaccacaggccattcggaggttgttagggttcaatatgatcttaacgattgcacctatgagtctctgcttgatttgttctggtctaggcatgatcccaccactttgaatcgccagggaaatgacgtgggaacccaatacagatctggaatatacttctacacacccgagcaggagaaactagcccgtgagtcacttgaacgtcaccagcaacaaatggagagaaagatcatgactgaaatcttgccagctaagaaattctacagagctgaagagcatcatcaacagtatctgtcaaaaggtgggcggtttggccaagggcaatccactgccaaaggctgcaacgacccaatccgctgttacggctaataagctgctttcctctgtccctctccgaaaacagaggacttagcatcaaaggacttgtgtgtcaaatagattgtgtaaaacttgactaagttgttcacacgctatgtaactacttctttggaatttcattcgcaatgttgtaatattgatgttatactctataaacataaaccaaataatc

SEQ ID NO: 21670 - protein, 231 aa, Arabidopsis thaliana
  peptide (1)..(231): Ceres Seq. ID no. 13492906
  misc_feature (65)..(218): Pfam Name: Peptide methionine sulfoxide reductase Pfam Description: Peptide methionine sulfoxide reductase
  misc_feature (1)..(231): Homolog of NCBI NO: 1709690 NR Description: Peptide methionine sulfoxide reductase
  misc_feature (22)..(231): Homolog of NCBI NO: 15234942 NR Description: protein-methionine-S-oxide reductase [Arabidopsis
  misc_feature (22)..(231): Homolog of NCBI NO: 21593143 NR Description: protein-methionine-S-oxide reductase [Arabidopsis
  misc_feature (10)..(231): Homolog of NCBI NO: 29469000 NR Description: peptide methionine sulfoxide reductase; cPMSR
  misc_feature (11)..(231): Homolog of NCBI NO: 12230349 NR Description: Peptide methionine sulfoxide reductase
  misc_feature (30)..(231): Homolog of NCBI NO: 18424492 NR Description: peptide methionine sulfoxide reductase - like
  misc_feature (46)..(231): Homolog of NCBI NO: 26451744 NR Description: putative peptide methionine sulfoxide reductase
  misc_feature (30)..(231): Homolog of NCBI NO: 25308493 NR Description: protein-methionine-S-oxide reductase (EC 1.8.4.6)
  misc_feature (30)..(231): Homolog of NCBI NO: 21592658 NR Description: peptide methionine sulfoxide reductase (msr)
  misc_feature (30)..(231): Homolog of NCBI NO: 15240796 NR Description: peptide methionine sulfoxide reductase (msr)
QTLVTGRHVLSFAASLSSPLFISLFRNFSMNILNRLGLGSSGQTNMDPSPIAQGNDDDTPAPGNQFAQFGAGCFWGVELAFQRVPGVTQTEAGYTQGTVDNPSYGDVCSGTTGHSEVVRVQYDLNDCTYESLLDLFWSRHDPTTLNRQGNDVGTQYRSGIYFYTPEQEKLARESLERHQQQMERKIMTEILPAKKFYRAEEHHQQYLSKGGRFGQGQSTAKGCNDPIRCYG

SEQ ID NO: 21671 - protein, 202 aa, Arabidopsis thaliana
  peptide (1)..(202): Ceres Seq. ID no. 13492907
  misc_feature (36)..(189): Pfam Name: Peptide methionine sulfoxide reductase Pfam Description: Peptide methionine sulfoxide reductase
  misc_feature (1)..(202): Homolog of NCBI NO: 1709690 NR Description: Peptide methionine sulfoxide reductase
  misc_feature (1)..(202): Homolog of NCBI NO: 15234942 NR Description: protein-methionine-S-oxide reductase [Arabidopsis
  misc_feature (1)..(202): Homolog of NCBI NO: 21593143 NR Description: protein-methionine-S-oxide reductase [Arabidopsis
  misc_feature (1)..(202): Homolog of NCBI NO: 29469000 NR Description: peptide methionine sulfoxide reductase; cPMSR
  misc_feature (1)..(202): Homolog of NCBI NO: 12230349 NR Description: Peptide methionine sulfoxide reductase
  misc_feature (1)..(202): Homolog of NCBI NO: 18424492 NR Description: peptide methionine sulfoxide reductase - like
  misc_feature (17)..(202): Homolog of NCBI NO: 26451744 NR Description: putative peptide methionine sulfoxide reductase
  misc_feature (1)..(202): Homolog of NCBI NO: 25308493 NR Description: protein-methionine-S-oxide reductase (EC 1.8.4.6)
  misc_feature (1)..(202): Homolog of NCBI NO: 21592658 NR Description: peptide methionine sulfoxide reductase (msr)
  misc_feature (1)..(202): Homolog of NCBI NO: 15240796 NR Description: peptide methionine sulfoxide reductase (msr)
MNILNRLGLGSSGQTNMDPSPIAQGNDDDTPAPGNQFAQFGAGCFWGVELAFQRVPGVTQTEAGYTQGTVDNPSYGDVCSGTTGHSEVVRVQYDLNDCTYESLLDLFWSRHDPTTLNRQGNDVGTQYRSGIYFYTPEQEKLARESLERHQQQMERKIMTEILPAKKFYRAEEHHQQYLSKGGRFGQGQSTAKGCNDPIRCYG

SEQ ID NO: 21672 - protein, 186 aa, Arabidopsis thaliana
  peptide (1)..(186): Ceres Seq. ID no. 13492908
  misc_feature (20)..(173): Pfam Name: Peptide methionine sulfoxide reductase Pfam Description: Peptide methionine sulfoxide reductase
  misc_feature (1)..(186): Homolog of NCBI NO: 1709690 NR Description: Peptide methionine sulfoxide reductase
  misc_feature (1)..(186): Homolog of NCBI NO: 15234942 NR Description: protein-methionine-S-oxide reductase [Arabidopsis
  misc_feature (1)..(186): Homolog of NCBI NO: 21593143 NR Description: protein-methionine-S-oxide reductase [Arabidopsis
  misc_feature (1)..(186): Homolog of NCBI NO: 29469000 NR Description: peptide methionine sulfoxide reductase; cPMSR
  misc_feature (1)..(186): Homolog of NCBI NO: 12230349 NR Description: Peptide methionine sulfoxide reductase
  misc_feature (1)..(186): Homolog of NCBI NO: 18424492 NR Description: peptide methionine sulfoxide reductase - like
  misc_feature (1)..(186): Homolog of NCBI NO: 26451744 NR Description: putative peptide methionine sulfoxide reductase
  misc_feature (1)..(186): Homolog of NCBI NO: 25308493 NR Description: protein-methionine-S-oxide reductase (EC 1.8.4.6)
  misc_feature (1)..(186): Homolog of NCBI NO: 21592658 NR Description: peptide methionine sulfoxide reductase (msr)
  misc_feature (1)..(186): Homolog of NCBI NO: 15240796 NR Description: peptide methionine sulfoxide reductase (msr)
MDPSPIAQGNDDDTPAPGNQFAQFGAGCFWGVELAFQRVPGVTQTEAGYTQGTVDNPSYGDVCSGTTGHSEVVRVQYDLNDCTYESLLDLFWSRHDPTTLNRQGNDVGTQYRSGIYFYTPEQEKLARESLERHQQQMERKIMTEILPAKKFYRAEEHHQQYLSKGGRFGQGQSTAKGCNDPIRCYG

SEQ ID NO: 21673 - DNA, 1224 bp, Arabidopsis thaliana
  misc_feature (1)..(1224): Ceres Seq. ID no. 12371589
  misc_feature: MA Experiment ID: 108463 Result: Up-regulated in Transcription
  misc_feature: MA Experiment 108463 PARAMETER Experiment Name: At_Germinating_Seeds_cDNA_P Parameter: Age (day) Value: 3 vs. 0
  misc_feature: MA Experiment 108463 PARAMETER Experiment Name: At_Germinating_Seeds_cDNA_P Parameter: Tissue Value: Germinating Seeds
  misc_feature: MA Experiment ID: 108474 Result: Down-regulated in Transcription
  misc_feature: MA Experiment 108474 PARAMETER Experiment Name: At_Drought_Flowers_cDNA_P Parameter: Timepoint (hr) Value: null
  misc_feature: MA Experiment 108474 PARAMETER Experiment Name: At_Drought_Flowers_cDNA_P Parameter: Treatment Value: Drought vs. No Drought
  misc_feature: MA Experiment ID: 108576 Result: Up-regulated in Transcription
  misc_feature: MA Experiment 108576 PARAMETER Experiment Name: At_42deg_Heat_cDNA_P Parameter: Temperature (deg C) Value: 42 vs. 22
  misc_feature: MA Experiment 108576 PARAMETER Experiment Name: At_42deg_Heat_cDNA_P Parameter: Timepoint (hr) Value: 1
  misc_feature: MA Experiment 108576 PARAMETER Experiment Name: At_42deg_Heat_cDNA_P Parameter: Tissue Value: Aerial
  misc_feature: MA Experiment ID: 108577 Result: Up-regulated in Transcription
  misc_feature: MA Experiment 108577 PARAMETER Experiment Name: At_42deg_Heat_cDNA_P Parameter: Temperature (deg C) Value: 42 vs. 22
  misc_feature: MA Experiment 108577 PARAMETER Experiment Name: At_42deg_Heat_cDNA_P Parameter: Timepoint (hr) Value: 6
  misc_feature: MA Experiment 108577 PARAMETER Experiment Name: At_42deg_Heat_cDNA_P Parameter: Tissue Value: Aerial
  misc_feature: MA Experiment ID: 108668 Result: Up-regulated in Transcription
  misc_feature: MA Experiment 108668 PARAMETER Experiment Name: At_2mM_SA_cDNA_P Parameter: Plant Line Value: WS
  misc_feature: MA Experiment 108668 PARAMETER Experiment Name: At_2mM_SA_cDNA_P Parameter: Timepoint (hr) Value: 6
  misc_feature: MA Experiment 108668 PARAMETER Experiment Name: At_2mM_SA_cDNA_P Parameter: Treatment Value: 2mM SA vs. No Treatment
  misc_feature: MA Experiment ID: 20000093 Result: Up-regulated in Transcription
  misc_feature: MA Experiment 20000093 PARAMETER Experiment Name: At_42deg_Heat_cDNA_P Parameter: Temperature (deg C) Value: 42 vs. 22
  misc_feature: MA Experiment 20000093 PARAMETER Experiment Name: At_42deg_Heat_cDNA_P Parameter: Timepoint (hr) Value: 0.5
  misc_feature: MA Experiment 20000093 PARAMETER Experiment Name: At_42deg_Heat_cDNA_P Parameter: Tissue Value: Aerial
  misc_feature: MA Experiment ID: 20000111 Result: Up-regulated in Transcription
  misc_feature: MA Experiment 20000111 PARAMETER Experiment Name: At_42deg_Heat_cDNA_P Parameter: Temperature (deg C) Value: 42 vs. 22
  misc_feature: MA Experiment 20000111 PARAMETER Experiment Name: At_42deg_Heat_cDNA_P Parameter: Timepoint (hr) Value: 6
  misc_feature: MA Experiment 20000111 PARAMETER Experiment Name: At_42deg_Heat_cDNA_P Parameter: Tissue Value: Aerial
  misc_feature: MA Experiment ID: 20000182 Result: Up-regulated in Transcription
  misc_feature: MA Experiment 20000182 PARAMETER Experiment Name: At_2mM_SA_P Parameter: Age (day) Value: 14
  misc_feature: MA Experiment 20000182 PARAMETER Experiment Name: At_2mM_SA_P Parameter: Organism Value: A. thaliana
  misc_feature: MA Experiment 20000182 PARAMETER Experiment Name: At_2mM_SA_P Parameter: Plant Line Value: WS
  misc_feature: MA Experiment 20000182 PARAMETER Experiment Name: At_2mM_SA_P Parameter: Timepoint (hr) Value: 6
  misc_feature: MA Experiment 20000182 PARAMETER Experiment Name: At_2mM_SA_P Parameter: Tissue Value: Aerial
  misc_feature: MA Experiment 20000182 PARAMETER Experiment Name: At_2mM_SA_P Parameter: Treatment Value: 2mM SA vs. No Treatment
  misc_feature: MA Experiment ID: 20000184 Result: Down-regulated in Transcription
  misc_feature: MA Experiment 20000184 PARAMETER Experiment Name: At_Shoots__P Parameter: Age (day) Value: 7
  misc_feature: MA Experiment 20000184 PARAMETER Experiment Name: At_Shoots__P Parameter: Tissue Value: Shoots vs. Whole Plant
  misc_feature: MA Experiment ID: 20000264 Result: Up-regulated in Transcription
  misc_feature: MA Experiment 20000264 PARAMETER Experiment Name: At_Open_Flower_P Parameter: Age (day) Value: 21
  misc_feature: MA Experiment 20000264 PARAMETER Experiment Name: At_Open_Flower_P Parameter: Plant Line Value: WS
  misc_feature: MA Experiment 20000264 PARAMETER Experiment Name: At_Open_Flower_P Parameter: Tissue Value: Open Flower vs. Whole Plant
  misc_feature: MA Experiment ID: 20000286 Result: Up-regulated in Transcription
  misc_feature: MA Experiment 20000286 PARAMETER Experiment Name: At_Open_Flower_P Parameter: Age (day) Value: 21
  misc_feature: MA Experiment 20000286 PARAMETER Experiment Name: At_Open_Flower_P Parameter: Plant Line Value: WS
  misc_feature: MA Experiment 20000286 PARAMETER Experiment Name: At_Open_Flower_P Parameter: Tissue Value: Half Open vs. Whole Plant
  misc_feature: MA Experiment ID: 20000573 Result: Down-regulated in Transcription
  misc_feature: MA Experiment 20000573 PARAMETER Experiment Name: At_100uM_ABA_Mutants__P Parameter: Organism Value: A. thaliana
  misc_feature: MA Experiment 20000573 PARAMETER Experiment Name: At_100uM_ABA_Mutants__P Parameter: Plant Line Value: CS22 vs. Ler wt
  misc_feature: MA Experiment 20000573 PARAMETER Experiment Name: At_100uM_ABA_Mutants__P Parameter: Timepoint (hr) Value: N/A
  misc_feature: MA Experiment 20000573 PARAMETER Experiment Name: At_100uM_ABA_Mutants__P Parameter: Tissue Value: Whole Plant
  misc_feature: MA Experiment 20000573 PARAMETER Experiment Name: At_100uM_ABA_Mutants__P Parameter: Treatment Value: None
  misc_feature: MA Experiment ID: 20000574 Result: Down-regulated in Transcription
  misc_feature: MA Experiment 20000574 PARAMETER Experiment Name: At_100uM_ABA_Mutants__P Parameter: Organism Value: A. thaliana
  misc_feature: MA Experiment 20000574 PARAMETER Experiment Name: At_100uM_ABA_Mutants__P Parameter: Plant Line Value: CS23 vs. Ler wt
  misc_feature: MA Experiment 20000574 PARAMETER Experiment Name: At_100uM_ABA_Mutants__P Parameter: Timepoint (hr) Value: N/A
  misc_feature: MA Experiment 20000574 PARAMETER Experiment Name: At_100uM_ABA_Mutants__P Parameter: Tissue Value: Whole Plant
  misc_feature: MA Experiment 20000574 PARAMETER Experiment Name: At_100uM_ABA_Mutants__P Parameter: Treatment Value: None
  misc_feature: MA Experiment ID: 20000794 Result: Up-regulated in Transcription
  misc_feature: MA Experiment 20000794 PARAMETER Experiment Name: At_Petals_P Parameter: Age (day) Value: 23-25 days
  misc_feature: MA Experiment 20000794 PARAMETER Experiment Name: At_Petals_P Parameter: Plant Line Value: WS
  misc_feature: MA Experiment 20000794 PARAMETER Experiment Name: At_Petals_P Parameter: Tissue Value: Petals vs. Whole plant
  misc_feature: MA Experiment ID: 20001557 Result: Down-regulated in Transcription
  misc_feature: MA Experiment 20001557 PARAMETER Experiment Name: At_Drought_Soil_Dry_P Parameter: Age (day) Value: 27
  misc_feature: MA Experiment 20001557 PARAMETER Experiment Name: At_Drought_Soil_Dry_P Parameter: Organism Value: A. thaliana
  misc_feature: MA Experiment 20001557 PARAMETER Experiment Name: At_Drought_Soil_Dry_P Parameter: Plant Line Value: WS
  misc_feature: MA Experiment 20001557 PARAMETER Experiment Name: At_Drought_Soil_Dry_P Parameter: Post Timepoint (hr) Value: 3
  misc_feature: MA Experiment 20001557 PARAMETER Experiment Name: At_Drought_Soil_Dry_P Parameter: Post-Treatment Value: Re-Water vs. No Drought
  misc_feature: MA Experiment 20001557 PARAMETER Experiment Name: At_Drought_Soil_Dry_P Parameter: Timepoint (day) Value: 13
  misc_feature: MA Experiment 20001557 PARAMETER Experiment Name: At_Drought_Soil_Dry_P Parameter: Treatment Value: Drought vs. No Drought
  misc_feature: MA Experiment ID: 20001560 Result: Down-regulated in Transcription
  misc_feature: MA Experiment 20001560 PARAMETER Experiment Name: At_Drought_Soil_Dry_P Parameter: Age (day) Value: 28
  misc_feature: MA Experiment 20001560 PARAMETER Experiment Name: At_Drought_Soil_Dry_P Parameter: Organism Value: A. thaliana
  misc_feature: MA Experiment 20001560 PARAMETER Experiment Name: At_Drought_Soil_Dry_P Parameter: Plant Line Value: WS
  misc_feature: MA Experiment 20001560 PARAMETER Experiment Name: At_Drought_Soil_Dry_P Parameter: Post Timepoint (hr) Value: None
  misc_feature: MA Experiment 20001560 PARAMETER Experiment Name: At_Drought_Soil_Dry_P Parameter: Post-Treatment Value: None
  misc_feature: MA Experiment 20001560 PARAMETER Experiment Name: At_Drought_Soil_Dry_P Parameter: Timepoint (day) Value: 14
  misc_feature: MA Experiment 20001560 PARAMETER Experiment Name: At_Drought_Soil_Dry_P Parameter: Treatment Value: Drought vs. No Drought
aataatataatttggtttctccccaaattctccacttgttcacttaatctttctcactacctgatcgtggaaatggcgattggaccatcaagtgtgatcgttattgttgggataatcttggcgttgacttatcagtcaatcttgaaacctcctccgccgaagctatgtggctcccccggtggtccaccgatcacagcaccgcgtataaagctgcgagacgggagacatttggcatacaaggagtatggacttccaagagagaaagctaaacacaaaatagtcttcatccatggatccgatagttgtagacacgacgccgttttcgccactcttctttctccggatttagttcaagaacgaggcgtgtatatggtttcgtttgacaagccgggttatggagagagtgatccggatccaatccgtacaccaaaaagcttggctttggatattgaagagctagctgatcaactgagtctaggatcaaagttctacgtgattgggaaatcaatgggaggacaagcggcgtggggatgccttaagtacacccctcaccggttagccggagtaacactagttgctcctgtggttaactactattggaggaacttacctttgaacatttccactgaaggatttaacttgcagcaaaagagagatcaatgggcggttcgtgttgctcactacgctccttggcttatttactggtggaacacacaaaactggttcccgggttcgagtgttgtgaaccgagatggcggtgtcttgtcacagcccgataaagatatcattttgaagctgggatcttcgaggaaaccgcatttggcagaagtaaggcagcaaggaatacatgagagtattaaccgtgatatgattgtgggttttggaaattgggaatttgatcctttagaactcgagaatccgtttttaaacagagaaggctctgttcatttgtggcaaggagacgaggacatgttagtgcctgtgacgctgcaacgttacattgcagataagcttccttggcttcactatcatgaggttgccggaggtggccacttcttccccctcgctaaaggtgtcgttgatgagattgttaagacagctcttaaccactgatgcgtagcattaagtaagataagatcccaaaggtatgaaaaaaccccaaaagattatgggacgtacaatggatttcttatgtaaaatgatttacatatacgaaaacataat

SEQ ID NO: 21674 - protein, 370 aa, Arabidopsis thaliana
  peptide (1)..(370): Ceres Seq. ID no. 12371590
  misc_feature (122)..(366): Pfam Name: alpha/beta hydrolase fold Pfam Description: alpha/beta hydrolase fold
  misc_feature (29)..(368): Homolog of NCBI NO: 18410575 NR Description: expressed protein
  misc_feature (29)..(368): Homolog of NCBI NO: 21537089 NR Description: unknown [Arabidopsis thaliana]
  misc_feature (29)..(368): Homolog of NCBI NO: 37536164 NR Description: putative alpha/beta hydrolase
  misc_feature (32)..(368): Homolog of NCBI NO: 15228377 NR Description: putative protein
  misc_feature (32)..(370): Homolog of NCBI NO: 18404095 NR Description: expressed protein
  misc_feature (29)..(368): Homolog of NCBI NO: 15221193 NR Description: unknown protein; protein id: At1g74290.1
  misc_feature (32)..(370): Homolog of NCBI NO: 28416665 NR Description: At2g36290 [Arabidopsis thaliana]
  misc_feature (24)..(366): Homolog of NCBI NO: 37536162 NR Description: putative alpha/beta hydrolase
  misc_feature (25)..(370): Homolog of NCBI NO: 18410582 NR Description: expressed protein
  misc_feature (25)..(370): Homolog of NCBI NO: 21592662 NR Description: unknown [Arabidopsis thaliana]
NNIIWFLPKFSTCSLNLSHYLIVEMAIGPSSVIVIVGIILALTYQSILKPPPPKLCGSPGGPPITAPRIKLRDGRHLAYKEYGLPREKAKHKIVFIHGSDSCRHDAVFATLLSPDLVQERGVYMVSFDKPGYGESDPDPIRTPKSLALDIEELADQLSLGSKFYVIGKSMGGQAAWGCLKYTPHRLAGVTLVAPVVNYYWRNLPLNISTEGFNLQQKRDQWAVRVAHYAPWLIYWWNTQNWFPGSSVVNRDGGVLSQPDKDIILKLGSSRKPHLAEVRQQGIHESINRDMIVGFGNWEFDPLELENPFLNREGSVHLWQGDEDMLVPVTLQRYIADKLPWLHYHEVAGGGHFFPLAKGVVDEIVKTALNH

SEQ ID NO: 21675 - protein, 346 aa, Arabidopsis thaliana
  peptide (1)..(346): Ceres Seq. ID no. 12371591
  misc_feature (98)..(342): Pfam Name: alpha/beta hydrolase fold Pfam Description: alpha/beta hydrolase fold
  misc_feature (5)..(344): Homolog of NCBI NO: 37536164 NR Description: putative alpha/beta hydrolase
  misc_feature (1)..(342): Homolog of NCBI NO: 37536162 NR Description: putative alpha/beta hydrolase
  misc_feature (8)..(344): Homolog of NCBI NO: 15228377 NR Description: putative protein
  misc_feature (8)..(346): Homolog of NCBI NO: 28416665 NR Description: At2g36290 [Arabidopsis thaliana]
  misc_feature (8)..(346): Homolog of NCBI NO: 18404095 NR Description: expressed protein
  misc_feature (5)..(344): Homolog of NCBI NO: 15221193 NR Description: unknown protein; protein id: At1g74290.1
  misc_feature (5)..(344): Homolog of NCBI NO: 18410575 NR Description: expressed protein
  misc_feature (5)..(344): Homolog of NCBI NO: 21537089 NR Description: unknown [Arabidopsis thaliana]
  misc_feature (1)..(346): Homolog of NCBI NO: 18410582 NR Description: expressed protein
  misc_feature (1)..(346): Homolog of NCBI NO: 21592662 NR Description: unknown [Arabidopsis thaliana]
MAIGPSSVIVIVGIILALTYQSILKPPPPKLCGSPGGPPITAPRIKLRDGRHLAYKEYGLPREKAKHKIVFIHGSDSCRHDAVFATLLSPDLVQERGVYMVSFDKPGYGESDPDPIRTPKSLALDIEELADQLSLGSKFYVIGKSMGGQAAWGCLKYTPHRLAGVTLVAPVVNYYWRNLPLNISTEGFNLQQKRDQWAVRVAHYAPWLIYWWNTQNWFPGSSVVNRDGGVLSQPDKDIILKLGSSRKPHLAEVRQQGIHESINRDMIVGFGNWEFDPLELENPFLNREGSVHLWQGDEDMLVPVTLQRYIADKLPWLHYHEVAGGGHFFPLAKGVVDEIVKTALNH

SEQ ID NO: 21676 - protein, 247 aa, Arabidopsis thaliana
  peptide (1)..(247): Ceres Seq. ID no. 12371592
  misc_feature (1)..(243): Pfam Name: alpha/beta hydrolase fold Pfam Description: alpha/beta hydrolase fold
  misc_feature (1)..(245): Homolog of NCBI NO: 37536164 NR Description: putative alpha/beta hydrolase
  misc_feature (1)..(243): Homolog of NCBI NO: 37536162 NR Description: putative alpha/beta hydrolase
  misc_feature (1)..(245): Homolog of NCBI NO: 15228377 NR Description: putative protein
  misc_feature (1)..(247): Homolog of NCBI NO: 28416665 NR Description: At2g36290 [Arabidopsis thaliana]
  misc_feature (1)..(247): Homolog of NCBI NO: 18404095 NR Description: expressed protein
  misc_feature (1)..(245): Homolog of NCBI NO: 15221193 NR Description: unknown protein; protein id: At1g74290.1
  misc_feature (1)..(245): Homolog of NCBI NO: 18410575 NR Description: expressed protein
  misc_feature (1)..(245): Homolog of NCBI NO: 21537089 NR Description: unknown [Arabidopsis thaliana]
  misc_feature (1)..(247): Homolog of NCBI NO: 18410582 NR Description: expressed protein
  misc_feature (1)..(247): Homolog of NCBI NO: 21592662 NR Description: unknown [Arabidopsis thaliana]
MVSFDKPGYGESDPDPIRTPKSLALDIEELADQLSLGSKFYVIGKSMGGQAAWGCLKYTPHRLAGVTLVAPVVNYYWRNLPLNISTEGFNLQQKRDQWAVRVAHYAPWLIYWWNTQNWFPGSSVVNRDGGVLSQPDKDIILKLGSSRKPHLAEVRQQGIHESINRDMIVGFGNWEFDPLELENPFLNREGSVHLWQGDEDMLVPVTLQRYIADKLPWLHYHEVAGGGHFFPLAKGVVDEIVKTALNH

SEQ ID NO: 21677 - DNA, 1431 bp, Arabidopsis thaliana
  misc_feature (1)..(1431): Ceres Seq. ID no. 12371874
  misc_feature: MA Experiment ID: 108461 Result: Up-regulated in Transcription
  misc_feature: MA Experiment 108461 PARAMETER Experiment Name: At_Germinating_Seeds_cDNA_P Parameter: Age (day) Value: 1 vs. 0
  misc_feature: MA Experiment 108461 PARAMETER Experiment Name: At_Germinating_Seeds_cDNA_P Parameter: Tissue Value: Germinating Seeds
  misc_feature: MA Experiment ID: 108561 Result: Up-regulated in Transcription
  misc_feature: MA Experiment 108561 PARAMETER Experiment Name: At_100uM_ABA_cDNA_P Parameter: Timepoint (hr) Value: 6
  misc_feature: MA Experiment 108561 PARAMETER Experiment Name: At_100uM_ABA_cDNA_P Parameter: Tissue Value: Aerial
  misc_feature: MA Experiment 108561 PARAMETER Experiment Name: At_100uM_ABA_cDNA_P Parameter: Treatment Value: 100uM ABA vs. No Treatment
  misc_feature: MA Experiment ID: 108577 Result: Down-regulated in Transcription
  misc_feature: MA Experiment 108577 PARAMETER Experiment Name: At_42deg_Heat_cDNA_P Parameter: Temperature (deg C) Value: 42 vs. 22
  misc_feature: MA Experiment 108577 PARAMETER Experiment Name: At_42deg_Heat_cDNA_P Parameter: Timepoint (hr) Value: 6
  misc_feature: MA Experiment 108577 PARAMETER Experiment Name: At_42deg_Heat_cDNA_P Parameter: Tissue Value: Aerial
  misc_feature: MA Experiment ID: 108585 Result: Down-regulated in Transcription
  misc_feature: MA Experiment 108585 PARAMETER Experiment Name: At_5mM_NaNP_cDNA_P Parameter: Timepoint (hr) Value: 6
  misc_feature: MA Experiment 108585 PARAMETER Experiment Name: At_5mM_NaNP_cDNA_P Parameter: Tissue Value: Aerial
  misc_feature: MA Experiment 108585 PARAMETER Experiment Name: At_5mM_NaNP_cDNA_P Parameter: Treatment Value: null
  misc_feature: MA Experiment ID: 108595 Result: Down-regulated in Transcription
  misc_feature: MA Experiment 108595 PARAMETER Experiment Name: At_Ler-pi_Ovule_cDNA_P Parameter: Plant Line Value: null
  misc_feature: MA Experiment ID: 20000069 Result: Up-regulated in Transcription
  misc_feature: MA Experiment 20000069 PARAMETER Experiment Name: At_100uM_ABA_Mutants_cDNA_P Parameter: Plant Line Value: CS23
  misc_feature: MA Experiment 20000069 PARAMETER Experiment Name: At_100uM_ABA_Mutants_cDNA_P Parameter: Timepoint (hr) Value: 6
  misc_feature: MA Experiment 20000069 PARAMETER Experiment Name: At_100uM_ABA_Mutants_cDNA_P Parameter: Tissue Value: Aerial
  misc_feature: MA Experiment 20000069 PARAMETER Experiment Name: At_100uM_ABA_Mutants_cDNA_P Parameter: Treatment Value: 100uM ABA vs. No Treatment
  misc_feature: MA Experiment ID: 20000070 Result: Up-regulated in Transcription
  misc_feature: MA Experiment 20000070 PARAMETER Experiment Name: At_100uM_ABA_Mutants_cDNA_P Parameter: Plant Line Value: CS24
  misc_feature: MA Experiment 20000070 PARAMETER Experiment Name: At_100uM_ABA_Mutants_cDNA_P Parameter: Timepoint (hr) Value: 6
  misc_feature: MA Experiment 20000070 PARAMETER Experiment Name: At_100uM_ABA_Mutants_cDNA_P Parameter: Tissue Value: Aerial
  misc_feature: MA Experiment 20000070 PARAMETER Experiment Name: At_100uM_ABA_Mutants_cDNA_P Parameter: Treatment Value: 100uM ABA vs. No Treatment
  misc_feature: MA Experiment ID: 20000071 Result: Up-regulated in Transcription
  misc_feature: MA Experiment 20000071 PARAMETER Experiment Name: At_100uM_ABA_Mutants_cDNA_P Parameter: Plant Line Value: CS8104
  misc_feature: MA Experiment 20000071 PARAMETER Experiment Name: At_100uM_ABA_Mutants_cDNA_P Parameter: Timepoint (hr) Value: 6
  misc_feature: MA Experiment 20000071 PARAMETER Experiment Name: At_100uM_ABA_Mutants_cDNA_P Parameter: Tissue Value: Aerial
  misc_feature: MA Experiment 20000071 PARAMETER Experiment Name: At_100uM_ABA_Mutants_cDNA_P Parameter: Treatment Value: 100uM ABA vs. No Treatment
  misc_feature: MA Experiment ID: 20000072 Result: Up-regulated in Transcription
  misc_feature: MA Experiment 20000072 PARAMETER Experiment Name: At_100uM_ABA_Mutants_cDNA_P Parameter: Plant Line Value: CS8105
  misc_feature: MA Experiment 20000072 PARAMETER Experiment Name: At_100uM_ABA_Mutants_cDNA_P Parameter: Timepoint (hr) Value: 6
  misc_feature: MA Experiment 20000072 PARAMETER Experiment Name: At_100uM_ABA_Mutants_cDNA_P Parameter: Tissue Value: Aerial
  misc_feature: MA Experiment 20000072 PARAMETER Experiment Name: At_100uM_ABA_Mutants_cDNA_P Parameter: Treatment Value: 100uM ABA vs. No Treatment
  misc_feature: MA Experiment ID: 20000088 Result: Up-regulated in Transcription
  misc_feature: MA Experiment 20000088 PARAMETER Experiment Name: At_100uM_ABA_Mutants_cDNA_P Parameter: Plant Line Value: Landsberg
  misc_feature: MA Experiment 20000088 PARAMETER Experiment Name: At_100uM_ABA_Mutants_cDNA_P Parameter: Timepoint (hr) Value: 6
  misc_feature: MA Experiment 20000088 PARAMETER Experiment Name: At_100uM_ABA_Mutants_cDNA_P Parameter: Tissue Value: Aerial
  misc_feature: MA Experiment 20000088 PARAMETER Experiment Name: At_100uM_ABA_Mutants_cDNA_P Parameter: Treatment Value: 100uM ABA vs. No Treatment
  misc_feature: MA Experiment ID: 20000111 Result: Down-regulated in Transcription
  misc_feature: MA Experiment 20000111 PARAMETER Experiment Name: At_42deg_Heat_cDNA_P Parameter: Temperature (deg C) Value: 42 vs. 22
  misc_feature: MA Experiment 20000111 PARAMETER Experiment Name: At_42deg_Heat_cDNA_P Parameter: Timepoint (hr) Value: 6
  misc_feature: MA Experiment 20000111 PARAMETER Experiment Name: At_42deg_Heat_cDNA_P Parameter: Tissue Value: Aerial
  misc_feature: MA Experiment ID: 20000113 Result: Down-regulated in Transcription
  misc_feature: MA Experiment 20000113 PARAMETER Experiment Name: At_42deg_Heat_cDNA_P Parameter: Temperature (deg C) Value: 42 vs. 22
  misc_feature: MA Experiment 20000113 PARAMETER Experiment Name: At_42deg_Heat_cDNA_P Parameter: Timepoint (hr) Value: 8
  misc_feature: MA Experiment 20000113 PARAMETER Experiment Name: At_42deg_Heat_cDNA_P Parameter: Tissue Value: Aerial
  misc_feature: MA Experiment ID: 20001558 Result: Down-regulated in Transcription
  misc_feature: MA Experiment 20001558 PARAMETER Experiment Name: At_Drought_Soil_Dry_P Parameter: Age (day) Value: 27
  misc_feature: MA Experiment 20001558 PARAMETER Experiment Name: At_Drought_Soil_Dry_P Parameter: Organism Value: A. thaliana
  misc_feature: MA Experiment 20001558 PARAMETER Experiment Name: At_Drought_Soil_Dry_P Parameter: Plant Line Value: WS
  misc_feature: MA Experiment 20001558 PARAMETER Experiment Name: At_Drought_Soil_Dry_P Parameter: Post Timepoint (hr) Value: 6
  misc_feature: MA Experiment 20001558 PARAMETER Experiment Name: At_Drought_Soil_Dry_P Parameter: Post-Treatment Value: Re-Water vs. No Drought
  misc_feature: MA Experiment 20001558 PARAMETER Experiment Name: At_Drought_Soil_Dry_P Parameter: Timepoint (day) Value: 13
  misc_feature: MA Experiment 20001558 PARAMETER Experiment Name: At_Drought_Soil_Dry_P Parameter: Treatment Value: Drought vs. No Drought
attatacacacatgcgtgtgtattggatctcacgatttcttatcaatggaactcgcttctctttctcagatccccatccaaatcgttttataggtagattagatagataaactacggatatactcgaactctatccatttacggtattgatttggaaatatggacaagtatgacgttgtcaaggatctgggagctggaaatttcggtgtggctcgccttctcaggcacaaggacaccaaagagcttgttgccatgaaatacatcgagagaggtcgcaagatagatgagaacgtggcgagagagattattaatcacagatcatttaaacatcctaatatcatccggttcaaggaggtgatcctgacacctactcatcttgctattgtgatggagtatgcttctggaggagagctctttgatcgaatctgtactgccggtagatttagtgaagctgaggctaggtacttctttcaacagctgatttgtggtgttgattactgccattccttgcaaatatgtcatagagacctgaagcttgagaacacactgctcgatgggagcccctgctccgcttttgaaaatctgtgattttggttactctaagtcatctatactacattctaggcctaaatcaactgttggaactccagcttacatagcacctgaagttctttcacggagagaatatgatggcaagcacgcggatgtgtggtcatgtggagtaaccctttatgtgatgctggtgggagcttacccgtttgaggaccctaatgatccaaaaaacttcaggaaaacaatccagcgcataatggctgtacaatacaagatcccggactatgttcacatatctcaggaatgcaaacatcttctctctcgcatattcgtcactaactctgctaagagaatcacacttaaggagatcaagaatcatccgtggtacttgaagaatttgccaaaggagctgctagagtcggctcaagcggcgtattacaagagagacacaagcttctctcttcaaagcgtagaggacataatgaagatagttggagaagcaaggaatccagctccatcaactagtgctgtcaaaagctcgggctcaggagctgatgaagaagaggaagaggacgttgaagctgaagtggaagaggaagaagatgatgaagacgaatacgagaagcatgtcaaagaggcacagtcttgtcaagagtctgacaaagcttaaaaagaaaaatgctctctgtttctcttactttatttcttcttcaagaacactccttggtgagttggtgacttgcttctggtaaaaagaaaaacacatttgtcaaacgcaaaggctgtaaactacgtgctggttgtttcacttttagattgatgtcgttgtactgagtaatgggcatgaaacagaaggtttatattattatatgatactat

SEQ ID NO: 21678 - protein, 222 aa, Arabidopsis thaliana
  peptide (1)..(222): Ceres Seq. ID no. 12371875
  misc_feature (2)..(129): Pfam Name: Protein kinase domain Pfam Description: Protein kinase domain
  misc_feature (2)..(218): Homolog of NCBI NO: 19568098 NR Description: osmotic stress-activated protein kinase
  misc_feature (2)..(222): Homolog of NCBI NO: 15242858 NR Description: serine/threonine-protein kinase
  misc_feature (2)..(222): Homolog of NCBI NO: 21593536 NR Description: serine/threonine-protein kinase [Arabidopsis
  misc_feature (2)..(222): Homolog of NCBI NO: 15242317 NR Description: serine/threonine-protein kinase; protein id:
  misc_feature (2)..(222): Homolog of NCBI NO: 99748 NR Description: probable serine/threonine-specific protein kinase
MGAPAPLLKICDFGYSKSSILHSRPKSTVGTPAYIAPEVLSRREYDGKHADVWSCGVTLYVMLVGAYPFEDPNDPKNFRKTIQRIMAVQYKIPDYVHISQECKHLLSRIFVTNSAKRITLKEIKNHPWYLKNLPKELLESAQAAYYKRDTSFSLQSVEDIMKIVGEARNPAPSTSAVKSSGSGADEEEEEDVEAEVEEEEDDEDEYEKHVKEAQSCQESDKA

SEQ ID NO: 21679 - protein, 161 aa, Arabidopsis thaliana
  peptide (1)..(161): Ceres Seq. ID no. 12371876
  misc_feature (1)..(68): Pfam Name: Protein kinase domain Pfam Description: Protein kinase domain
  misc_feature (1)..(157): Homolog of NCBI NO: 19568098 NR Description: osmotic stress-activated protein kinase
  misc_feature (1)..(161): Homolog of NCBI NO: 15242858 NR Description: serine/threonine-protein kinase
  misc_feature (1)..(161): Homolog of NCBI NO: 21593536 NR Description: serine/threonine-protein kinase [Arabidopsis
  misc_feature (1)..(161): Homolog of NCBI NO: 15242317 NR Description: serine/threonine-protein kinase; protein id:
  misc_feature (1)..(161): Homolog of NCBI NO: 99748 NR Description: probable serine/threonine-specific protein kinase
MLVGAYPFEDPNDPKNFRKTIQRIMAVQYKIPDYVHISQECKHLLSRIFVTNSAKRITLKEIKNHPWYLKNLPKELLESAQAAYYKRDTSFSLQSVEDIMKIVGEARNPAPSTSAVKSSGSGADEEEEEDVEAEVEEEEDDEDEYEKHVKEAQSCQESDKA

SEQ ID NO: 21680 - protein, 142 aa, Arabidopsis thaliana
  peptide (1)..(142): Ceres Seq. ID no. 12371877
  misc_feature (4)..(135): Pfam Name: Protein kinase domain Pfam Description: Protein kinase domain
  misc_feature (1)..(135): Homolog of NCBI NO: 19568098 NR Description: osmotic stress-activated protein kinase
  misc_feature (1)..(135): Homolog of NCBI NO: 15242858 NR Description: serine/threonine-protein kinase
  misc_feature (1)..(135): Homolog of NCBI NO: 21593536 NR Description: serine/threonine-protein kinase [Arabidopsis
  misc_feature (1)..(135): Homolog of NCBI NO: 15242317 NR Description: serine/threonine-protein kinase; protein id:
  misc_feature (1)..(135): Homolog of NCBI NO: 99748 NR Description: probable serine/threonine-specific protein kinase
MDKYDVVKDLGAGNFGVARLLRHKDTKELVAMKYIERGRKIDENVAREIINHRSFKHPNIIRFKEVILTPTHLAIVMEYASGGELFDRICTAGRFSEAEARYFFQQLICGVDYCHSLQICHRDLKLENTLLDGSPCSAFENL

SEQ ID NO: 21681 - DNA, 1326 bp, Arabidopsis thaliana
  misc_feature (1)..(1326): Ceres Seq. ID no. 13487947
  misc_feature: MA Experiment ID: 108573 Result: Up-regulated in Transcription
  misc_feature: MA Experiment 108573 PARAMETER Experiment Name: At_Drought_cDNA_P Parameter: Timepoint (hr) Value: 6
  misc_feature: MA Experiment 108573 PARAMETER Experiment Name: At_Drought_cDNA_P Parameter: Tissue Value: Aerial
  misc_feature: MA Experiment 108573 PARAMETER Experiment Name: At_Drought_cDNA_P Parameter: Treatment Value: Drought vs. No Drought
  misc_feature: MA Experiment ID: 108579 Result: Down-regulated in Transcription
  misc_feature: MA Experiment 108579 PARAMETER Experiment Name: At_4deg_Cold_cDNA_P Parameter: Temperature (deg C) Value: 4 vs. 22
  misc_feature: MA Experiment 108579 PARAMETER Experiment Name: At_4deg_Cold_cDNA_P Parameter: Timepoint (hr) Value: 6
  misc_feature: MA Experiment 108579 PARAMETER Experiment Name: At_4deg_Cold_cDNA_P Parameter: Tissue Value: Aerial
  misc_feature: MA Experiment ID: 20000173 Result: Down-regulated in Transcription
  misc_feature: MA Experiment 20000173 PARAMETER Experiment Name: At_42deg_Heat_P Parameter: Age (day) Value: 14
  misc_feature: MA Experiment 20000173 PARAMETER Experiment Name: At_42deg_Heat_P Parameter: Organism Value: A. thaliana
  misc_feature: MA Experiment 20000173 PARAMETER Experiment Name: At_42deg_Heat_P Parameter: Plant Line Value: WS
  misc_feature: MA Experiment 20000173 PARAMETER Experiment Name: At_42deg_Heat_P Parameter: Temperature (deg C) Value: 42 vs. 22
  misc_feature: MA Experiment 20000173 PARAMETER Experiment Name: At_42deg_Heat_P Parameter: Timepoint (hr) Value: 6
  misc_feature: MA Experiment 20000173 PARAMETER Experiment Name: At_42deg_Heat_P Parameter: Tissue Value: Aerial
  misc_feature: MA Experiment ID: 20000224 Result: Down-regulated in Transcription
  misc_feature: MA Experiment ID: 20000227 Result: Down-regulated in Transcription
  misc_feature: MA Experiment 20000227 PARAMETER Experiment Name: At_Root-Tips-vs-Tops_P Parameter: Tissue Value: Root Tips vs. Root Tops
  misc_feature: MA Experiment ID: 20001905 Result: Up-regulated in Transcription
  misc_feature: MA Experiment 20001905 PARAMETER Experiment Name: At_Drought_Reproduction_P Parameter: Age (day) Value: 40
  misc_feature: MA Experiment 20001905 PARAMETER Experiment Name: At_Drought_Reproduction_P Parameter: Organism Value: A. thaliana
  misc_feature: MA Experiment 20001905 PARAMETER Experiment Name: At_Drought_Reproduction_P Parameter: Plant Line Value: WS
  misc_feature: MA Experiment 20001905 PARAMETER Experiment Name: At_Drought_Reproduction_P Parameter: Timepoint (day) Value: 10
  misc_feature: MA Experiment 20001905 PARAMETER Experiment Name: At_Drought_Reproduction_P Parameter: Tissue Value: Rosettes
  misc_feature: MA Experiment 20001905 PARAMETER Experiment Name: At_Drought_Reproduction_P Parameter: Treatment Value: Drought vs. No Drought
gaagtgaccttcttccttgtcttttttctctccctgttgggatctctgagaaaaaaaaaatccatccgatcttcaaaaaaagtcaccccctttaacattcttctccaatctctctacaaaccctaatctcagccatggatctcgctgcagaagagcttcaatttctcaacattcaaggcatattacgtgaatccacaacaatccccaaattttccccaaaaaccttctacctcataaccctaaccctaattttccctctctccttcgcaatcctcgctcattccctctttacccaaccaatcttagctcagctagatgcaactcctccttcagatcaatctaaaaccaatcacgaatggacccttcttctcatttatcaattcatctacgtcatcttcctcttcgccttctctcttctctcaacagccgccgtcgtcttcaccgtcgcttcgctttacacgggaaagccagtttctttctcttcaacaatgtcagcgattcctctggttttgaagcgtttgttcattaccttcctttgggtttctttaatgatgcttgtgtacaactctgtcttcttgttgtttctcgttgttttgatcgtagctatcgatttacaaagcgtgattctcgctgtcttctcgatggttgtgattttcgttctgtttttgggtgttcatgtttacatgactgcttggtggcatttagctagtgtagtctctgttcttgaaccgatttacggtatcgccgcgatgaagaagagttacgagttgcttaatggaagaactaatatggcgtgttcgatggtttttatgtatcttgctctttgtggaatcactgctggtgttttcggtggtgttgtggttcatggaggtgatgatttcgggttgtttacgaagattgttgttggtggtttcttggttgggattctagtgattgtgaatctagttgggctgcttgtgcagagtgtgttttactatgtttgtaagagttttcatcatcagccgattgataaatctgcgttgcacgatcatcttggtggatatcttggtgactatgtgccgttaaagagcagtattcagatggagaactttgatatttaatcgttaaatggattggatgatgatgatgaagaagaaacggtttttgcggtttgtcattgtaagttgtaatgtttgtaattttctatagtgtttgtattagcttttgcataatctgaattaatttgggggatagacttatattgcagatgttctgttcctttgtaatttcatagtgttgtttttttcttcccaaaattggaagattaatgaaataaatttgtttatt

SEQ ID NO: 21682 - protein, 321 aa, Arabidopsis thaliana
  peptide (1)..(321): Ceres Seq. ID no. 13487948
  misc_feature (26)..(289): Homolog of NCBI NO: 25370705 NR Description: hypothetical protein At2g18680 [imported] -
  misc_feature (11)..(287): Homolog of NCBI NO: 15229864 NR Description: expressed protein [Arabidopsis thaliana]
  misc_feature (26)..(298): Homolog of NCBI NO: 18398818 NR Description: expressed protein [Arabidopsis thaliana]
  misc_feature (12)..(287): Homolog of NCBI NO: 9295718 NR Description: T24P13.3 [Arabidopsis thaliana]
  misc_feature (11)..(292): Homolog of NCBI NO: 15222319 NR Description: hypothetical protein [Arabidopsis thaliana]
  misc_feature (1)..(320): Homolog of NCBI NO: 34908936 NR Description: P0691E06.20 [Oryza sativa (japonica
  misc_feature (1)..(321): Homolog of NCBI NO: 18397813 NR Description: expressed protein [Arabidopsis thaliana]
  misc_feature (1)..(321): Homolog of NCBI NO: 7485737 NR Description: hypothetical protein F18F4.50 - Arabidopsis
  misc_feature (1)..(321): Homolog of NCBI NO: 30684945 NR Description: expressed protein [Arabidopsis thaliana]
  misc_feature (1)..(321): Homolog of NCBI NO: 15241607 NR Description: expressed protein [Arabidopsis thaliana]
MDLAAEELQFLNIQGILRESTTIPKFSPKTFYLITLTLIFPLSFAILAHSLFTQPILAQLDATPPSDQSKTNHEWTLLLIYQFIYVIFLFAFSLLSTAAVVFTVASLYTGKPVSFSSTMSAIPLVLKRLFITFLWVSLMMLVYNSVFLLFLVVLIVAIDLQSVILAVFSMVVIFVLFLGVHVYMTAWWHLASVVSVLEPIYGIAAMKKSYELLNGRTNMACSMVFMYLALCGITAGVFGGVVVHGGDDFGLFTKIVVGGFLVGILVIVNLVGLLVQSVFYYVCKSFHHQPIDKSALHDHLGGYLGDYVPLKSSIQMENFDI

SEQ ID NO: 21683 - protein, 203 aa, Arabidopsis thaliana
  peptide (1)..(203): Ceres Seq. ID no. 13487949
  misc_feature (1)..(171): Homolog of NCBI NO: 25370705 NR Description: hypothetical protein At2g18680 [imported] -
  misc_feature (1)..(169): Homolog of NCBI NO: 15229864 NR Description: expressed protein [Arabidopsis thaliana]
  misc_feature (1)..(180): Homolog of NCBI NO: 18398818 NR Description: expressed protein [Arabidopsis thaliana]
  misc_feature (1)..(169): Homolog of NCBI NO: 9295718 NR Description: T24P13.3 [Arabidopsis thaliana]
  misc_feature (1)..(174): Homolog of NCBI NO: 15222319 NR Description: hypothetical protein [Arabidopsis thaliana]
  misc_feature (1)..(202): Homolog of NCBI NO: 34908936 NR Description: P0691E06.20 [Oryza sativa (japonica
  misc_feature (1)..(203): Homolog of NCBI NO: 18397813 NR Description: expressed protein [Arabidopsis thaliana]
  misc_feature (1)..(203): Homolog of NCBI NO: 7485737 NR Description: hypothetical protein F18F4.50 - Arabidopsis
  misc_feature (1)..(203): Homolog of NCBI NO: 30684945 NR Description: expressed protein [Arabidopsis thaliana]
  misc_feature (1)..(203): Homolog of NCBI NO: 15241607 NR Description: expressed protein [Arabidopsis thaliana]
MSAIPLVLKRLFITFLWVSLMMLVYNSVFLLFLVVLIVAIDLQSVILAVFSMVVIFVLFLGVHVYMTAWWHLASVVSVLEPIYGIAAMKKSYELLNGRTNMACSMVFMYLALCGITAGVFGGVVVHGGDDFGLFTKIVVGGFLVGILVIVNLVGLLVQSVFYYVCKSFHHQPIDKSALHDHLGGYLGDYVPLKSSIQMENFDI

SEQ ID NO: 21684 - protein, 183 aa, Arabidopsis thaliana
  peptide (1)..(183): Ceres Seq. ID no. 13487950
  misc_feature (1)..(151): Homolog of NCBI NO: 25370705 NR Description: hypothetical protein At2g18680 [imported] -
  misc_feature (1)..(149): Homolog of NCBI NO: 15229864 NR Description: expressed protein [Arabidopsis thaliana]
  misc_feature (1)..(160): Homolog of NCBI NO: 18398818 NR Description: expressed protein [Arabidopsis thaliana]
  misc_feature (1)..(149): Homolog of NCBI NO: 9295718 NR Description: T24P13.3 [Arabidopsis thaliana]
  misc_feature (1)..(154): Homolog of NCBI NO: 15222319 NR Description: hypothetical protein [Arabidopsis thaliana]
  misc_feature (1)..(182): Homolog of NCBI NO: 34908936 NR Description: P0691E06.20 [Oryza sativa (japonica
  misc_feature (1)..(183): Homolog of NCBI NO: 18397813 NR Description: expressed protein [Arabidopsis thaliana]
  misc_feature (1)..(183): Homolog of NCBI NO: 7485737 NR Description: hypothetical protein F18F4.50 - Arabidopsis
  misc_feature (1)..(183): Homolog of NCBI NO: 30684945 NR Description: expressed protein [Arabidopsis thaliana]
  misc_feature (1)..(183): Homolog of NCBI NO: 15241607 NR Description: expressed protein [Arabidopsis thaliana]
MMLVYNSVFLLFLVVLIVAIDLQSVILAVFSMVVIFVLFLGVHVYMTAWWHLASVVSVLEPIYGIAAMKKSYELLNGRTNMACSMVFMYLALCGITAGVFGGVVVHGGDDFGLFTKIVVGGFLVGILVIVNLVGLLVQSVFYYVCKSFHHQPIDKSALHDHLGGYLGDYVPLKSSIQMENFDI

SEQ ID NO: 21685 - DNA, 1155 bp, Arabidopsis thaliana
  misc_feature (1)..(1155): Ceres Seq. ID no. 13486708
  misc_feature: MA Experiment ID: 108488 Result: Up-regulated in Transcription
  misc_feature: MA Experiment ID: 108501 Result: Up-regulated in Transcription
  misc_feature: MA Experiment 108501 PARAMETER Experiment Name: At_ap2_floral_buds_cDNA_P Parameter: Plant Line Value: ap2 (Ler.)
  misc_feature: MA Experiment 108501 PARAMETER Experiment Name: At_ap2_floral_buds_cDNA_P Parameter: Tissue Value: Closed Flower
  misc_feature: MA Experiment ID: 108572 Result: Down-regulated in Transcription
  misc_feature: MA Experiment 108572 PARAMETER Experiment Name: At_Drought_cDNA_P Parameter: Timepoint (hr) Value: 1
  misc_feature: MA Experiment 108572 PARAMETER Experiment Name: At_Drought_cDNA_P Parameter: Tissue Value: Aerial
  misc_feature: MA Experiment 108572 PARAMETER Experiment Name: At_Drought_cDNA_P Parameter: Treatment Value: Drought vs. No Drought
  misc_feature: MA Experiment ID: 108573 Result: Down-regulated in Transcription
  misc_feature: MA Experiment 108573 PARAMETER Experiment Name: At_Drought_cDNA_P Parameter: Timepoint (hr) Value: 6
  misc_feature: MA Experiment 108573 PARAMETER Experiment Name: At_Drought_cDNA_P Parameter: Tissue Value: Aerial
  misc_feature: MA Experiment 108573 PARAMETER Experiment Name: At_Drought_cDNA_P Parameter: Treatment Value: Drought vs. No Drought
  misc_feature: MA Experiment ID: 108576 Result: Down-regulated in Transcription
  misc_feature: MA Experiment 108576 PARAMETER Experiment Name: At_42deg_Heat_cDNA_P Parameter: Temperature (deg C) Value: 42 vs. 22
  misc_feature: MA Experiment 108576 PARAMETER Experiment Name: At_42deg_Heat_cDNA_P Parameter: Timepoint (hr) Value: 1
  misc_feature: MA Experiment 108576 PARAMETER Experiment Name: At_42deg_Heat_cDNA_P Parameter: Tissue Value: Aerial
  misc_feature: MA Experiment ID: 108594 Result: Down-regulated in Transcription
  misc_feature: MA Experiment 108594 PARAMETER Experiment Name: At_Ler-rhl_Root_cDNA_P Parameter: Plant Line Value: null
  misc_feature: MA Experiment ID: 20000093 Result: Down-regulated in Transcription
  misc_feature: MA Experiment 20000093 PARAMETER Experiment Name: At_42deg_Heat_cDNA_P Parameter: Temperature (deg C) Value: 42 vs. 22
  misc_feature: MA Experiment 20000093 PARAMETER Experiment Name: At_42deg_Heat_cDNA_P Parameter: Timepoint (hr) Value: 0.5
  misc_feature: MA Experiment 20000093 PARAMETER Experiment Name: At_42deg_Heat_cDNA_P Parameter: Tissue Value: Aerial
  misc_feature: MA Experiment ID: 20000111 Result: Down-regulated in Transcription
  misc_feature: MA Experiment 20000111 PARAMETER Experiment Name: At_42deg_Heat_cDNA_P Parameter: Temperature (deg C) Value: 42 vs. 22
  misc_feature: MA Experiment 20000111 PARAMETER Experiment Name: At_42deg_Heat_cDNA_P Parameter: Timepoint (hr) Value: 6
  misc_feature: MA Experiment 20000111 PARAMETER Experiment Name: At_42deg_Heat_cDNA_P Parameter: Tissue Value: Aerial
  misc_feature: MA Experiment ID: 20000112 Result: Down-regulated in Transcription
  misc_feature: MA Experiment 20000112 PARAMETER Experiment Name: At_42deg_Heat_cDNA_P Parameter: Temperature (deg C) Value: 42 vs. 22
  misc_feature: MA Experiment 20000112 PARAMETER Experiment Name: At_42deg_Heat_cDNA_P Parameter: Timepoint (hr) Value: 2
  misc_feature: MA Experiment 20000112 PARAMETER Experiment Name: At_42deg_Heat_cDNA_P Parameter: Tissue Value: Aerial
  misc_feature: MA Experiment ID: 20000113 Result: Down-regulated in Transcription
  misc_feature: MA Experiment 20000113 PARAMETER Experiment Name: At_42deg_Heat_cDNA_P Parameter: Temperature (deg C) Value: 42 vs. 22
  misc_feature: MA Experiment 20000113 PARAMETER Experiment Name: At_42deg_Heat_cDNA_P Parameter: Timepoint (hr) Value: 8
  misc_feature: MA Experiment 20000113 PARAMETER Experiment Name: At_42deg_Heat_cDNA_P Parameter: Tissue Value: Aerial
  misc_feature: MA Experiment ID: 20000144 Result: Down-regulated in Transcription
  misc_feature: MA Experiment 20000144 PARAMETER Experiment Name: At_42deg_Heat_cDNA_P Parameter: Temperature (deg C) Value: 42 vs. 22
  misc_feature: MA Experiment 20000144 PARAMETER Experiment Name: At_42deg_Heat_cDNA_P Parameter: Timepoint (hr) Value: 1
  misc_feature: MA Experiment 20000144 PARAMETER Experiment Name: At_42deg_Heat_cDNA_P Parameter: Tissue Value: Aerial
  misc_feature: MA Experiment ID: 20000171 Result: Down-regulated in Transcription
  misc_feature: MA Experiment 20000171 PARAMETER Experiment Name: At_42deg_Heat_P Parameter: Age (day) Value: 14
  misc_feature: MA Experiment 20000171 PARAMETER Experiment Name: At_42deg_Heat_P Parameter: Organism Value: A. thaliana
  misc_feature: MA Experiment 20000171 PARAMETER Experiment Name: At_42deg_Heat_P Parameter: Plant Line Value: WS
  misc_feature: MA Experiment 20000171 PARAMETER Experiment Name: At_42deg_Heat_P Parameter: Temperature (deg C) Value: 42 vs. 22
  misc_feature: MA Experiment 20000171 PARAMETER Experiment Name: At_42deg_Heat_P Parameter: Timepoint (hr) Value: 1
  misc_feature: MA Experiment 20000171 PARAMETER Experiment Name: At_42deg_Heat_P Parameter: Tissue Value: Aerial
  misc_feature: MA Experiment ID: 20000173 Result: Down-regulated in Transcription
  misc_feature: MA Experiment 20000173 PARAMETER Experiment Name: At_42deg_Heat_P Parameter: Age (day) Value: 14
  misc_feature: MA Experiment 20000173 PARAMETER Experiment Name: At_42deg_Heat_P Parameter: Organism Value: A. thaliana
  misc_feature: MA Experiment 20000173 PARAMETER Experiment Name: At_42deg_Heat_P Parameter: Plant Line Value: WS
  misc_feature: MA Experiment 20000173 PARAMETER Experiment Name: At_42deg_Heat_P Parameter: Temperature (deg C) Value: 42 vs. 22
  misc_feature: MA Experiment 20000173 PARAMETER Experiment Name: At_42deg_Heat_P Parameter: Timepoint (hr) Value: 6
  misc_feature: MA Experiment 20000173 PARAMETER Experiment Name: At_42deg_Heat_P Parameter: Tissue Value: Aerial
  misc_feature: MA Experiment ID: 20000184 Result: Up-regulated in Transcription
  misc_feature: MA Experiment 20000184 PARAMETER Experiment Name: At_Shoots__P Parameter: Age (day) Value: 7
  misc_feature: MA Experiment 20000184 PARAMETER Experiment Name: At_Shoots__P Parameter: Tissue Value: Shoots vs. Whole Plant
  misc_feature: MA Experiment ID: 20000185 Result: Up-regulated in Transcription
  misc_feature: MA Experiment 20000185 PARAMETER Experiment Name: At_Roots__P Parameter: Age (day) Value: 7 vs. 21
  misc_feature: MA Experiment 20000185 PARAMETER Experiment Name: At_Roots__P Parameter: Organism Value: A. thaliana
  misc_feature: MA Experiment 20000185 PARAMETER Experiment Name: At_Roots__P Parameter: Tissue Value: Roots vs. Whole Plant
  misc_feature: MA Experiment ID: 20000213 Result: Up-regulated in Transcription
  misc_feature: MA Experiment 20000213 PARAMETER Experiment Name: At_4deg_Cold_P Parameter: Timepoint (hr) Value: 2
  misc_feature: MA Experiment ID: 20000227 Result: Down-regulated in Transcription
  misc_feature: MA Experiment 20000227 PARAMETER Experiment Name: At_Root-Tips-vs-Tops_P Parameter: Tissue Value: Root Tips vs. Root Tops
  misc_feature: MA Experiment ID: 20000234 Result: Up-regulated in Transcription
  misc_feature: MA Experiment 20000234 PARAMETER Experiment Name: At_Siliques_P Parameter: Age (day) Value: 21
  misc_feature: MA Experiment 20000234 PARAMETER Experiment Name: At_Siliques_P Parameter: Organism Value: A. thaliana
  misc_feature: MA Experiment 20000234 PARAMETER Experiment Name: At_Siliques_P Parameter: Plant Line Value: WS
  misc_feature: MA Experiment 20000234 PARAMETER Experiment Name: At_Siliques_P Parameter: Tissue Value: Less Than 5mm Siliques vs. Whole Plant
  misc_feature: MA Experiment ID: 20000235 Result: Up-regulated in Transcription
  misc_feature: MA Experiment 20000235 PARAMETER Experiment Name: At_Siliques_P Parameter: Age (day) Value: 21
  misc_feature: MA Experiment 20000235 PARAMETER Experiment Name: At_Siliques_P Parameter: Organism Value: A. thaliana
  misc_feature: MA Experiment 20000235 PARAMETER Experiment Name: At_Siliques_P Parameter: Plant Line Value: WS
  misc_feature: MA Experiment 20000235 PARAMETER Experiment Name: At_Siliques_P Parameter: Tissue Value: 5-10mm Siliques vs. Whole Plant
  misc_feature: MA Experiment ID: 20000438 Result: Up-regulated in Transcription
  misc_feature: MA Experiment 20000438 PARAMETER Experiment Name: At_Shoots__P Parameter: Age (day) Value: 14
  misc_feature: MA Experiment 20000438 PARAMETER Experiment Name: At_Shoots__P Parameter: Tissue Value: Shoots vs. Whole Plant
  misc_feature: MA Experiment ID: 20000439 Result: Up-regulated in Transcription
  misc_feature: MA Experiment 20000439 PARAMETER Experiment Name: At_Roots__P Parameter: Age (day) Value: 14 vs. 21
  misc_feature: MA Experiment 20000439 PARAMETER Experiment Name: At_Roots__P Parameter: Organism Value: A. thaliana
  misc_feature: MA Experiment 20000439 PARAMETER Experiment Name: At_Roots__P Parameter: Tissue Value: Roots vs. Whole Plant
  misc_feature: MA Experiment ID: 20000527 Result: Down-regulated in Transcription
  misc_feature: MA Experiment 20000527 PARAMETER Experiment Name: At_10percent_PEG_P Parameter: Age (day) Value: 20
  misc_feature: MA Experiment 20000527 PARAMETER Experiment Name: At_10percent_PEG_P Parameter: Organism Value: A. thaliana
  misc_feature: MA Experiment 20000527 PARAMETER Experiment Name: At_10percent_PEG_P Parameter: Plant Line Value: WS
  misc_feature: MA Experiment 20000527 PARAMETER Experiment Name: At_10percent_PEG_P Parameter: Timepoint (day) Value: 20
  misc_feature: MA Experiment 20000527 PARAMETER Experiment Name: At_10percent_PEG_P Parameter: Tissue Value: Whole Plant
  misc_feature: MA Experiment 20000527 PARAMETER Experiment Name: At_10percent_PEG_P Parameter: Treatment Value: 10percent PEG vs. No Treatment
  misc_feature: MA Experiment ID: 20001247 Result: Down-regulated in Transcription
  misc_feature: MA Experiment 20001247 PARAMETER Experiment Name: At_Far-red-induction_P Parameter: Age (day) Value: 7
  misc_feature: MA Experiment 20001247 PARAMETER Experiment Name: At_Far-red-induction_P Parameter: Light Value: Far-red vs. White
  misc_feature: MA Experiment 20001247 PARAMETER Experiment Name: At_Far-red-induction_P Parameter: Organism Value: A. thaliana
  misc_feature: MA Experiment 20001247 PARAMETER Experiment Name: At_Far-red-induction_P Parameter: Plant Line Value: Columbia
  misc_feature: MA Experiment 20001247 PARAMETER Experiment Name: At_Far-red-induction_P Parameter: Timepoint (hr) Value: 1
  misc_feature: MA Experiment 20001247 PARAMETER Experiment Name: At_Far-red-induction_P Parameter: Tissue Value: Whole Plant
  misc_feature: MA Experiment ID: 20001248 Result: Down-regulated in Transcription
  misc_feature: MA Experiment 20001248 PARAMETER Experiment Name: At_Far-red-induction_P Parameter: Age (day) Value: 7
  misc_feature: MA Experiment 20001248 PARAMETER Experiment Name: At_Far-red-induction_P Parameter: Light Value: Far-red vs. White
  misc_feature: MA Experiment 20001248 PARAMETER Experiment Name: At_Far-red-induction_P Parameter: Organism Value: A. thaliana
  misc_feature: MA Experiment 20001248 PARAMETER Experiment Name: At_Far-red-induction_P Parameter: Plant Line Value: Columbia
  misc_feature: MA Experiment 20001248 PARAMETER Experiment Name: At_Far-red-induction_P Parameter: Timepoint (hr) Value: 4
  misc_feature: MA Experiment 20001248 PARAMETER Experiment Name: At_Far-red-induction_P Parameter: Tissue Value: Whole Plant
  misc_feature: MA Experiment ID: 20001450 Result: Down-regulated in Transcription
  misc_feature: MA Experiment 20001450 PARAMETER Experiment Name: At_Far-red-induction_P Parameter: Age (day) Value: 7
  misc_feature: MA Experiment 20001450 PARAMETER Experiment Name: At_Far-red-induction_P Parameter: Light Value: Far-red vs. White
  misc_feature: MA Experiment 20001450 PARAMETER Experiment Name: At_Far-red-induction_P Parameter: Organism Value: A. thaliana
  misc_feature: MA Experiment 20001450 PARAMETER Experiment Name: At_Far-red-induction_P Parameter: Plant Line Value: Columbia
  misc_feature: MA Experiment 20001450 PARAMETER Experiment Name: At_Far-red-induction_P Parameter: Timepoint (hr) Value: 8
  misc_feature: MA Experiment 20001450 PARAMETER Experiment Name: At_Far-red-induction_P Parameter: Tissue Value: Whole Plant
  misc_feature: MA Experiment ID: 20001555 Result: Down-regulated in Transcription
  misc_feature: MA Experiment 20001555 PARAMETER Experiment Name: At_Drought_Soil_Dry_P Parameter: Age (day) Value: 24
  misc_feature: MA Experiment 20001555 PARAMETER Experiment Name: At_Drought_Soil_Dry_P Parameter: Organism Value: A. thaliana
  misc_feature: MA Experiment 20001555 PARAMETER Experiment Name: At_Drought_Soil_Dry_P Parameter: Plant Line Value: WS
  misc_feature: MA Experiment 20001555 PARAMETER Experiment Name: At_Drought_Soil_Dry_P Parameter: Post Timepoint (hr) Value: None
  misc_feature: MA Experiment 20001555 PARAMETER Experiment Name: At_Drought_Soil_Dry_P Parameter: Post-Treatment Value: None
  misc_feature: MA Experiment 20001555 PARAMETER Experiment Name: At_Drought_Soil_Dry_P Parameter: Timepoint (day) Value: 10
  misc_feature: MA Experiment 20001555 PARAMETER Experiment Name: At_Drought_Soil_Dry_P Parameter: Treatment Value: Drought vs. No Drought
  misc_feature: MA Experiment ID: 20001556 Result: Down-regulated in Transcription
  misc_feature: MA Experiment 20001556 PARAMETER Experiment Name: At_Drought_Soil_Dry_P Parameter: Age (day) Value: 26
  misc_feature: MA Experiment 20001556 PARAMETER Experiment Name: At_Drought_Soil_Dry_P Parameter: Organism Value: A. thaliana
  misc_feature: MA Experiment 20001556 PARAMETER Experiment Name: At_Drought_Soil_Dry_P Parameter: Plant Line Value: WS
  misc_feature: MA Experiment 20001556 PARAMETER Experiment Name: At_Drought_Soil_Dry_P Parameter: Post Timepoint (hr) Value: None
  misc_feature: MA Experiment 20001556 PARAMETER Experiment Name: At_Drought_Soil_Dry_P Parameter: Post-Treatment Value: None
  misc_feature: MA Experiment 20001556 PARAMETER Experiment Name: At_Drought_Soil_Dry_P Parameter: Timepoint (day) Value: 12
  misc_feature: MA Experiment 20001556 PARAMETER Experiment Name: At_Drought_Soil_Dry_P Parameter: Treatment Value: Drought vs. No Drought
  misc_feature: MA Experiment ID: 20001906 Result: Down-regulated in Transcription
  misc_feature: MA Experiment 20001906 PARAMETER Experiment Name: At_Drought_Reproduction_P Parameter: Age (day) Value: 35
  misc_feature: MA Experiment 20001906 PARAMETER Experiment Name: At_Drought_Reproduction_P Parameter: Organism Value: A. thaliana
  misc_feature: MA Experiment 20001906 PARAMETER Experiment Name: At_Drought_Reproduction_P Parameter: Plant Line Value: WS
  misc_feature: MA Experiment 20001906 PARAMETER Experiment Name: At_Drought_Reproduction_P Parameter: Timepoint (day) Value: 5
  misc_feature: MA Experiment 20001906 PARAMETER Experiment Name: At_Drought_Reproduction_P Parameter: Tissue Value: Siliques
  misc_feature: MA Experiment 20001906 PARAMETER Experiment Name: At_Drought_Reproduction_P Parameter: Treatment Value: Drought vs. No Drought
  misc_feature: MA Experiment ID: 20001908 Result: Down-regulated in Transcription
  misc_feature: MA Experiment 20001908 PARAMETER Experiment Name: At_Drought_Reproduction_P Parameter: Age (day) Value: 40
  misc_feature: MA Experiment 20001908 PARAMETER Experiment Name: At_Drought_Reproduction_P Parameter: Organism Value: A. thaliana
  misc_feature: MA Experiment 20001908 PARAMETER Experiment Name: At_Drought_Reproduction_P Parameter: Plant Line Value: WS
  misc_feature: MA Experiment 20001908 PARAMETER Experiment Name: At_Drought_Reproduction_P Parameter: Timepoint (day) Value: 10
  misc_feature: MA Experiment 20001908 PARAMETER Experiment Name: At_Drought_Reproduction_P Parameter: Tissue Value: Siliques
  misc_feature: MA Experiment 20001908 PARAMETER Experiment Name: At_Drought_Reproduction_P Parameter: Treatment Value: Drought vs. No Drought
  misc_feature: MA Experiment ID: 20001911 Result: Down-regulated in Transcription
  misc_feature: MA Experiment 20001911 PARAMETER Experiment Name: At_Drought_Reproduction_P Parameter: Age (day) Value: 40
  misc_feature: MA Experiment 20001911 PARAMETER Experiment Name: At_Drought_Reproduction_P Parameter: Organism Value: A. thaliana
  misc_feature: MA Experiment 20001911 PARAMETER Experiment Name: At_Drought_Reproduction_P Parameter: Plant Line Value: WS
  misc_feature: MA Experiment 20001911 PARAMETER Experiment Name: At_Drought_Reproduction_P Parameter: Timepoint (day) Value: 10
  misc_feature: MA Experiment 20001911 PARAMETER Experiment Name: At_Drought_Reproduction_P Parameter: Tissue Value: Flowers
  misc_feature: MA Experiment 20001911 PARAMETER Experiment Name: At_Drought_Reproduction_P Parameter: Treatment Value: Drought vs. No Drought
  misc_feature: Phenotype: ROSETTE LEAVES Other
  misc_feature: Phenotype: WHOLE PLANT Size-Small
  misc_feature: Phenotype: ROSETTE LEAVES Other
  misc_feature: Phenotype: WHOLE PLANT Size-Small
  misc_feature: Phenotype: ROSETTE LEAVES Other
  misc_feature: Phenotype: WHOLE PLANT Size-Small
  misc_feature: Phenotype: ROSETTE LEAVES Other
  misc_feature: Phenotype: WHOLE PLANT Size-Small
  misc_feature: Phenotype: ROSETTE LEAVES Other
  misc_feature: Phenotype: WHOLE PLANT Size-Small
gtgcaaccatctctctaaagcttcttctctcataacaatggcaagacaaatcaacatagagagtagtgtttctcaagttacctttatctcctccgccatccccgccgtatcttcctcctcctccatcaccgcttccgcctcattgtcctcttcacctactacatcttcctcttcttcgtcatcaacaaattctaacttcattgaggaagacaactctaaaagaaaagcatctcgaagatcattgtcatcgttagtctccgttgaagacgatgatgatcaaaacggtggaggtgggaaacggcgaaagaccaacggtggagataaacatccgacgtatagaggagtgaggatgaggagttggggaaaatgggtgtcggagattagagagccgagaaagaaatcaagaatctggctcgggacttatccaacggctgagatggcagctcgagctcatgacgtagcggctttagccattaaaggtacaacggcttacctcaattttcccaagttagccggcgagcttcctcgtccagtcacaaattctcctaaagacattcaagccgccgcctctttagcggccgttaactggcaagattcggtcaacgatgtgagtaattctgaagtggctgaaatagttgaagccgagccgagtcgagccgtggtggctcagttgttttcttcggacacaagcacgacgacgacgactcagagtcaagagtattcggaagcttcgtgtgcttcgacttcggcgtgtacggacaaagacagtgaggaagagaagctgtttgatttgccggatttgtttaccgatgagaatgagatgatgatacgaaacgatgcgttttgctactactcgtccacgtggcagctttgtggagccgatgctgggtttcggcttgaagagccgttttttctatctgaatgactaaagtacccctctcgagagagctctcactaacactttattagtttgccatttacttcttcttcattttctctatttacgtttgatatttttttttctttccaacttgagtgatattgattttttgtaaagaaacaatttcttttttttttcctagcaaaatcgtgtttgtgtaatataaatgtggtgataacatgttgaaatattgcagaataatataatgtagcctt

SEQ ID NO: 21686 - protein, 307 aa, Arabidopsis thaliana
  peptide (1)..(307): Ceres Seq. ID no. 13486709
  misc_feature (109)..(173): Pfam Name: AP2 domain Pfam Description: AP2 domain
  misc_feature (13)..(307): Homolog of NCBI NO: 21592664 NR Description: putative AP2 domain transcription factor
  misc_feature (21)..(215): Homolog of NCBI NO: 38605844 NR Description: OSJNBb0034G17.2 [Oryza sativa (japonica
  misc_feature (63)..(193): Homolog of NCBI NO: 14140163 NR Description: putative AP2 domain containing protein [Oryza
  misc_feature (13)..(302): Homolog of NCBI NO: 25990951 NR Description: DREB-like protein [Zea mays]
  misc_feature (29)..(302): Homolog of NCBI NO: 37536842 NR Description: putative DNA binding protein
  misc_feature (41)..(303): Homolog of NCBI NO: 15232340 NR Description: AP2 domain transcription factor TINY, putative
  misc_feature (13)..(302): Homolog of NCBI NO: 21908034 NR Description: DRE binding factor 2 [Zea mays]
  misc_feature (55)..(193): Homolog of NCBI NO: 38605845 NR Description: OSJNBb0034G17.3 [Oryza sativa (japonica
  misc_feature (88)..(266): Homolog of NCBI NO: 14140155 NR Description: putative AP2 domain transcription factor [Oryza
  misc_feature (13)..(307): Homolog of NCBI NO: 15225381 NR Description: AP2 domain transcription factor TINY, putative
CNHLSKASSLITMARQINIESSVSQVTFISSAIPAVSSSSSITASASLSSSPTTSSSSSSSTNSNFIEEDNSKRKASRRSLSSLVSVEDDDDQNGGGGKRRKTNGGDKHPTYRGVRMRSWGKWVSEIREPRKKSRIWLGTYPTAEMAARAHDVAALAIKGTTAYLNFPKLAGELPRPVTNSPKDIQAAASLAAVNWQDSVNDVSNSEVAEIVEAEPSRAVVAQLFSSDTSTTTTTQSQEYSEASCASTSACTDKDSEEEKLFDLPDLFTDENEMMIRNDAFCYYSSTWQLCGADAGFRLEEPFFLSE

SEQ ID NO: 21687 - protein, 295 aa, Arabidopsis thaliana
  peptide (1)..(295): Ceres Seq. ID no. 13486710
  misc_feature (97)..(161): Pfam Name: AP2 domain Pfam Description: AP2 domain
  misc_feature (9)..(203): Homolog of NCBI NO: 38605844 NR Description: OSJNBb0034G17.2 [Oryza sativa (japonica
  misc_feature (76)..(254): Homolog of NCBI NO: 14140155 NR Description: putative AP2 domain transcription factor [Oryza
  misc_feature (51)..(181): Homolog of NCBI NO: 14140163 NR Description: putative AP2 domain containing protein [Oryza
  misc_feature (43)..(181): Homolog of NCBI NO: 38605845 NR Description: OSJNBb0034G17.3 [Oryza sativa (japonica
  misc_feature (1)..(290): Homolog of NCBI NO: 25990951 NR Description: DREB-like protein [Zea mays]
  misc_feature (1)..(290): Homolog of NCBI NO: 21908034 NR Description: DRE binding factor 2 [Zea mays]
  misc_feature (17)..(290): Homolog of NCBI NO: 37536842 NR Description: putative DNA binding protein
  misc_feature (29)..(291): Homolog of NCBI NO: 15232340 NR Description: AP2 domain transcription factor TINY, putative
  misc_feature (1)..(295): Homolog of NCBI NO: 21592664 NR Description: putative AP2 domain transcription factor
  misc_feature (1)..(295): Homolog of NCBI NO: 15225381 NR Description: AP2 domain transcription factor TINY, putative
MARQINIESSVSQVTFISSAIPAVSSSSSITASASLSSSPTTSSSSSSSTNSNFIEEDNSKRKASRRSLSSLVSVEDDDDQNGGGGKRRKTNGGDKHPTYRGVRMRSWGKWVSEIREPRKKSRIWLGTYPTAEMAARAHDVAALAIKGTTAYLNFPKLAGELPRPVTNSPKDIQAAASLAAVNWQDSVNDVSNSEVAEIVEAEPSRAVVAQLFSSDTSTTTTTQSQEYSEASCASTSACTDKDSEEEKLFDLPDLFTDENEMMIRNDAFCYYSSTWQLCGADAGFRLEEPFFLSE

SEQ ID NO: 21688 - protein, 191 aa, Arabidopsis thaliana
  peptide (1)..(191): Ceres Seq. ID no. 13486711
  misc_feature (1)..(57): Pfam Name: AP2 domain Pfam Description: AP2 domain
  misc_feature (1)..(99): Homolog of NCBI NO: 38605844 NR Description: OSJNBb0034G17.2 [Oryza sativa (japonica
  misc_feature (1)..(150): Homolog of NCBI NO: 14140155 NR Description: putative AP2 domain transcription factor [Oryza
  misc_feature (1)..(77): Homolog of NCBI NO: 14140163 NR Description: putative AP2 domain containing protein [Oryza
  misc_feature (1)..(77): Homolog of NCBI NO: 38605845 NR Description: OSJNBb0034G17.3 [Oryza sativa (japonica
  misc_feature (1)..(186): Homolog of NCBI NO: 25990951 NR Description: DREB-like protein [Zea mays]
  misc_feature (1)..(186): Homolog of NCBI NO: 21908034 NR Description: DRE binding factor 2 [Zea mays]
  misc_feature (1)..(186): Homolog of NCBI NO: 37536842 NR Description: putative DNA binding protein
  misc_feature (1)..(187): Homolog of NCBI NO: 15232340 NR Description: AP2 domain transcription factor TINY, putative
  misc_feature (1)..(191): Homolog of NCBI NO: 21592664 NR Description: putative AP2 domain transcription factor
  misc_feature (1)..(191): Homolog of NCBI NO: 15225381 NR Description: AP2 domain transcription factor TINY, putative
MRSWGKWVSEIREPRKKSRIWLGTYPTAEMAARAHDVAALAIKGTTAYLNFPKLAGELPRPVTNSPKDIQAAASLAAVNWQDSVNDVSNSEVAEIVEAEPSRAVVAQLFSSDTSTTTTTQSQEYSEASCASTSACTDKDSEEEKLFDLPDLFTDENEMMIRNDAFCYYSSTWQLCGADAGFRLEEPFFLSE

SEQ ID NO: 21689 - DNA, 648 bp, Arabidopsis thaliana
  misc_feature (1)..(648): Ceres Seq. ID no. 13487129
  misc_feature: MA Experiment ID: 108434 Result: Down-regulated in Transcription
  misc_feature: MA Experiment 108434 PARAMETER Experiment Name: At_Root_Tips_cDNA_P Parameter: Tissue Value: Root Tips
  misc_feature: MA Experiment ID: 108488 Result: Down-regulated in Transcription
  misc_feature: MA Experiment ID: 108574 Result: Up-regulated in Transcription
  misc_feature: MA Experiment 108574 PARAMETER Experiment Name: At_Wounding__cDNA_P Parameter: Timepoint (hr) Value: 1
  misc_feature: MA Experiment 108574 PARAMETER Experiment Name: At_Wounding__cDNA_P Parameter: Tissue Value: Aerial
  misc_feature: MA Experiment 108574 PARAMETER Experiment Name: At_Wounding__cDNA_P Parameter: Treatment Value: Wounding vs. No Wounding
  misc_feature: MA Experiment ID: 108576 Result: Up-regulated in Transcription
  misc_feature: MA Experiment 108576 PARAMETER Experiment Name: At_42deg_Heat_cDNA_P Parameter: Temperature (deg C) Value: 42 vs. 22
  misc_feature: MA Experiment 108576 PARAMETER Experiment Name: At_42deg_Heat_cDNA_P Parameter: Timepoint (hr) Value: 1
  misc_feature: MA Experiment 108576 PARAMETER Experiment Name: At_42deg_Heat_cDNA_P Parameter: Tissue Value: Aerial
  misc_feature: MA Experiment ID: 108577 Result: Up-regulated in Transcription
  misc_feature: MA Experiment 108577 PARAMETER Experiment Name: At_42deg_Heat_cDNA_P Parameter: Temperature (deg C) Value: 42 vs. 22
  misc_feature: MA Experiment 108577 PARAMETER Experiment Name: At_42deg_Heat_cDNA_P Parameter: Timepoint (hr) Value: 6
  misc_feature: MA Experiment 108577 PARAMETER Experiment Name: At_42deg_Heat_cDNA_P Parameter: Tissue Value: Aerial
  misc_feature: MA Experiment ID: 108579 Result: Up-regulated in Transcription
  misc_feature: MA Experiment 108579 PARAMETER Experiment Name: At_4deg_Cold_cDNA_P Parameter: Temperature (deg C) Value: 4 vs. 22
  misc_feature: MA Experiment 108579 PARAMETER Experiment Name: At_4deg_Cold_cDNA_P Parameter: Timepoint (hr) Value: 6
  misc_feature: MA Experiment 108579 PARAMETER Experiment Name: At_4deg_Cold_cDNA_P Parameter: Tissue Value: Aerial
  misc_feature: MA Experiment ID: 20000072 Result: Up-regulated in Transcription
  misc_feature: MA Experiment 20000072 PARAMETER Experiment Name: At_100uM_ABA_Mutants_cDNA_P Parameter: Plant Line Value: CS8105
  misc_feature: MA Experiment 20000072 PARAMETER Experiment Name: At_100uM_ABA_Mutants_cDNA_P Parameter: Timepoint (hr) Value: 6
  misc_feature: MA Experiment 20000072 PARAMETER Experiment Name: At_100uM_ABA_Mutants_cDNA_P Parameter: Tissue Value: Aerial
  misc_feature: MA Experiment 20000072 PARAMETER Experiment Name: At_100uM_ABA_Mutants_cDNA_P Parameter: Treatment Value: 100uM ABA vs. No Treatment
  misc_feature: MA Experiment ID: 20000087 Result: Up-regulated in Transcription
  misc_feature: MA Experiment 20000087 PARAMETER Experiment Name: At_100uM_ABA_Mutants_cDNA_P Parameter: Plant Line Value: WS
  misc_feature: MA Experiment 20000087 PARAMETER Experiment Name: At_100uM_ABA_Mutants_cDNA_P Parameter: Timepoint (hr) Value: 6
  misc_feature: MA Experiment 20000087 PARAMETER Experiment Name: At_100uM_ABA_Mutants_cDNA_P Parameter: Tissue Value: Aerial
  misc_feature: MA Experiment 20000087 PARAMETER Experiment Name: At_100uM_ABA_Mutants_cDNA_P Parameter: Treatment Value: 100uM ABA vs. No Treatment
  misc_feature: MA Experiment ID: 20000093 Result: Up-regulated in Transcription
  misc_feature: MA Experiment 20000093 PARAMETER Experiment Name: At_42deg_Heat_cDNA_P Parameter: Temperature (deg C) Value: 42 vs. 22
  misc_feature: MA Experiment 20000093 PARAMETER Experiment Name: At_42deg_Heat_cDNA_P Parameter: Timepoint (hr) Value: 0.5
  misc_feature: MA Experiment 20000093 PARAMETER Experiment Name: At_42deg_Heat_cDNA_P Parameter: Tissue Value: Aerial
  misc_feature: MA Experiment ID: 20000111 Result: Up-regulated in Transcription
  misc_feature: MA Experiment 20000111 PARAMETER Experiment Name: At_42deg_Heat_cDNA_P Parameter: Temperature (deg C) Value: 42 vs. 22
  misc_feature: MA Experiment 20000111 PARAMETER Experiment Name: At_42deg_Heat_cDNA_P Parameter: Timepoint (hr) Value: 6
  misc_feature: MA Experiment 20000111 PARAMETER Experiment Name: At_42deg_Heat_cDNA_P Parameter: Tissue Value: Aerial
  misc_feature: MA Experiment ID: 20000112 Result: Up-regulated in Transcription
  misc_feature: MA Experiment 20000112 PARAMETER Experiment Name: At_42deg_Heat_cDNA_P Parameter: Temperature (deg C) Value: 42 vs. 22
  misc_feature: MA Experiment 20000112 PARAMETER Experiment Name: At_42deg_Heat_cDNA_P Parameter: Timepoint (hr) Value: 2
  misc_feature: MA Experiment 20000112 PARAMETER Experiment Name: At_42deg_Heat_cDNA_P Parameter: Tissue Value: Aerial
  misc_feature: MA Experiment ID: 20000113 Result: Up-regulated in Transcription
  misc_feature: MA Experiment 20000113 PARAMETER Experiment Name: At_42deg_Heat_cDNA_P Parameter: Temperature (deg C) Value: 42 vs. 22
  misc_feature: MA Experiment 20000113 PARAMETER Experiment Name: At_42deg_Heat_cDNA_P Parameter: Timepoint (hr) Value: 8
  misc_feature: MA Experiment 20000113 PARAMETER Experiment Name: At_42deg_Heat_cDNA_P Parameter: Tissue Value: Aerial
  misc_feature: MA Experiment ID: 20000144 Result: Up-regulated in Transcription
  misc_feature: MA Experiment 20000144 PARAMETER Experiment Name: At_42deg_Heat_cDNA_P Parameter: Temperature (deg C) Value: 42 vs. 22
  misc_feature: MA Experiment 20000144 PARAMETER Experiment Name: At_42deg_Heat_cDNA_P Parameter: Timepoint (hr) Value: 1
  misc_feature: MA Experiment 20000144 PARAMETER Experiment Name: At_42deg_Heat_cDNA_P Parameter: Tissue Value: Aerial
  misc_feature: MA Experiment ID: 20000171 Result: Up-regulated in Transcription
  misc_feature: MA Experiment 20000171 PARAMETER Experiment Name: At_42deg_Heat_P Parameter: Age (day) Value: 14
  misc_feature: MA Experiment 20000171 PARAMETER Experiment Name: At_42deg_Heat_P Parameter: Organism Value: A. thaliana
  misc_feature: MA Experiment 20000171 PARAMETER Experiment Name: At_42deg_Heat_P Parameter: Plant Line Value: WS
  misc_feature: MA Experiment 20000171 PARAMETER Experiment Name: At_42deg_Heat_P Parameter: Temperature (deg C) Value: 42 vs. 22
  misc_feature: MA Experiment 20000171 PARAMETER Experiment Name: At_42deg_Heat_P Parameter: Timepoint (hr) Value: 1
  misc_feature: MA Experiment 20000171 PARAMETER Experiment Name: At_42deg_Heat_P Parameter: Tissue Value: Aerial
  misc_feature: MA Experiment ID: 20000173 Result: Up-regulated in Transcription
  misc_feature: MA Experiment 20000173 PARAMETER Experiment Name: At_42deg_Heat_P Parameter: Age (day) Value: 14
  misc_feature: MA Experiment 20000173 PARAMETER Experiment Name: At_42deg_Heat_P Parameter: Organism Value: A. thaliana
  misc_feature: MA Experiment 20000173 PARAMETER Experiment Name: At_42deg_Heat_P Parameter: Plant Line Value: WS
  misc_feature: MA Experiment 20000173 PARAMETER Experiment Name: At_42deg_Heat_P Parameter: Temperature (deg C) Value: 42 vs. 22
  misc_feature: MA Experiment 20000173 PARAMETER Experiment Name: At_42deg_Heat_P Parameter: Timepoint (hr) Value: 6
  misc_feature: MA Experiment 20000173 PARAMETER Experiment Name: At_42deg_Heat_P Parameter: Tissue Value: Aerial
  misc_feature: MA Experiment ID: 20000182 Result: Up-regulated in Transcription
  misc_feature: MA Experiment 20000182 PARAMETER Experiment Name: At_2mM_SA_P Parameter: Age (day) Value: 14
  misc_feature: MA Experiment 20000182 PARAMETER Experiment Name: At_2mM_SA_P Parameter: Organism Value: A. thaliana
  misc_feature: MA Experiment 20000182 PARAMETER Experiment Name: At_2mM_SA_P Parameter: Plant Line Value: WS
  misc_feature: MA Experiment 20000182 PARAMETER Experiment Name: At_2mM_SA_P Parameter: Timepoint (hr) Value: 6
  misc_feature: MA Experiment 20000182 PARAMETER Experiment Name: At_2mM_SA_P Parameter: Tissue Value: Aerial
  misc_feature: MA Experiment 20000182 PARAMETER Experiment Name: At_2mM_SA_P Parameter: Treatment Value: 2mM SA vs. No Treatment
  misc_feature: MA Experiment ID: 20000185 Result: Up-regulated in Transcription
  misc_feature: MA Experiment 20000185 PARAMETER Experiment Name: At_Roots__P Parameter: Age (day) Value: 7 vs. 21
  misc_feature: MA Experiment 20000185 PARAMETER Experiment Name: At_Roots__P Parameter: Organism Value: A. thaliana
  misc_feature: MA Experiment 20000185 PARAMETER Experiment Name: At_Roots__P Parameter: Tissue Value: Roots vs. Whole Plant
  misc_feature: MA Experiment ID: 20000264 Result: Up-regulated in Transcription
  misc_feature: MA Experiment 20000264 PARAMETER Experiment Name: At_Open_Flower_P Parameter: Age (day) Value: 21
  misc_feature: MA Experiment 20000264 PARAMETER Experiment Name: At_Open_Flower_P Parameter: Plant Line Value: WS
  misc_feature: MA Experiment 20000264 PARAMETER Experiment Name: At_Open_Flower_P Parameter: Tissue Value: Open Flower vs. Whole Plant
  misc_feature: MA Experiment ID: 20000439 Result: Up-regulated in Transcription
  misc_feature: MA Experiment 20000439 PARAMETER Experiment Name: At_Roots__P Parameter: Age (day) Value: 14 vs. 21
  misc_feature: MA Experiment 20000439 PARAMETER Experiment Name: At_Roots__P Parameter: Organism Value: A. thaliana
  misc_feature: MA Experiment 20000439 PARAMETER Experiment Name: At_Roots__P Parameter: Tissue Value: Roots vs. Whole Plant
  misc_feature: MA Experiment ID: 20000443 Result: Up-regulated in Transcription
  misc_feature: MA Experiment 20000443 PARAMETER Experiment Name: At_1uM_BR-BRZ__P Parameter: Tissue Value: Shoot Apices
  misc_feature: MA Experiment 20000443 PARAMETER Experiment Name: At_1uM_BR-BRZ__P Parameter: Treatment Value: 1uM BRZ vs. No Treatment
  misc_feature: MA Experiment ID: 20000527 Result: Down-regulated in Transcription
  misc_feature: MA Experiment 20000527 PARAMETER Experiment Name: At_10percent_PEG_P Parameter: Age (day) Value: 20
  misc_feature: MA Experiment 20000527 PARAMETER Experiment Name: At_10percent_PEG_P Parameter: Organism Value: A. thaliana
  misc_feature: MA Experiment 20000527 PARAMETER Experiment Name: At_10percent_PEG_P Parameter: Plant Line Value: WS
  misc_feature: MA Experiment 20000527 PARAMETER Experiment Name: At_10percent_PEG_P Parameter: Timepoint (day) Value: 20
  misc_feature: MA Experiment 20000527 PARAMETER Experiment Name: At_10percent_PEG_P Parameter: Tissue Value: Whole Plant
  misc_feature: MA Experiment 20000527 PARAMETER Experiment Name: At_10percent_PEG_P Parameter: Treatment Value: 10percent PEG vs. No Treatment
  misc_feature: MA Experiment ID: 20000709 Result: Up-regulated in Transcription
  misc_feature: MA Experiment 20000709 PARAMETER Experiment Name: At_15mM_NH4NO3_L-to-H_P Parameter: Age (hr) Value: 14
  misc_feature: MA Experiment 20000709 PARAMETER Experiment Name: At_15mM_NH4NO3_L-to-H_P Parameter: Organism Value: A. thaliana
  misc_feature: MA Experiment 20000709 PARAMETER Experiment Name: At_15mM_NH4NO3_L-to-H_P Parameter: Plant Line Value: WS
  misc_feature: MA Experiment 20000709 PARAMETER Experiment Name: At_15mM_NH4NO3_L-to-H_P Parameter: Timepoint (hr) Value: 4
  misc_feature: MA Experiment 20000709 PARAMETER Experiment Name: At_15mM_NH4NO3_L-to-H_P Parameter: Tissue Value: Aerial
  misc_feature: MA Experiment 20000709 PARAMETER Experiment Name: At_15mM_NH4NO3_L-to-H_P Parameter: Treatment Value: 15mM NH4NO3 vs. 30mM Mannitol
  misc_feature: MA Experiment ID: 20000794 Result: Up-regulated in Transcription
  misc_feature: MA Experiment 20000794 PARAMETER Experiment Name: At_Petals_P Parameter: Age (day) Value: 23-25 days
  misc_feature: MA Experiment 20000794 PARAMETER Experiment Name: At_Petals_P Parameter: Plant Line Value: WS
  misc_feature: MA Experiment 20000794 PARAMETER Experiment Name: At_Petals_P Parameter: Tissue Value: Petals vs. Whole plant
  misc_feature: MA Experiment ID: 20001248 Result: Down-regulated in Transcription
  misc_feature: MA Experiment 20001248 PARAMETER Experiment Name: At_Far-red-induction_P Parameter: Age (day) Value: 7
  misc_feature: MA Experiment 20001248 PARAMETER Experiment Name: At_Far-red-induction_P Parameter: Light Value: Far-red vs. White
  misc_feature: MA Experiment 20001248 PARAMETER Experiment Name: At_Far-red-induction_P Parameter: Organism Value: A. thaliana
  misc_feature: MA Experiment 20001248 PARAMETER Experiment Name: At_Far-red-induction_P Parameter: Plant Line Value: Columbia
  misc_feature: MA Experiment 20001248 PARAMETER Experiment Name: At_Far-red-induction_P Parameter: Timepoint (hr) Value: 4
  misc_feature: MA Experiment 20001248 PARAMETER Experiment Name: At_Far-red-induction_P Parameter: Tissue Value: Whole Plant
  misc_feature: MA Experiment ID: 20001560 Result: Up-regulated in Transcription
  misc_feature: MA Experiment 20001560 PARAMETER Experiment Name: At_Drought_Soil_Dry_P Parameter: Age (day) Value: 28
  misc_feature: MA Experiment 20001560 PARAMETER Experiment Name: At_Drought_Soil_Dry_P Parameter: Organism Value: A. thaliana
  misc_feature: MA Experiment 20001560 PARAMETER Experiment Name: At_Drought_Soil_Dry_P Parameter: Plant Line Value: WS
  misc_feature: MA Experiment 20001560 PARAMETER Experiment Name: At_Drought_Soil_Dry_P Parameter: Post Timepoint (hr) Value: None
  misc_feature: MA Experiment 20001560 PARAMETER Experiment Name: At_Drought_Soil_Dry_P Parameter: Post-Treatment Value: None
  misc_feature: MA Experiment 20001560 PARAMETER Experiment Name: At_Drought_Soil_Dry_P Parameter: Timepoint (day) Value: 14
  misc_feature: MA Experiment 20001560 PARAMETER Experiment Name: At_Drought_Soil_Dry_P Parameter: Treatment Value: Drought vs. No Drought
  misc_feature: MA Experiment ID: 20001904 Result: Up-regulated in Transcription
  misc_feature: MA Experiment 20001904 PARAMETER Experiment Name: At_Drought_Reproduction_P Parameter: Age (day) Value: 37
  misc_feature: MA Experiment 20001904 PARAMETER Experiment Name: At_Drought_Reproduction_P Parameter: Organism Value: A. thaliana
  misc_feature: MA Experiment 20001904 PARAMETER Experiment Name: At_Drought_Reproduction_P Parameter: Plant Line Value: WS
  misc_feature: MA Experiment 20001904 PARAMETER Experiment Name: At_Drought_Reproduction_P Parameter: Timepoint (day) Value: 7
  misc_feature: MA Experiment 20001904 PARAMETER Experiment Name: At_Drought_Reproduction_P Parameter: Tissue Value: Rosettes
  misc_feature: MA Experiment 20001904 PARAMETER Experiment Name: At_Drought_Reproduction_P Parameter: Treatment Value: Drought vs. No Drought
acttctcataaaaaaggtcatttcaaaaaaaaatcagaaaccgtcaaaaagccaccgttgatatttcttccttgttgcttcttcaatggcgtcgttcgacgaagcacctcccggaaaccccaaagccggtgaaaagatcttcagaaccaagtgcgctcagtgtcacaccgtcgagaaaggtgccggtcacaaacaaggaccgaatttgaatggattgtttggaagacaatctggaacaactccaggatattcttactctgctgctaacaaaagcatggctgtgaattgggaggagaagactctttacgattacttgttgaatcctaagaagtacatccctggaacaaaaatggtgtttcctggactgaaaaaaccgcaagatcgtgccgatctcatcgcttatttgaaggaaggtactgcttagacaggctcgtccagatatatgaagctggcatttttttttctcacagctaaataaaatcagaccaaaaatattatggtcatgaactgctttttgtatggtcttttattctttctttctttttacgttgttgaagaggctagttgcctcttataaagtggaatattcgttattgatgtgaagagctaagaaccaatttccaccacgatagtcatgagattttcctt

SEQ ID NO: 21690 - protein, 112 aa, Arabidopsis thaliana
  peptide (1)..(112): Ceres Seq. ID no. 13487130
  misc_feature (2)..(112): Homolog of NCBI NO: 118013 NR Description: CYTOCHROME C
  misc_feature (2)..(112): Homolog of NCBI NO: 476417 NR Description: cytochrome c - cuckoopint
  misc_feature (2)..(112): Homolog of NCBI NO: 118000 NR Description: CYTOCHROME C
  misc_feature (1)..(112): Homolog of NCBI NO: 118011 NR Description: Cytochrome c
  misc_feature (2)..(112): Homolog of NCBI NO: 117964 NR Description: Cytochrome c
  misc_feature (2)..(112): Homolog of NCBI NO: 117952 NR Description: CYTOCHROME C
  misc_feature (1)..(112): Homolog of NCBI NO: 15219956 NR Description: cytochrome C -related [Arabidopsis thaliana]
  misc_feature (2)..(112): Homolog of NCBI NO: 118018 NR Description: CYTOCHROME C
  misc_feature (2)..(112): Homolog of NCBI NO: 117976 NR Description: Cytochrome c
  misc_feature (1)..(112): Homolog of NCBI NO: 15234910 NR Description: cytochrome c [Arabidopsis thaliana]
MASFDEAPPGNPKAGEKIFRTKCAQCHTVEKGAGHKQGPNLNGLFGRQSGTTPGYSYSAANKSMAVNWEEKTLYDYLLNPKKYIPGTKMVFPGLKKPQDRADLIAYLKEGTA

SEQ ID NO: 21691 - DNA, 549 bp, Arabidopsis thaliana
  misc_feature (1)..(549): Ceres Seq. ID no. 13653411
  misc_feature: MA Experiment ID: 108434 Result: Up-regulated in Transcription
  misc_feature: MA Experiment 108434 PARAMETER Experiment Name: At_Root_Tips_cDNA_P Parameter: Tissue Value: Root Tips
  misc_feature: MA Experiment ID: 108462 Result: Up-regulated in Transcription
  misc_feature: MA Experiment 108462 PARAMETER Experiment Name: At_Germinating_Seeds_cDNA_P Parameter: Age (day) Value: 2 vs. 0
  misc_feature: MA Experiment 108462 PARAMETER Experiment Name: At_Germinating_Seeds_cDNA_P Parameter: Tissue Value: Germinating Seeds
  misc_feature: MA Experiment ID: 108573 Result: Down-regulated in Transcription
  misc_feature: MA Experiment 108573 PARAMETER Experiment Name: At_Drought_cDNA_P Parameter: Timepoint (hr) Value: 6
  misc_feature: MA Experiment 108573 PARAMETER Experiment Name: At_Drought_cDNA_P Parameter: Tissue Value: Aerial
  misc_feature: MA Experiment 108573 PARAMETER Experiment Name: At_Drought_cDNA_P Parameter: Treatment Value: Drought vs. No Drought
  misc_feature: MA Experiment ID: 108577 Result: Down-regulated in Transcription
  misc_feature: MA Experiment 108577 PARAMETER Experiment Name: At_42deg_Heat_cDNA_P Parameter: Temperature (deg C) Value: 42 vs. 22
  misc_feature: MA Experiment 108577 PARAMETER Experiment Name: At_42deg_Heat_cDNA_P Parameter: Timepoint (hr) Value: 6
  misc_feature: MA Experiment 108577 PARAMETER Experiment Name: At_42deg_Heat_cDNA_P Parameter: Tissue Value: Aerial
  misc_feature: MA Experiment ID: 108585 Result: Down-regulated in Transcription
  misc_feature: MA Experiment 108585 PARAMETER Experiment Name: At_5mM_NaNP_cDNA_P Parameter: Timepoint (hr) Value: 6
  misc_feature: MA Experiment 108585 PARAMETER Experiment Name: At_5mM_NaNP_cDNA_P Parameter: Tissue Value: Aerial
  misc_feature: MA Experiment 108585 PARAMETER Experiment Name: At_5mM_NaNP_cDNA_P Parameter: Treatment Value: null
  misc_feature: MA Experiment ID: 20000069 Result: Down-regulated in Transcription
  misc_feature: MA Experiment 20000069 PARAMETER Experiment Name: At_100uM_ABA_Mutants_cDNA_P Parameter: Plant Line Value: CS23
  misc_feature: MA Experiment 20000069 PARAMETER Experiment Name: At_100uM_ABA_Mutants_cDNA_P Parameter: Timepoint (hr) Value: 6
  misc_feature: MA Experiment 20000069 PARAMETER Experiment Name: At_100uM_ABA_Mutants_cDNA_P Parameter: Tissue Value: Aerial
  misc_feature: MA Experiment 20000069 PARAMETER Experiment Name: At_100uM_ABA_Mutants_cDNA_P Parameter: Treatment Value: 100uM ABA vs. No Treatment
  misc_feature: MA Experiment ID: 20000071 Result: Down-regulated in Transcription
  misc_feature: MA Experiment 20000071 PARAMETER Experiment Name: At_100uM_ABA_Mutants_cDNA_P Parameter: Plant Line Value: CS8104
  misc_feature: MA Experiment 20000071 PARAMETER Experiment Name: At_100uM_ABA_Mutants_cDNA_P Parameter: Timepoint (hr) Value: 6
  misc_feature: MA Experiment 20000071 PARAMETER Experiment Name: At_100uM_ABA_Mutants_cDNA_P Parameter: Tissue Value: Aerial
  misc_feature: MA Experiment 20000071 PARAMETER Experiment Name: At_100uM_ABA_Mutants_cDNA_P Parameter: Treatment Value: 100uM ABA vs. No Treatment
  misc_feature: MA Experiment ID: 20000093 Result: Down-regulated in Transcription
  misc_feature: MA Experiment 20000093 PARAMETER Experiment Name: At_42deg_Heat_cDNA_P Parameter: Temperature (deg C) Value: 42 vs. 22
  misc_feature: MA Experiment 20000093 PARAMETER Experiment Name: At_42deg_Heat_cDNA_P Parameter: Timepoint (hr) Value: 0.5
  misc_feature: MA Experiment 20000093 PARAMETER Experiment Name: At_42deg_Heat_cDNA_P Parameter: Tissue Value: Aerial
  misc_feature: MA Experiment ID: 20000111 Result: Down-regulated in Transcription
  misc_feature: MA Experiment 20000111 PARAMETER Experiment Name: At_42deg_Heat_cDNA_P Parameter: Temperature (deg C) Value: 42 vs. 22
  misc_feature: MA Experiment 20000111 PARAMETER Experiment Name: At_42deg_Heat_cDNA_P Parameter: Timepoint (hr) Value: 6
  misc_feature: MA Experiment 20000111 PARAMETER Experiment Name: At_42deg_Heat_cDNA_P Parameter: Tissue Value: Aerial
  misc_feature: MA Experiment ID: 20000113 Result: Down-regulated in Transcription
  misc_feature: MA Experiment 20000113 PARAMETER Experiment Name: At_42deg_Heat_cDNA_P Parameter: Temperature (deg C) Value: 42 vs. 22
  misc_feature: MA Experiment 20000113 PARAMETER Experiment Name: At_42deg_Heat_cDNA_P Parameter: Timepoint (hr) Value: 8
  misc_feature: MA Experiment 20000113 PARAMETER Experiment Name: At_42deg_Heat_cDNA_P Parameter: Tissue Value: Aerial
  misc_feature: MA Experiment ID: 20000306 Result: Up-regulated in Transcription
  misc_feature: MA Experiment 20000306 PARAMETER Experiment Name: At_Germinating_Seeds_Sub_P Parameter: Age (hr) Value: 6 vs. 0
  misc_feature: MA Experiment 20000306 PARAMETER Experiment Name: At_Germinating_Seeds_Sub_P Parameter: Organism Value: A. thaliana
  misc_feature: MA Experiment 20000306 PARAMETER Experiment Name: At_Germinating_Seeds_Sub_P Parameter: Plant Line Value: WS
  misc_feature: MA Experiment 20000306 PARAMETER Experiment Name: At_Germinating_Seeds_Sub_P Parameter: Tissue Value: Germinating Seeds
  misc_feature: MA Experiment ID: 20000307 Result: Up-regulated in Transcription
  misc_feature: MA Experiment 20000307 PARAMETER Experiment Name: At_Germinating_Seeds_Sub_P Parameter: Age (hr) Value: 24 vs. 0
  misc_feature: MA Experiment 20000307 PARAMETER Experiment Name: At_Germinating_Seeds_Sub_P Parameter: Organism Value: A. thaliana
  misc_feature: MA Experiment 20000307 PARAMETER Experiment Name: At_Germinating_Seeds_Sub_P Parameter: Plant Line Value: WS
  misc_feature: MA Experiment 20000307 PARAMETER Experiment Name: At_Germinating_Seeds_Sub_P Parameter: Tissue Value: Germinating Seeds
  misc_feature: MA Experiment ID: 20000328 Result: Down-regulated in Transcription
  misc_feature: MA Experiment 20000328 PARAMETER Experiment Name: At_42deg_Heat_Sub_P Parameter: Age (day) Value: 14
  misc_feature: MA Experiment 20000328 PARAMETER Experiment Name: At_42deg_Heat_Sub_P Parameter: Organism Value: A. thaliana
  misc_feature: MA Experiment 20000328 PARAMETER Experiment Name: At_42deg_Heat_Sub_P Parameter: Plant Line Value: WS
  misc_feature: MA Experiment 20000328 PARAMETER Experiment Name: At_42deg_Heat_Sub_P Parameter: Temperature (deg C) Value: 42 vs. 22
  misc_feature: MA Experiment 20000328 PARAMETER Experiment Name: At_42deg_Heat_Sub_P Parameter: Timepoint (hr) Value: 6
  misc_feature: MA Experiment 20000328 PARAMETER Experiment Name: At_42deg_Heat_Sub_P Parameter: Tissue Value: Aerial
  misc_feature: MA Experiment ID: 20000355 Result: Up-regulated in Transcription
  misc_feature: MA Experiment 20000355 PARAMETER Experiment Name: At_Siliques_Sub_P Parameter: Age (day) Value: 21
  misc_feature: MA Experiment 20000355 PARAMETER Experiment Name: At_Siliques_Sub_P Parameter: Organism Value: A. thaliana
  misc_feature: MA Experiment 20000355 PARAMETER Experiment Name: At_Siliques_Sub_P Parameter: Plant Line Value: WS
  misc_feature: MA Experiment 20000355 PARAMETER Experiment Name: At_Siliques_Sub_P Parameter: Tissue Value: Less Than 5mm Siliques vs. Whole Plant
  misc_feature: MA Experiment ID: 20000440 Result: Up-regulated in Transcription
  misc_feature: MA Experiment 20000440 PARAMETER Experiment Name: At_Closed-Flower__Sub_P Parameter: Tissue Value: Closed Flower vs. Whole Plant
aaaatcaaaagcaattcttcttcacacagtagcgaaaaaaagaaatctaattctctcgagaaaatgtctggtcgtggaaagggaggaaaaggcttgggtaaaggaggagccaagcgtcacaggaaggttctgagagacaacatccaaggaatcaccaagcctgccattcgaagattggctcgtagaggtggagtcaagcgtattagtggtctcatctacgaggagacacgtggcgtcctcaagatctttctcgagaacgtaattcgtgatgctgtcacttacaccgagcacgctaggaggaagactgtgaccgccatggatgttgtctacgctctcaagaggcaaggaaggactctctacggattcggcggttaatcagggtttttcagatttgtgtttggagatctgtttctggaaattagatttgagaatttcaatgtaggtattttagtaaatgtagcaagatttgatttcctttttttgctatttcgcttttgtaatgtgttttcatttgctaaattctcaacaatggaaacacgcaatttggtg

SEQ ID NO: 21692 - protein, 124 aa, Arabidopsis thaliana
  peptide (1)..(124): Ceres Seq. ID no. 13653412
  misc_feature (22)..(124): Homolog of NCBI NO: 37590121 NR Description: Hist1h4h protein [Mus musculus]
  misc_feature (22)..(124): Homolog of NCBI NO: 34858262 NR Description: similar to germinal histone H4 gene [Rattus
  misc_feature (22)..(124): Homolog of NCBI NO: 27692960 NR Description: Similar to germinal histone H4 gene [Mus musculus]
  misc_feature (22)..(124): Homolog of NCBI NO: 27692935 NR Description: Hist1h4i protein [Mus musculus]
  misc_feature (22)..(124): Homolog of NCBI NO: 4504301 NR Description: H4 histone family, member A [Homo sapiens]
  misc_feature (16)..(124): Homolog of NCBI NO: 31195755 NR Description: ENSANGP00000000125 [Anopheles gambiae]
  misc_feature (22)..(124): Homolog of NCBI NO: 1806283 NR Description: Histone H4 homologue [Sesbania rostrata]
  misc_feature (22)..(124): Homolog of NCBI NO: 462243 NR Description: Histone H4
  misc_feature (22)..(124): Homolog of NCBI NO: 15226944 NR Description: histone H4 [Arabidopsis thaliana]
  misc_feature (16)..(124): Homolog of NCBI NO: 34876368 NR Description: similar to germinal histone H4 gene [Rattus
KIKSNSSSHSSEKKKSNSLEKMSGRGKGGKGLGKGGAKRHRKVLRDNIQGITKPAIRRLARRGGVKRISGLIYEETRGVLKIFLENVIRDAVTYTEHARRKTVTAMDVVYALKRQGRTLYGFGG

SEQ ID NO: 21693 - protein, 103 aa, Arabidopsis thaliana; identical to SEQ ID NO: 7737
  peptide (1)..(103): Ceres Seq. ID no. 13653413
  misc_feature (1)..(103): Homolog of NCBI NO: 37590121 NR Description: Hist1h4h protein [Mus musculus]
  misc_feature (1)..(103): Homolog of NCBI NO: 34858262 NR Description: similar to germinal histone H4 gene [Rattus
  misc_feature (1)..(103): Homolog of NCBI NO: 27692960 NR Description: Similar to germinal histone H4 gene [Mus musculus]
  misc_feature (1)..(103): Homolog of NCBI NO: 27692935 NR Description: Hist1h4i protein [Mus musculus]
  misc_feature (1)..(103): Homolog of NCBI NO: 4504301 NR Description: H4 histone family, member A [Homo sapiens]
  misc_feature (1)..(103): Homolog of NCBI NO: 31195755 NR Description: ENSANGP00000000125 [Anopheles gambiae]
  misc_feature (1)..(103): Homolog of NCBI NO: 1806283 NR Description: Histone H4 homologue [Sesbania rostrata]
  misc_feature (1)..(103): Homolog of NCBI NO: 462243 NR Description: Histone H4
  misc_feature (1)..(103): Homolog of NCBI NO: 15226944 NR Description: histone H4 [Arabidopsis thaliana]
  misc_feature (1)..(103): Homolog of NCBI NO: 34876368 NR Description: similar to germinal histone H4 gene [Rattus

SEQ ID NO: 21694 - DNA, 632 bp, Arabidopsis thaliana
  misc_feature (1)..(632): Ceres Seq. ID no. 12321782
  misc_feature: MA Experiment ID: 108434 Result: Down-regulated in Transcription
  misc_feature: MA Experiment 108434 PARAMETER Experiment Name: At_Root_Tips_cDNA_P Parameter: Tissue Value: Root Tips
  misc_feature: MA Experiment ID: 108489 Result: Down-regulated in Transcription
  misc_feature: MA Experiment ID: 108501 Result: Down-regulated in Transcription
  misc_feature: MA Experiment 108501 PARAMETER Experiment Name: At_ap2_floral_buds_cDNA_P Parameter: Plant Line Value: ap2 (Ler.)
  misc_feature: MA Experiment 108501 PARAMETER Experiment Name: At_ap2_floral_buds_cDNA_P Parameter: Tissue Value: Closed Flower
  misc_feature: MA Experiment ID: 108574 Result: Down-regulated in Transcription
  misc_feature: MA Experiment 108574 PARAMETER Experiment Name: At_Wounding__cDNA_P Parameter: Timepoint (hr) Value: 1
  misc_feature: MA Experiment 108574 PARAMETER Experiment Name: At_Wounding__cDNA_P Parameter: Tissue Value: Aerial
  misc_feature: MA Experiment 108574 PARAMETER Experiment Name: At_Wounding__cDNA_P Parameter: Treatment Value: Wounding vs. No Wounding
  misc_feature: MA Experiment ID: 108579 Result: Down-regulated in Transcription
  misc_feature: MA Experiment 108579 PARAMETER Experiment Name: At_4deg_Cold_cDNA_P Parameter: Temperature (deg C) Value: 4 vs. 22
  misc_feature: MA Experiment 108579 PARAMETER Experiment Name: At_4deg_Cold_cDNA_P Parameter: Timepoint (hr) Value: 6
  misc_feature: MA Experiment 108579 PARAMETER Experiment Name: At_4deg_Cold_cDNA_P Parameter: Tissue Value: Aerial
  misc_feature: MA Experiment ID: 108595 Result: Up-regulated in Transcription
  misc_feature: MA Experiment 108595 PARAMETER Experiment Name: At_Ler-pi_Ovule_cDNA_P Parameter: Plant Line Value: null
  misc_feature: MA Experiment ID: 108607 Result: Down-regulated in Transcription
  misc_feature: MA Experiment 108607 PARAMETER Experiment Name: At_100uM_ABA_cDNA_P Parameter: Timepoint (hr) Value: 4
  misc_feature: MA Experiment 108607 PARAMETER Experiment Name: At_100uM_ABA_cDNA_P Parameter: Tissue Value: Aerial
  misc_feature: MA Experiment 108607 PARAMETER Experiment Name: At_100uM_ABA_cDNA_P Parameter: Treatment Value: 100uM ABA vs. No Treatment
  misc_feature: MA Experiment ID: 20000113 Result: Down-regulated in Transcription
  misc_feature: MA Experiment 20000113 PARAMETER Experiment Name: At_42deg_Heat_cDNA_P Parameter: Temperature (deg C) Value: 42 vs. 22
  misc_feature: MA Experiment 20000113 PARAMETER Experiment Name: At_42deg_Heat_cDNA_P Parameter: Timepoint (hr) Value: 8
  misc_feature: MA Experiment 20000113 PARAMETER Experiment Name: At_42deg_Heat_cDNA_P Parameter: Tissue Value: Aerial
  misc_feature: MA Experiment ID: 20000224 Result: Down-regulated in Transcription
  misc_feature: MA Experiment ID: 20000265 Result: Down-regulated in Transcription
  misc_feature: MA Experiment 20000265 PARAMETER Experiment Name: At_Open_Flower_P Parameter: Age (day) Value: 21
  misc_feature: MA Experiment 20000265 PARAMETER Experiment Name: At_Open_Flower_P Parameter: Plant Line Value: WS
  misc_feature: MA Experiment 20000265 PARAMETER Experiment Name: At_Open_Flower_P Parameter: Tissue Value: Closed Flower vs. Whole Plant
  misc_feature: MA Experiment ID: 20000438 Result: Down-regulated in Transcription
  misc_feature: MA Experiment 20000438 PARAMETER Experiment Name: At_Shoots__P Parameter: Age (day) Value: 14
  misc_feature: MA Experiment 20000438 PARAMETER Experiment Name: At_Shoots__P Parameter: Tissue Value: Shoots vs. Whole Plant
  misc_feature: MA Experiment ID: 20000794 Result: Up-regulated in Transcription
  misc_feature: MA Experiment 20000794 PARAMETER Experiment Name: At_Petals_P Parameter: Age (day) Value: 23-25 days
  misc_feature: MA Experiment 20000794 PARAMETER Experiment Name: At_Petals_P Parameter: Plant Line Value: WS
  misc_feature: MA Experiment 20000794 PARAMETER Experiment Name: At_Petals_P Parameter: Tissue Value: Petals vs. Whole plant
  misc_feature: MA Experiment ID: 20001555 Result: Down-regulated in Transcription
  misc_feature: MA Experiment 20001555 PARAMETER Experiment Name: At_Drought_Soil_Dry_P Parameter: Age (day) Value: 24
  misc_feature: MA Experiment 20001555 PARAMETER Experiment Name: At_Drought_Soil_Dry_P Parameter: Organism Value: A. thaliana
  misc_feature: MA Experiment 20001555 PARAMETER Experiment Name: At_Drought_Soil_Dry_P Parameter: Plant Line Value: WS
  misc_feature: MA Experiment 20001555 PARAMETER Experiment Name: At_Drought_Soil_Dry_P Parameter: Post Timepoint (hr) Value: None
  misc_feature: MA Experiment 20001555 PARAMETER Experiment Name: At_Drought_Soil_Dry_P Parameter: Post-Treatment Value: None
  misc_feature: MA Experiment 20001555 PARAMETER Experiment Name: At_Drought_Soil_Dry_P Parameter: Timepoint (day) Value: 10
  misc_feature: MA Experiment 20001555 PARAMETER Experiment Name: At_Drought_Soil_Dry_P Parameter: Treatment Value: Drought vs. No Drought
  misc_feature: MA Experiment ID: 20001556 Result: Down-regulated in Transcription
  misc_feature: MA Experiment 20001556 PARAMETER Experiment Name: At_Drought_Soil_Dry_P Parameter: Age (day) Value: 26
  misc_feature: MA Experiment 20001556 PARAMETER Experiment Name: At_Drought_Soil_Dry_P Parameter: Organism Value: A. thaliana
  misc_feature: MA Experiment 20001556 PARAMETER Experiment Name: At_Drought_Soil_Dry_P Parameter: Plant Line Value: WS
  misc_feature: MA Experiment 20001556 PARAMETER Experiment Name: At_Drought_Soil_Dry_P Parameter: Post Timepoint (hr) Value: None
  misc_feature: MA Experiment 20001556 PARAMETER Experiment Name: At_Drought_Soil_Dry_P Parameter: Post-Treatment Value: None
  misc_feature: MA Experiment 20001556 PARAMETER Experiment Name: At_Drought_Soil_Dry_P Parameter: Timepoint (day) Value: 12
  misc_feature: MA Experiment 20001556 PARAMETER Experiment Name: At_Drought_Soil_Dry_P Parameter: Treatment Value: Drought vs. No Drought
  misc_feature: MA Experiment ID: 20001558 Result: Down-regulated in Transcription
  misc_feature: MA Experiment 20001558 PARAMETER Experiment Name: At_Drought_Soil_Dry_P Parameter: Age (day) Value: 27
  misc_feature: MA Experiment 20001558 PARAMETER Experiment Name: At_Drought_Soil_Dry_P Parameter: Organism Value: A. thaliana
  misc_feature: MA Experiment 20001558 PARAMETER Experiment Name: At_Drought_Soil_Dry_P Parameter: Plant Line Value: WS
  misc_feature: MA Experiment 20001558 PARAMETER Experiment Name: At_Drought_Soil_Dry_P Parameter: Post Timepoint (hr) Value: 6
  misc_feature: MA Experiment 20001558 PARAMETER Experiment Name: At_Drought_Soil_Dry_P Parameter: Post-Treatment Value: Re-Water vs. No Drought
  misc_feature: MA Experiment 20001558 PARAMETER Experiment Name: At_Drought_Soil_Dry_P Parameter: Timepoint (day) Value: 13
  misc_feature: MA Experiment 20001558 PARAMETER Experiment Name: At_Drought_Soil_Dry_P Parameter: Treatment Value: Drought vs. No Drought
  misc_feature: MA Experiment ID: 20001559 Result: Down-regulated in Transcription
  misc_feature: MA Experiment 20001559 PARAMETER Experiment Name: At_Drought_Soil_Dry_P Parameter: Age (day) Value: 28
  misc_feature: MA Experiment 20001559 PARAMETER Experiment Name: At_Drought_Soil_Dry_P Parameter: Organism Value: A. thaliana
  misc_feature: MA Experiment 20001559 PARAMETER Experiment Name: At_Drought_Soil_Dry_P Parameter: Plant Line Value: WS
  misc_feature: MA Experiment 20001559 PARAMETER Experiment Name: At_Drought_Soil_Dry_P Parameter: Post Timepoint (hr) Value: 29
  misc_feature: MA Experiment 20001559 PARAMETER Experiment Name: At_Drought_Soil_Dry_P Parameter: Post-Treatment Value: Re-Water vs. No Drought
  misc_feature: MA Experiment 20001559 PARAMETER Experiment Name: At_Drought_Soil_Dry_P Parameter: Timepoint (day) Value: 14
  misc_feature: MA Experiment 20001559 PARAMETER Experiment Name: At_Drought_Soil_Dry_P Parameter: Treatment Value: Drought vs. No Drought
  misc_feature: MA Experiment ID: 20001757 Result: Down-regulated in Transcription
  misc_feature: MA Experiment 20001757 PARAMETER Experiment Name: At_50mM_NH4NO3_L-to-H_P Parameter: Timepoint (hr) Value: 6
  misc_feature: MA Experiment 20001757 PARAMETER Experiment Name: At_50mM_NH4NO3_L-to-H_P Parameter: Tissue Value: Leaf
  misc_feature: MA Experiment 20001757 PARAMETER Experiment Name: At_50mM_NH4NO3_L-to-H_P Parameter: Treatment Value: 50mM NH4NO3 vs 100mM Mannitol
  misc_feature: MA Experiment ID: 20001773 Result: Up-regulated in Transcription
  misc_feature: MA Experiment 20001773 PARAMETER Experiment Name: At_Far-red-enriched-adult_P Parameter: Age (day) Value: 30
  misc_feature: MA Experiment 20001773 PARAMETER Experiment Name: At_Far-red-enriched-adult_P Parameter: Light Value: Far-red enriched vs. White
  misc_feature: MA Experiment 20001773 PARAMETER Experiment Name: At_Far-red-enriched-adult_P Parameter: Organism Value: A. thaliana
  misc_feature: MA Experiment 20001773 PARAMETER Experiment Name: At_Far-red-enriched-adult_P Parameter: Plant Line Value: Columbia
  misc_feature: MA Experiment 20001773 PARAMETER Experiment Name: At_Far-red-enriched-adult_P Parameter: Timepoint (hr) Value: 48
  misc_feature: MA Experiment 20001773 PARAMETER Experiment Name: At_Far-red-enriched-adult_P Parameter: Tissue Value: Aerial
  misc_feature: MA Experiment ID: 20001905 Result: Down-regulated in Transcription
  misc_feature: MA Experiment 20001905 PARAMETER Experiment Name: At_Drought_Reproduction_P Parameter: Age (day) Value: 40
  misc_feature: MA Experiment 20001905 PARAMETER Experiment Name: At_Drought_Reproduction_P Parameter: Organism Value: A. thaliana
  misc_feature: MA Experiment 20001905 PARAMETER Experiment Name: At_Drought_Reproduction_P Parameter: Plant Line Value: WS
  misc_feature: MA Experiment 20001905 PARAMETER Experiment Name: At_Drought_Reproduction_P Parameter: Timepoint (day) Value: 10
  misc_feature: MA Experiment 20001905 PARAMETER Experiment Name: At_Drought_Reproduction_P Parameter: Tissue Value: Rosettes
  misc_feature: MA Experiment 20001905 PARAMETER Experiment Name: At_Drought_Reproduction_P Parameter: Treatment Value: Drought vs. No Drought
gaaaggtagacgtagacgttggatacttctttggtaggctcttaagaatcttaggtgtatctctttagtttgaagggatatggatcaagaaagatcgatggagacagcataaccaataaacagatcaagaagttctggagacagaagcagatcattaagaggatcatctctattctgctattaaggctgcagctcgtgtcagagctcgtaatctctctgatgaggattataaacggtttgaagaaagcttggacatggaggacctggaaaccgaagatcatcagggattgaaagactggtggacaaagagcaaatacgcgtacttgaaccagcctgctcttggatctgcagattcactgaagagaaagaggttttcgacttatacaccaaactgtttctcgttcaagccttgcaatcctctctacgcaacttcgctcaatgtcttttgaaccatgagcagcaaactctgcaagatcaatcgtcttgcatatatgtatatatttgttcgtgtgtgtctctgtacatgtcatgtgttattgcttctatattaatggatgtggattttggtgtggttgttgatttgtaactgttgaataaaatctttctatggaacactaatttcttcttgttcc

SEQ ID NO: 21695 - protein, 64 aa, Arabidopsis thaliana
  peptide (1)..(64): Ceres Seq. ID no. 12321783
  misc_feature (1)..(64): Homolog of NCBI NO: 25371275 NR Description: hypothetical protein At2g17710 [imported] -
  misc_feature (1)..(64): Homolog of NCBI NO: 21618216 NR Description: unknown [Arabidopsis thaliana]
  misc_feature (1)..(64): Homolog of NCBI NO: 18398508 NR Description: expressed protein
MEDLETEDHQGLKDWWTKSKYAYLNQPALGSADSLKRKRFSTYTPNCFSFKPCNPLYATSLNVF

SEQ ID NO: 21696 - protein, 32 aa, Arabidopsis thaliana
  peptide (1)..(32): Ceres Seq. ID no. 12321784
MSSKLCKINRLAYMYIFVRVCLCTCHVLLLLY

SEQ ID NO: 21697 - DNA, 1419 bp, Arabidopsis thaliana
  misc_feature (1)..(1419): Ceres Seq. ID no. 12668556
  misc_feature: MA Experiment ID: 108462 Result: Up-regulated in Transcription
  misc_feature: MA Experiment 108462 PARAMETER Experiment Name: At_Germinating_Seeds_cDNA_P Parameter: Age (day) Value: 2 vs. 0
  misc_feature: MA Experiment 108462 PARAMETER Experiment Name: At_Germinating_Seeds_cDNA_P Parameter: Tissue Value: Germinating Seeds
  misc_feature: MA Experiment ID: 108469 Result: Up-regulated in Transcription
  misc_feature: MA Experiment ID: 108576 Result: Down-regulated in Transcription
  misc_feature: MA Experiment 108576 PARAMETER Experiment Name: At_42deg_Heat_cDNA_P Parameter: Temperature (deg C) Value: 42 vs. 22
  misc_feature: MA Experiment 108576 PARAMETER Experiment Name: At_42deg_Heat_cDNA_P Parameter: Timepoint (hr) Value: 1
  misc_feature: MA Experiment 108576 PARAMETER Experiment Name: At_42deg_Heat_cDNA_P Parameter: Tissue Value: Aerial
  misc_feature: MA Experiment ID: 108595 Result: Down-regulated in Transcription
  misc_feature: MA Experiment 108595 PARAMETER Experiment Name: At_Ler-pi_Ovule_cDNA_P Parameter: Plant Line Value: null
  misc_feature: MA Experiment ID: 20000090 Result: Up-regulated in Transcription
  misc_feature: MA Experiment ID: 20000111 Result: Down-regulated in Transcription
  misc_feature: MA Experiment 20000111 PARAMETER Experiment Name: At_42deg_Heat_cDNA_P Parameter: Temperature (deg C) Value: 42 vs. 22
  misc_feature: MA Experiment 20000111 PARAMETER Experiment Name: At_42deg_Heat_cDNA_P Parameter: Timepoint (hr) Value: 6
  misc_feature: MA Experiment 20000111 PARAMETER Experiment Name: At_42deg_Heat_cDNA_P Parameter: Tissue Value: Aerial
  misc_feature: MA Experiment ID: 20000113 Result: Down-regulated in Transcription
  misc_feature: MA Experiment 20000113 PARAMETER Experiment Name: At_42deg_Heat_cDNA_P Parameter: Temperature (deg C) Value: 42 vs. 22
  misc_feature: MA Experiment 20000113 PARAMETER Experiment Name: At_42deg_Heat_cDNA_P Parameter: Timepoint (hr) Value: 8
  misc_feature: MA Experiment 20000113 PARAMETER Experiment Name: At_42deg_Heat_cDNA_P Parameter: Tissue Value: Aerial
  misc_feature: MA Experiment ID: 20000182 Result: Up-regulated in Transcription
  misc_feature: MA Experiment 20000182 PARAMETER Experiment Name: At_2mM_SA_P Parameter: Age (day) Value: 14
  misc_feature: MA Experiment 20000182 PARAMETER Experiment Name: At_2mM_SA_P Parameter: Organism Value: A. thaliana
  misc_feature: MA Experiment 20000182 PARAMETER Experiment Name: At_2mM_SA_P Parameter: Plant Line Value: WS
  misc_feature: MA Experiment 20000182 PARAMETER Experiment Name: At_2mM_SA_P Parameter: Timepoint (hr) Value: 6
  misc_feature: MA Experiment 20000182 PARAMETER Experiment Name: At_2mM_SA_P Parameter: Tissue Value: Aerial
  misc_feature: MA Experiment 20000182 PARAMETER Experiment Name: At_2mM_SA_P Parameter: Treatment Value: 2mM SA vs. No Treatment
  misc_feature: MA Experiment ID: 20000184 Result: Down-regulated in Transcription
  misc_feature: MA Experiment 20000184 PARAMETER Experiment Name: At_Shoots__P Parameter: Age (day) Value: 7
  misc_feature: MA Experiment 20000184 PARAMETER Experiment Name: At_Shoots__P Parameter: Tissue Value: Shoots vs. Whole Plant
  misc_feature: MA Experiment ID: 20000185 Result: Down-regulated in Transcription
  misc_feature: MA Experiment 20000185 PARAMETER Experiment Name: At_Roots__P Parameter: Age (day) Value: 7 vs. 21
  misc_feature: MA Experiment 20000185 PARAMETER Experiment Name: At_Roots__P Parameter: Organism Value: A. thaliana
  misc_feature: MA Experiment 20000185 PARAMETER Experiment Name: At_Roots__P Parameter: Tissue Value: Roots vs. Whole Plant
  misc_feature: MA Experiment ID: 20000234 Result: Down-regulated in Transcription
  misc_feature: MA Experiment 20000234 PARAMETER Experiment Name: At_Siliques_P Parameter: Age (day) Value: 21
  misc_feature: MA Experiment 20000234 PARAMETER Experiment Name: At_Siliques_P Parameter: Organism Value: A. thaliana
  misc_feature: MA Experiment 20000234 PARAMETER Experiment Name: At_Siliques_P Parameter: Plant Line Value: WS
  misc_feature: MA Experiment 20000234 PARAMETER Experiment Name: At_Siliques_P Parameter: Tissue Value: Less Than 5mm Siliques vs. Whole Plant
  misc_feature: MA Experiment ID: 20000264 Result: Down-regulated in Transcription
  misc_feature: MA Experiment 20000264 PARAMETER Experiment Name: At_Open_Flower_P Parameter: Age (day) Value: 21
  misc_feature: MA Experiment 20000264 PARAMETER Experiment Name: At_Open_Flower_P Parameter: Plant Line Value: WS
  misc_feature: MA Experiment 20000264 PARAMETER Experiment Name: At_Open_Flower_P Parameter: Tissue Value: Open Flower vs. Whole Plant
  misc_feature: MA Experiment ID: 20000265 Result: Down-regulated in Transcription
  misc_feature: MA Experiment 20000265 PARAMETER Experiment Name: At_Open_Flower_P Parameter: Age (day) Value: 21
  misc_feature: MA Experiment 20000265 PARAMETER Experiment Name: At_Open_Flower_P Parameter: Plant Line Value: WS
  misc_feature: MA Experiment 20000265 PARAMETER Experiment Name: At_Open_Flower_P Parameter: Tissue Value: Closed Flower vs. Whole Plant
  misc_feature: MA Experiment ID: 20000286 Result: Down-regulated in Transcription
  misc_feature: MA Experiment 20000286 PARAMETER Experiment Name: At_Open_Flower_P Parameter: Age (day) Value: 21
  misc_feature: MA Experiment 20000286 PARAMETER Experiment Name: At_Open_Flower_P Parameter: Plant Line Value: WS
  misc_feature: MA Experiment 20000286 PARAMETER Experiment Name: At_Open_Flower_P Parameter: Tissue Value: Half Open vs. Whole Plant
  misc_feature: MA Experiment ID: 20000439 Result: Down-regulated in Transcription
  misc_feature: MA Experiment 20000439 PARAMETER Experiment Name: At_Roots__P Parameter: Age (day) Value: 14 vs. 21
  misc_feature: MA Experiment 20000439 PARAMETER Experiment Name: At_Roots__P Parameter: Organism Value: A. thaliana
  misc_feature: MA Experiment 20000439 PARAMETER Experiment Name: At_Roots__P Parameter: Tissue Value: Roots vs. Whole Plant
  misc_feature: MA Experiment ID: 20000794 Result: Down-regulated in Transcription
  misc_feature: MA Experiment 20000794 PARAMETER Experiment Name: At_Petals_P Parameter: Age (day) Value: 23-25 days
  misc_feature: MA Experiment 20000794 PARAMETER Experiment Name: At_Petals_P Parameter: Plant Line Value: WS
  misc_feature: MA Experiment 20000794 PARAMETER Experiment Name: At_Petals_P Parameter: Tissue Value: Petals vs. Whole plant
  misc_feature: MA Experiment ID: 20001555 Result: Down-regulated in Transcription
  misc_feature: MA Experiment 20001555 PARAMETER Experiment Name: At_Drought_Soil_Dry_P Parameter: Age (day) Value: 24
  misc_feature: MA Experiment 20001555 PARAMETER Experiment Name: At_Drought_Soil_Dry_P Parameter: Organism Value: A. thaliana
  misc_feature: MA Experiment 20001555 PARAMETER Experiment Name: At_Drought_Soil_Dry_P Parameter: Plant Line Value: WS
  misc_feature: MA Experiment 20001555 PARAMETER Experiment Name: At_Drought_Soil_Dry_P Parameter: Post Timepoint (hr) Value: None
  misc_feature: MA Experiment 20001555 PARAMETER Experiment Name: At_Drought_Soil_Dry_P Parameter: Post-Treatment Value: None
  misc_feature: MA Experiment 20001555 PARAMETER Experiment Name: At_Drought_Soil_Dry_P Parameter: Timepoint (day) Value: 10
  misc_feature: MA Experiment 20001555 PARAMETER Experiment Name: At_Drought_Soil_Dry_P Parameter: Treatment Value: Drought vs. No Drought
  misc_feature: MA Experiment ID: 20001557 Result: Down-regulated in Transcription
  misc_feature: MA Experiment 20001557 PARAMETER Experiment Name: At_Drought_Soil_Dry_P Parameter: Age (day) Value: 27
  misc_feature: MA Experiment 20001557 PARAMETER Experiment Name: At_Drought_Soil_Dry_P Parameter: Organism Value: A. thaliana
  misc_feature: MA Experiment 20001557 PARAMETER Experiment Name: At_Drought_Soil_Dry_P Parameter: Plant Line Value: WS
  misc_feature: MA Experiment 20001557 PARAMETER Experiment Name: At_Drought_Soil_Dry_P Parameter: Post Timepoint (hr) Value: 3
  misc_feature: MA Experiment 20001557 PARAMETER Experiment Name: At_Drought_Soil_Dry_P Parameter: Post-Treatment Value: Re-Water vs. No Drought
  misc_feature: MA Experiment 20001557 PARAMETER Experiment Name: At_Drought_Soil_Dry_P Parameter: Timepoint (day) Value: 13
  misc_feature: MA Experiment 20001557 PARAMETER Experiment Name: At_Drought_Soil_Dry_P Parameter: Treatment Value: Drought vs. No Drought
cgacggttcgtcattcttcctctaagctttatctttctgatctctgaccttgtgtctctgtgcatgtgtgtttatctgctactgtgttttgtcggtttgatctccaaaaaccagacatgaacagaggaagcttatgccctaatcccatctgtctccctcctcttgagcaatccatctccaaattcttaacacagagtggaacgtttaaagatggagatcttcgagtgaacaaagatggaatccagaccgtgtctctgtccgaaccaggagctccacctcctattgagccattggacaaccaattgagtttggcagatttagaagtgatcaaagtcattggcaaaggaagtagtggtaatgtccagttggtcaaacacaaactcactcaacagtttttcgctcttaaggtcattcaattgaacacagaagaatcaacatgtcgggcgatttctcaggagctgagaataaacttgagctcgcaatgtccatatcttgtctcatgttatcaatctttctaccacaacggtcttgtttcaatcatattggaattcatggatggtggatcccttgcagacttgttaaagaaagtcggaaaagttcctgaaaacatgctatctgccatctgcaagcgagttcttcgaggtctttgttatattcatcatgagaggcgaatcattcatcgggacttaaagccttcaaacttgctaatcaatcatagaggtgaagtcaagatcacagactttggtgtcagcaagatcttgacaagcacaagtagtcttgctaattctttcgtgggcacatacccttatatgtctccagagagaatcagcgggagtttgtacagtaacaagagcgatatttggagcttgggactggttttgctcgaatgtgcaacgggtaaattcccgtatactcctccagaacacaagaaaggatggagtagcgtgtacgagcttgtggacgccattgttgaaaacccgcctccttgtgcaccttccaatctcttttctccagagttttgctccttcatctcgcaatgtgtacaaaaagatccaagggacagaaaatcagcaaaggagcttctggaacacaagttcgtaaagatgtttgaagattcggatacaaatctctcggcttacttcaccgacgcaggatctttgattcccccacttgctaactagaaccgagtttgaacaatcttttaacctccaagttattatttcatatccactagaagagattttatgaaagataaatttacgagatgttatgacttaagagacttgtctacaaaatttgatttaatgtgtgtacttttcacatcactattataaacacaactatcatcagttatgtttctctgctagtggtggatatacttatatagtagttcatatcattatacacattttgttttgt

SEQ ID NO: 21698 - protein, 354 aa, Arabidopsis thaliana
  peptide (1)..(354): Ceres Seq. ID no. 12668557
  misc_feature (68)..(328): Pfam Name: Protein kinase domain Pfam Description: Protein kinase domain
  misc_feature (11)..(352): Homolog of NCBI NO: 7434320 NR Description: protein kinase MEK1 (EC 2.7.1.-) - maize
  misc_feature (1)..(353): Homolog of NCBI NO: 7682432 NR Description: MAP kinase kinase [Nicotiana tabacum]
  misc_feature (1)..(353): Homolog of NCBI NO: 15528441 NR Description: MAP kinase kinase [Medicago sativa subsp. x varia]
  misc_feature (1)..(354): Homolog of NCBI NO: 11259772 NR Description: mitogen-activated protein kinase kinase (EC
  misc_feature (1)..(354): Homolog of NCBI NO: 15233715 NR Description: MAP kinase kinase 2
  misc_feature (1)..(353): Homolog of NCBI NO: 7434316 NR Description: protein kinase MEK1 - tomato
  misc_feature (1)..(353): Homolog of NCBI NO: 9843771 NR Description: MAP kinase kinase [Lycopersicon esculentum]
  misc_feature (1)..(353): Homolog of NCBI NO: 37625027 NR Description: putative mitogen-activated protein kinase kinase
  misc_feature (1)..(307): Homolog of NCBI NO: 30687096 NR Description: mitogen-activated protein kinase kinase
  misc_feature (1)..(354): Homolog of NCBI NO: 15236108 NR Description: mitogen activated protein kinase kinase (nMAPKK)
MNRGSLCPNPICLPPLEQSISKFLTQSGTFKDGDLRVNKDGIQTVSLSEPGAPPPIEPLDNQLSLADLEVIKVIGKGSSGNVQLVKHKLTQQFFALKVIQLNTEESTCRAISQELRINLSSQCPYLVSCYQSFYHNGLVSIILEFMDGGSLADLLKKVGKVPENMLSAICKRVLRGLCYIHHERRIIHRDLKPSNLLINHRGEVKITDFGVSKILTSTSSLANSFVGTYPYMSPERISGSLYSNKSDIWSLGLVLLECATGKFPYTPPEHKKGWSSVYELVDAIVENPPPCAPSNLFSPEFCSFISQCVQKDPRDRKSAKELLEHKFVKMFEDSDTNLSAYFTDAGSLIPPLAN

SEQ ID NO: 21699 - protein, 209 aa, Arabidopsis thaliana
  peptide (1)..(209): Ceres Seq. ID no. 12668558
  misc_feature (1)..(183): Pfam Name: Protein kinase domain Pfam Description: Protein kinase domain
  misc_feature (1)..(207): Homolog of NCBI NO: 7434320 NR Description: protein kinase MEK1 (EC 2.7.1.-) - maize
  misc_feature (1)..(208): Homolog of NCBI NO: 7682432 NR Description: MAP kinase kinase [Nicotiana tabacum]
  misc_feature (1)..(208): Homolog of NCBI NO: 15528441 NR Description: MAP kinase kinase [Medicago sativa subsp. x varia]
  misc_feature (1)..(209): Homolog of NCBI NO: 11259772 NR Description: mitogen-activated protein kinase kinase (EC
  misc_feature (1)..(209): Homolog of NCBI NO: 15233715 NR Description: MAP kinase kinase 2
  misc_feature (1)..(208): Homolog of NCBI NO: 7434316 NR Description: protein kinase MEK1 - tomato
  misc_feature (1)..(208): Homolog of NCBI NO: 9843771 NR Description: MAP kinase kinase [Lycopersicon esculentum]
  misc_feature (1)..(208): Homolog of NCBI NO: 37625027 NR Description: putative mitogen-activated protein kinase kinase
  misc_feature (1)..(162): Homolog of NCBI NO: 30687096 NR Description: mitogen-activated protein kinase kinase
  misc_feature (1)..(209): Homolog of NCBI NO: 15236108 NR Description: mitogen activated protein kinase kinase (nMAPKK)
MDGGSLADLLKKVGKVPENMLSAICKRVLRGLCYIHHERRIIHRDLKPSNLLINHRGEVKITDFGVSKILTSTSSLANSFVGTYPYMSPERISGSLYSNKSDIWSLGLVLLECATGKFPYTPPEHKKGWSSVYELVDAIVENPPPCAPSNLFSPEFCSFISQCVQKDPRDRKSAKELLEHKFVKMFEDSDTNLSAYFTDAGSLIPPLAN

SEQ ID NO: 21700 - protein, 190 aa, Arabidopsis thaliana
  peptide (1)..(190): Ceres Seq. ID no. 12668559
  misc_feature (1)..(164): Pfam Name: Protein kinase domain Pfam Description: Protein kinase domain
  misc_feature (1)..(188): Homolog of NCBI NO: 7434320 NR Description: protein kinase MEK1 (EC 2.7.1.-) - maize
  misc_feature (1)..(189): Homolog of NCBI NO: 7682432 NR Description: MAP kinase kinase [Nicotiana tabacum]
  misc_feature (1)..(189): Homolog of NCBI NO: 15528441 NR Description: MAP kinase kinase [Medicago sativa subsp. x varia]
  misc_feature (1)..(190): Homolog of NCBI NO: 11259772 NR Description: mitogen-activated protein kinase kinase (EC
  misc_feature (1)..(190): Homolog of NCBI NO: 15233715 NR Description: MAP kinase kinase 2
  misc_feature (1)..(189): Homolog of NCBI NO: 7434316 NR Description: protein kinase MEK1 - tomato
  misc_feature (1)..(189): Homolog of NCBI NO: 9843771 NR Description: MAP kinase kinase [Lycopersicon esculentum]
  misc_feature (1)..(189): Homolog of NCBI NO: 37625027 NR Description: putative mitogen-activated protein kinase kinase
  misc_feature (1)..(143): Homolog of NCBI NO: 30687096 NR Description: mitogen-activated protein kinase kinase
  misc_feature (1)..(190): Homolog of NCBI NO: 15236108 NR Description: mitogen activated protein kinase kinase (nMAPKK)
MLSAICKRVLRGLCYIHHERRIIHRDLKPSNLLINHRGEVKITDFGVSKILTSTSSLANSFVGTYPYMSPERISGSLYSNKSDIWSLGLVLLECATGKFPYTPPEHKKGWSSVYELVDAIVENPPPCAPSNLFSPEFCSFISQCVQKDPRDRKSAKELLEHKFVKMFEDSDTNLSAYFTDAGSLIPPLAN

SEQ ID NO: 21701 - DNA, 991 bp, Arabidopsis thaliana
  misc_feature (1)..(991): Ceres Seq. ID no. 12335104
  misc_feature: MA Experiment ID: 108434 Result: Down-regulated in Transcription
  misc_feature: MA Experiment 108434 PARAMETER Experiment Name: At_Root_Tips_cDNA_P Parameter: Tissue Value: Root Tips
  misc_feature: MA Experiment ID: 108435 Result: Down-regulated in Transcription
  misc_feature: MA Experiment 108435 PARAMETER Experiment Name: At_stm_Mutants_cDNA_P Parameter: Plant Line Value: wt Landsburg vs stm
  misc_feature: MA Experiment 108435 PARAMETER Experiment Name: At_stm_Mutants_cDNA_P Parameter: Tissue Value: Shoot Apical Meristem Region
  misc_feature: MA Experiment ID: 108461 Result: Up-regulated in Transcription
  misc_feature: MA Experiment 108461 PARAMETER Experiment Name: At_Germinating_Seeds_cDNA_P Parameter: Age (day) Value: 1 vs. 0
  misc_feature: MA Experiment 108461 PARAMETER Experiment Name: At_Germinating_Seeds_cDNA_P Parameter: Tissue Value: Germinating Seeds
  misc_feature: MA Experiment ID: 108462 Result: Up-regulated in Transcription
  misc_feature: MA Experiment 108462 PARAMETER Experiment Name: At_Germinating_Seeds_cDNA_P Parameter: Age (day) Value: 2 vs. 0
  misc_feature: MA Experiment 108462 PARAMETER Experiment Name: At_Germinating_Seeds_cDNA_P Parameter: Tissue Value: Germinating Seeds
  misc_feature: MA Experiment ID: 108464 Result: Up-regulated in Transcription
  misc_feature: MA Experiment 108464 PARAMETER Experiment Name: At_Germinating_Seeds_cDNA_P Parameter: Age (day) Value: 4 vs. 0
  misc_feature: MA Experiment 108464 PARAMETER Experiment Name: At_Germinating_Seeds_cDNA_P Parameter: Tissue Value: Germinating Seeds
  misc_feature: MA Experiment ID: 108488 Result: Up-regulated in Transcription
  misc_feature: MA Experiment ID: 108595 Result: Down-regulated in Transcription
  misc_feature: MA Experiment 108595 PARAMETER Experiment Name: At_Ler-pi_Ovule_cDNA_P Parameter: Plant Line Value: null
  misc_feature: MA Experiment ID: 20000087 Result: Down-regulated in Transcription
  misc_feature: MA Experiment 20000087 PARAMETER Experiment Name: At_100uM_ABA_Mutants_cDNA_P Parameter: Plant Line Value: WS
  misc_feature: MA Experiment 20000087 PARAMETER Experiment Name: At_100uM_ABA_Mutants_cDNA_P Parameter: Timepoint (hr) Value: 6
  misc_feature: MA Experiment 20000087 PARAMETER Experiment Name: At_100uM_ABA_Mutants_cDNA_P Parameter: Tissue Value: Aerial
  misc_feature: MA Experiment 20000087 PARAMETER Experiment Name: At_100uM_ABA_Mutants_cDNA_P Parameter: Treatment Value: 100uM ABA vs. No Treatment
  misc_feature: MA Experiment ID: 20000179 Result: Up-regulated in Transcription
  misc_feature: MA Experiment 20000179 PARAMETER Experiment Name: At_Germinating_Seeds_P Parameter: Age (hr) Value: 6 vs. 0
  misc_feature: MA Experiment 20000179 PARAMETER Experiment Name: At_Germinating_Seeds_P Parameter: Tissue Value: Germinating Seeds
  misc_feature: MA Experiment ID: 20000180 Result: Up-regulated in Transcription
  misc_feature: MA Experiment 20000180 PARAMETER Experiment Name: At_Germinating_Seeds_P Parameter: Age (hr) Value: 24 vs. 0
  misc_feature: MA Experiment 20000180 PARAMETER Experiment Name: At_Germinating_Seeds_P Parameter: Tissue Value: Germinating Seeds
  misc_feature: MA Experiment ID: 20000185 Result: Down-regulated in Transcription
  misc_feature: MA Experiment 20000185 PARAMETER Experiment Name: At_Roots__P Parameter: Age (day) Value: 7 vs. 21
  misc_feature: MA Experiment 20000185 PARAMETER Experiment Name: At_Roots__P Parameter: Organism Value: A. thaliana
  misc_feature: MA Experiment 20000185 PARAMETER Experiment Name: At_Roots__P Parameter: Tissue Value: Roots vs. Whole Plant
  misc_feature: MA Experiment ID: 20000227 Result: Down-regulated in Transcription
  misc_feature: MA Experiment 20000227 PARAMETER Experiment Name: At_Root-Tips-vs-Tops_P Parameter: Tissue Value: Root Tips vs. Root Tops
  misc_feature: MA Experiment ID: 20000438 Result: Up-regulated in Transcription
  misc_feature: MA Experiment 20000438 PARAMETER Experiment Name: At_Shoots__P Parameter: Age (day) Value: 14
  misc_feature: MA Experiment 20000438 PARAMETER Experiment Name: At_Shoots__P Parameter: Tissue Value: Shoots vs. Whole Plant
  misc_feature: MA Experiment ID: 20000439 Result: Down-regulated in Transcription
  misc_feature: MA Experiment 20000439 PARAMETER Experiment Name: At_Roots__P Parameter: Age (day) Value: 14 vs. 21
  misc_feature: MA Experiment 20000439 PARAMETER Experiment Name: At_Roots__P Parameter: Organism Value: A. thaliana
  misc_feature: MA Experiment 20000439 PARAMETER Experiment Name: At_Roots__P Parameter: Tissue Value: Roots vs. Whole Plant
  misc_feature: MA Experiment ID: 20000441 Result: Up-regulated in Transcription
  misc_feature: MA Experiment 20000441 PARAMETER Experiment Name: At_1uM_BR-BRZ__P Parameter: Tissue Value: Shoot Apices
  misc_feature: MA Experiment 20000441 PARAMETER Experiment Name: At_1uM_BR-BRZ__P Parameter: Treatment Value: 1uM BR vs. No Treatment
  misc_feature: MA Experiment ID: 20000443 Result: Up-regulated in Transcription
  misc_feature: MA Experiment 20000443 PARAMETER Experiment Name: At_1uM_BR-BRZ__P Parameter: Tissue Value: Shoot Apices
  misc_feature: MA Experiment 20000443 PARAMETER Experiment Name: At_1uM_BR-BRZ__P Parameter: Treatment Value: 1uM BRZ vs. No Treatment
  misc_feature: MA Experiment ID: 20000794 Result: Down-regulated in Transcription
  misc_feature: MA Experiment 20000794 PARAMETER Experiment Name: At_Petals_P Parameter: Age (day) Value: 23-25 days
  misc_feature: MA Experiment 20000794 PARAMETER Experiment Name: At_Petals_P Parameter: Plant Line Value: WS
  misc_feature: MA Experiment 20000794 PARAMETER Experiment Name: At_Petals_P Parameter: Tissue Value: Petals vs. Whole plant
  misc_feature: MA Experiment ID: 20001555 Result: Down-regulated in Transcription
  misc_feature: MA Experiment 20001555 PARAMETER Experiment Name: At_Drought_Soil_Dry_P Parameter: Age (day) Value: 24
  misc_feature: MA Experiment 20001555 PARAMETER Experiment Name: At_Drought_Soil_Dry_P Parameter: Organism Value: A. thaliana
  misc_feature: MA Experiment 20001555 PARAMETER Experiment Name: At_Drought_Soil_Dry_P Parameter: Plant Line Value: WS
  misc_feature: MA Experiment 20001555 PARAMETER Experiment Name: At_Drought_Soil_Dry_P Parameter: Post Timepoint (hr) Value: None
  misc_feature: MA Experiment 20001555 PARAMETER Experiment Name: At_Drought_Soil_Dry_P Parameter: Post-Treatment Value: None
  misc_feature: MA Experiment 20001555 PARAMETER Experiment Name: At_Drought_Soil_Dry_P Parameter: Timepoint (day) Value: 10
  misc_feature: MA Experiment 20001555 PARAMETER Experiment Name: At_Drought_Soil_Dry_P Parameter: Treatment Value: Drought vs. No Drought
  misc_feature: MA Experiment ID: 20001557 Result: Down-regulated in Transcription
  misc_feature: MA Experiment 20001557 PARAMETER Experiment Name: At_Drought_Soil_Dry_P Parameter: Age (day) Value: 27
  misc_feature: MA Experiment 20001557 PARAMETER Experiment Name: At_Drought_Soil_Dry_P Parameter: Organism Value: A. thaliana
  misc_feature: MA Experiment 20001557 PARAMETER Experiment Name: At_Drought_Soil_Dry_P Parameter: Plant Line Value: WS
  misc_feature: MA Experiment 20001557 PARAMETER Experiment Name: At_Drought_Soil_Dry_P Parameter: Post Timepoint (hr) Value: 3
  misc_feature: MA Experiment 20001557 PARAMETER Experiment Name: At_Drought_Soil_Dry_P Parameter: Post-Treatment Value: Re-Water vs. No Drought
  misc_feature: MA Experiment 20001557 PARAMETER Experiment Name: At_Drought_Soil_Dry_P Parameter: Timepoint (day) Value: 13
  misc_feature: MA Experiment 20001557 PARAMETER Experiment Name: At_Drought_Soil_Dry_P Parameter: Treatment Value: Drought vs. No Drought
  misc_feature: MA Experiment ID: 20001757 Result: Up-regulated in Transcription
  misc_feature: MA Experiment 20001757 PARAMETER Experiment Name: At_50mM_NH4NO3_L-to-H_P Parameter: Timepoint (hr) Value: 6
  misc_feature: MA Experiment 20001757 PARAMETER Experiment Name: At_50mM_NH4NO3_L-to-H_P Parameter: Tissue Value: Leaf
  misc_feature: MA Experiment 20001757 PARAMETER Experiment Name: At_50mM_NH4NO3_L-to-H_P Parameter: Treatment Value: 50mM NH4NO3 vs 100mM Mannitol
  misc_feature: MA Experiment ID: 20001904 Result: Down-regulated in Transcription
  misc_feature: MA Experiment 20001904 PARAMETER Experiment Name: At_Drought_Reproduction_P Parameter: Age (day) Value: 37
  misc_feature: MA Experiment 20001904 PARAMETER Experiment Name: At_Drought_Reproduction_P Parameter: Organism Value: A. thaliana
  misc_feature: MA Experiment 20001904 PARAMETER Experiment Name: At_Drought_Reproduction_P Parameter: Plant Line Value: WS
  misc_feature: MA Experiment 20001904 PARAMETER Experiment Name: At_Drought_Reproduction_P Parameter: Timepoint (day) Value: 7
  misc_feature: MA Experiment 20001904 PARAMETER Experiment Name: At_Drought_Reproduction_P Parameter: Tissue Value: Rosettes
  misc_feature: MA Experiment 20001904 PARAMETER Experiment Name: At_Drought_Reproduction_P Parameter: Treatment Value: Drought vs. No Drought
  misc_feature: MA Experiment ID: 20001906 Result: Down-regulated in Transcription
  misc_feature: MA Experiment 20001906 PARAMETER Experiment Name: At_Drought_Reproduction_P Parameter: Age (day) Value: 35
  misc_feature: MA Experiment 20001906 PARAMETER Experiment Name: At_Drought_Reproduction_P Parameter: Organism Value: A. thaliana
  misc_feature: MA Experiment 20001906 PARAMETER Experiment Name: At_Drought_Reproduction_P Parameter: Plant Line Value: WS
  misc_feature: MA Experiment 20001906 PARAMETER Experiment Name: At_Drought_Reproduction_P Parameter: Timepoint (day) Value: 5
  misc_feature: MA Experiment 20001906 PARAMETER Experiment Name: At_Drought_Reproduction_P Parameter: Tissue Value: Siliques
  misc_feature: MA Experiment 20001906 PARAMETER Experiment Name: At_Drought_Reproduction_P Parameter: Treatment Value: Drought vs. No Drought
actttcaccaaacagcaaaacaagaagaacaacaacactaagcaaaaaagaaaagctcaagccgagagagacaatggcatcaacattcacgagctcaagcagtgttcttaccccaacaacattccttggccagactaaagcctcaagctttaacccccttcgtgatgttgtctctctcggatctcccaagtacactatgggaaatgatctttggtatggacctgacagagtgaagtacttaggacccttttccgttcaaactccgtcttacctcaccggagaattccctggcgattatggttgggacaccgccggtttatccgcagaccctgaagcctttgccaaaaacagagctcttgaggtgatccatgggagatgggcaatgttgggagcttttggttgcataacccctgaagttcttcaaaagtgggtccgtgtggacttcaaagaaccagtctggttcaaagccggttcacaaatcttctccgaaggcggtttggactacttaggcaacccaaacctagtccatgctcagagcattttagccgtccttggcttccaagtcatcctcatgggtttggttgaaggtttccgcatcaacggtcttgatggtgttggcgaaggcaacgacttgtaccccggtgggcaatactttgacccgttgggtctcgctgatgatccagttacttttgctgagcttaaggtgaaagagatcaagaacggaagattggctatgttctctatgtttggcttctttgttcaagccattgttactggaaaaggtcctttggagaatctccttgaccatcttgacaaccctgttgctaacaatgcgtgggctttcgcaactaagtttgcacctggagcttaaattttcaagtcttgatgtgattcttgtaatgatatgaacataacctttcttgttcctctcaaattacaaatcttctatttgctatgcacagaagaagtctcaaaaatacatgtctctcac

SEQ ID NO: 21702 - protein, 289 aa, Arabidopsis thaliana
  peptide (1)..(289): Ceres Seq. ID no. 12335105
  misc_feature (86)..(256): Pfam Name: Chlorophyll A-B binding protein Pfam Description: Chlorophyll A-B binding protein
  misc_feature (25)..(289): Homolog of NCBI NO: 4689380 NR Description: LHCII type III chlorophyll a/b binding protein
  misc_feature (25)..(226): Homolog of NCBI NO: 7443221 NR Description: chlorophyll a/b-binding protein type III Lhcb3.1
  misc_feature (69)..(289): Homolog of NCBI NO: 405617 NR Description: LHCII Type III chlorophyll a/b binding protein
  misc_feature (25)..(289): Homolog of NCBI NO: 7443222 NR Description: chlorophyll A/b-binding protein type III Lhcb3.2
  misc_feature (31)..(289): Homolog of NCBI NO: 6644196 NR Description: chlorophyll a/b-binding protein [Daucus carota]
  misc_feature (25)..(289): Homolog of NCBI NO: 479406 NR Description: chlorophyll a/b-binding protein - garden pea
  misc_feature (24)..(289): Homolog of NCBI NO: 115794 NR Description: Chlorophyll A-B binding protein 13, chloroplast
  misc_feature (25)..(289): Homolog of NCBI NO: 115793 NR Description: Chlorophyll A-B binding protein of LHCII type
  misc_feature (25)..(289): Homolog of NCBI NO: 34393384 NR Description: putative chlorophyll A-B binding protein of LHCII
  misc_feature (25)..(289): Homolog of NCBI NO: 15239602 NR Description: light-harvesting chlorophyll a/b binding protein,
LSPNSKTRRTTTLSKKEKLKPRETMASTFTSSSSVLTPTTFLGQTKASSFNPLRDVVSLGSPKYTMGNDLWYGPDRVKYLGPFSVQTPSYLTGEFPGDYGWDTAGLSADPEAFAKNRALEVIHGRWAMLGAFGCITPEVLQKWVRVDFKEPVWFKAGSQIFSEGGLDYLGNPNLVHAQSILAVLGFQVILMGLVEGFRINGLDGVGEGNDLYPGGQYFDPLGLADDPVTFAELKVKEIKNGRLAMFSMFGFFVQAIVTGKGPLENLLDHLDNPVANNAWAFATKFAPGA

SEQ ID NO: 21703 - protein, 265 aa, Arabidopsis thaliana
  peptide (1)..(265): Ceres Seq. ID no. 12335106
  misc_feature (62)..(232): Pfam Name: Chlorophyll A-B binding protein Pfam Description: Chlorophyll A-B binding protein
  misc_feature (1)..(202): Homolog of NCBI NO: 7443221 NR Description: chlorophyll a/b-binding protein type III Lhcb3.1
  misc_feature (1)..(265): Homolog of NCBI NO: 34393384 NR Description: putative chlorophyll A-B binding protein of LHCII
  misc_feature (45)..(265): Homolog of NCBI NO: 405617 NR Description: LHCII Type III chlorophyll a/b binding protein
  misc_feature (1)..(265): Homolog of NCBI NO: 115793 NR Description: Chlorophyll A-B binding protein of LHCII type
  misc_feature (1)..(265): Homolog of NCBI NO: 7443222 NR Description: chlorophyll A/b-binding protein type III Lhcb3.2
  misc_feature (1)..(265): Homolog of NCBI NO: 115794 NR Description: Chlorophyll A-B binding protein 13, chloroplast
  misc_feature (7)..(265): Homolog of NCBI NO: 6644196 NR Description: chlorophyll a/b-binding protein [Daucus carota]
  misc_feature (1)..(265): Homolog of NCBI NO: 479406 NR Description: chlorophyll a/b-binding protein - garden pea
  misc_feature (1)..(265): Homolog of NCBI NO: 4689380 NR Description: LHCII type III chlorophyll a/b binding protein
  misc_feature (1)..(265): Homolog of NCBI NO: 15239602 NR Description: light-harvesting chlorophyll a/b binding protein,
MASTFTSSSSVLTPTTFLGQTKASSFNPLRDVVSLGSPKYTMGNDLWYGPDRVKYLGPFSVQTPSYLTGEFPGDYGWDTAGLSADPEAFAKNRALEVIHGRWAMLGAFGCITPEVLQKWVRVDFKEPVWFKAGSQIFSEGGLDYLGNPNLVHAQSILAVLGFQVILMGLVEGFRINGLDGVGEGNDLYPGGQYFDPLGLADDPVTFAELKVKEIKNGRLAMFSMFGFFVQAIVTGKGPLENLLDHLDNPVANNAWAFATKFAPGA

SEQ ID NO: 21704 - protein, 224 aa, Arabidopsis thaliana
  peptide (1)..(224): Ceres Seq. ID no. 12335107
  misc_feature (21)..(191): Pfam Name: Chlorophyll A-B binding protein Pfam Description: Chlorophyll A-B binding protein
  misc_feature (1)..(161): Homolog of NCBI NO: 7443221 NR Description: chlorophyll a/b-binding protein type III Lhcb3.1
  misc_feature (1)..(224): Homolog of NCBI NO: 34393384 NR Description: putative chlorophyll A-B binding protein of LHCII
  misc_feature (4)..(224): Homolog of NCBI NO: 405617 NR Description: LHCII Type III chlorophyll a/b binding protein
  misc_feature (1)..(224): Homolog of NCBI NO: 115793 NR Description: Chlorophyll A-B binding protein of LHCII type
  misc_feature (1)..(224): Homolog of NCBI NO: 7443222 NR Description: chlorophyll A/b-binding protein type III Lhcb3.2
  misc_feature (1)..(224): Homolog of NCBI NO: 115794 NR Description: Chlorophyll A-B binding protein 13, chloroplast
  misc_feature (1)..(224): Homolog of NCBI NO: 6644196 NR Description: chlorophyll a/b-binding protein [Daucus carota]
  misc_feature (1)..(224): Homolog of NCBI NO: 479406 NR Description: chlorophyll a/b-binding protein - garden pea
  misc_feature (1)..(224): Homolog of NCBI NO: 4689380 NR Description: LHCII type III chlorophyll a/b binding protein
  misc_feature (1)..(224): Homolog of NCBI NO: 15239602 NR Description: light-harvesting chlorophyll a/b binding protein,
MGNDLWYGPDRVKYLGPFSVQTPSYLTGEFPGDYGWDTAGLSADPEAFAKNRALEVIHGRWAMLGAFGCITPEVLQKWVRVDFKEPVWFKAGSQIFSEGGLDYLGNPNLVHAQSILAVLGFQVILMGLVEGFRINGLDGVGEGNDLYPGGQYFDPLGLADDPVTFAELKVKEIKNGRLAMFSMFGFFVQAIVTGKGPLENLLDHLDNPVANNAWAFATKFAPGA

SEQ ID NO: 21705 - DNA, 1215 bp, Arabidopsis thaliana
  misc_feature (1)..(1215): Ceres Seq. ID no. 12651614
  misc_feature: MA Experiment ID: 108434 Result: Down-regulated in Transcription
  misc_feature: MA Experiment 108434 PARAMETER Experiment Name: At_Root_Tips_cDNA_P Parameter: Tissue Value: Root Tips
  misc_feature: MA Experiment ID: 108461 Result: Up-regulated in Transcription
  misc_feature: MA Experiment 108461 PARAMETER Experiment Name: At_Germinating_Seeds_cDNA_P Parameter: Age (day) Value: 1 vs. 0
  misc_feature: MA Experiment 108461 PARAMETER Experiment Name: At_Germinating_Seeds_cDNA_P Parameter: Tissue Value: Germinating Seeds
  misc_feature: MA Experiment ID: 108462 Result: Up-regulated in Transcription
  misc_feature: MA Experiment 108462 PARAMETER Experiment Name: At_Germinating_Seeds_cDNA_P Parameter: Age (day) Value: 2 vs. 0
  misc_feature: MA Experiment 108462 PARAMETER Experiment Name: At_Germinating_Seeds_cDNA_P Parameter: Tissue Value: Germinating Seeds
  misc_feature: MA Experiment ID: 108463 Result: Up-regulated in Transcription
  misc_feature: MA Experiment 108463 PARAMETER Experiment Name: At_Germinating_Seeds_cDNA_P Parameter: Age (day) Value: 3 vs. 0
  misc_feature: MA Experiment 108463 PARAMETER Experiment Name: At_Germinating_Seeds_cDNA_P Parameter: Tissue Value: Germinating Seeds
  misc_feature: MA Experiment ID: 108464 Result: Up-regulated in Transcription
  misc_feature: MA Experiment 108464 PARAMETER Experiment Name: At_Germinating_Seeds_cDNA_P Parameter: Age (day) Value: 4 vs. 0
  misc_feature: MA Experiment 108464 PARAMETER Experiment Name: At_Germinating_Seeds_cDNA_P Parameter: Tissue Value: Germinating Seeds
  misc_feature: MA Experiment ID: 108605 Result: Down-regulated in Transcription
  misc_feature: MA Experiment 108605 PARAMETER Experiment Name: At_100uM_ABA_cDNA_P Parameter: Timepoint (hr) Value: 6
  misc_feature: MA Experiment 108605 PARAMETER Experiment Name: At_100uM_ABA_cDNA_P Parameter: Tissue Value: Aerial
  misc_feature: MA Experiment 108605 PARAMETER Experiment Name: At_100uM_ABA_cDNA_P Parameter: Treatment Value: 100uM ABA vs. No Treatment
  misc_feature: MA Experiment ID: 108607 Result: Down-regulated in Transcription
  misc_feature: MA Experiment 108607 PARAMETER Experiment Name: At_100uM_ABA_cDNA_P Parameter: Timepoint (hr) Value: 4
  misc_feature: MA Experiment 108607 PARAMETER Experiment Name: At_100uM_ABA_cDNA_P Parameter: Tissue Value: Aerial
  misc_feature: MA Experiment 108607 PARAMETER Experiment Name: At_100uM_ABA_cDNA_P Parameter: Treatment Value: 100uM ABA vs. No Treatment
  misc_feature: MA Experiment ID: 20000071 Result: Down-regulated in Transcription
  misc_feature: MA Experiment 20000071 PARAMETER Experiment Name: At_100uM_ABA_Mutants_cDNA_P Parameter: Plant Line Value: CS8104
  misc_feature: MA Experiment 20000071 PARAMETER Experiment Name: At_100uM_ABA_Mutants_cDNA_P Parameter: Timepoint (hr) Value: 6
  misc_feature: MA Experiment 20000071 PARAMETER Experiment Name: At_100uM_ABA_Mutants_cDNA_P Parameter: Tissue Value: Aerial
  misc_feature: MA Experiment 20000071 PARAMETER Experiment Name: At_100uM_ABA_Mutants_cDNA_P Parameter: Treatment Value: 100uM ABA vs. No Treatment
  misc_feature: MA Experiment ID: 20000117 Result: Down-regulated in Transcription
  misc_feature: MA Experiment 20000117 PARAMETER Experiment Name: At_100uM_ABA_Mutants_cDNA_P Parameter: Plant Line Value: Columbia
  misc_feature: MA Experiment 20000117 PARAMETER Experiment Name: At_100uM_ABA_Mutants_cDNA_P Parameter: Timepoint (hr) Value: 6
  misc_feature: MA Experiment 20000117 PARAMETER Experiment Name: At_100uM_ABA_Mutants_cDNA_P Parameter: Tissue Value: Aerial
  misc_feature: MA Experiment 20000117 PARAMETER Experiment Name: At_100uM_ABA_Mutants_cDNA_P Parameter: Treatment Value: 100uM ABA vs. No Treatment
  misc_feature: MA Experiment ID: 20000169 Result: Down-regulated in Transcription
  misc_feature: MA Experiment 20000169 PARAMETER Experiment Name: At_100uM_ABA_P Parameter: Age (day) Value: 14
  misc_feature: MA Experiment 20000169 PARAMETER Experiment Name: At_100uM_ABA_P Parameter: Organism Value: A. thaliana
  misc_feature: MA Experiment 20000169 PARAMETER Experiment Name: At_100uM_ABA_P Parameter: Plant Line Value: WS
  misc_feature: MA Experiment 20000169 PARAMETER Experiment Name: At_100uM_ABA_P Parameter: Timepoint (hr) Value: 6
  misc_feature: MA Experiment 20000169 PARAMETER Experiment Name: At_100uM_ABA_P Parameter: Tissue Value: Aerial
  misc_feature: MA Experiment 20000169 PARAMETER Experiment Name: At_100uM_ABA_P Parameter: Treatment Value: 100uM ABA vs. No Treatment
  misc_feature: MA Experiment ID: 20000180 Result: Up-regulated in Transcription
  misc_feature: MA Experiment 20000180 PARAMETER Experiment Name: At_Germinating_Seeds_P Parameter: Age (hr) Value: 24 vs. 0
  misc_feature: MA Experiment 20000180 PARAMETER Experiment Name: At_Germinating_Seeds_P Parameter: Tissue Value: Germinating Seeds
  misc_feature: MA Experiment ID: 20000224 Result: Up-regulated in Transcription
  misc_feature: MA Experiment ID: 20000264 Result: Up-regulated in Transcription
  misc_feature: MA Experiment 20000264 PARAMETER Experiment Name: At_Open_Flower_P Parameter: Age (day) Value: 21
  misc_feature: MA Experiment 20000264 PARAMETER Experiment Name: At_Open_Flower_P Parameter: Plant Line Value: WS
  misc_feature: MA Experiment 20000264 PARAMETER Experiment Name: At_Open_Flower_P Parameter: Tissue Value: Open Flower vs. Whole Plant
  misc_feature: MA Experiment ID: 20000267 Result: Down-regulated in Transcription
  misc_feature: MA Experiment 20000267 PARAMETER Experiment Name: At_Drought_P Parameter: Age (day) Value: 7
  misc_feature: MA Experiment 20000267 PARAMETER Experiment Name: At_Drought_P Parameter: Organism Value: A. thaliana
  misc_feature: MA Experiment 20000267 PARAMETER Experiment Name: At_Drought_P Parameter: Plant Line Value: WS
  misc_feature: MA Experiment 20000267 PARAMETER Experiment Name: At_Drought_P Parameter: Timepoint (hr) Value: 6
  misc_feature: MA Experiment 20000267 PARAMETER Experiment Name: At_Drought_P Parameter: Tissue Value: Whole Plant
  misc_feature: MA Experiment 20000267 PARAMETER Experiment Name: At_Drought_P Parameter: Treatment Value: Drought vs. No Drought
  misc_feature: MA Experiment ID: 20000436 Result: Down-regulated in Transcription
  misc_feature: MA Experiment 20000436 PARAMETER Experiment Name: At_Drought_P Parameter: Age (day) Value: 7
  misc_feature: MA Experiment 20000436 PARAMETER Experiment Name: At_Drought_P Parameter: Organism Value: A. thaliana
  misc_feature: MA Experiment 20000436 PARAMETER Experiment Name: At_Drought_P Parameter: Plant Line Value: WS
  misc_feature: MA Experiment 20000436 PARAMETER Experiment Name: At_Drought_P Parameter: Timepoint (hr) Value: 12
  misc_feature: MA Experiment 20000436 PARAMETER Experiment Name: At_Drought_P Parameter: Tissue Value: Whole Plant
  misc_feature: MA Experiment 20000436 PARAMETER Experiment Name: At_Drought_P Parameter: Treatment Value: Drought vs. No Drought
  misc_feature: MA Experiment ID: 20000437 Result: Down-regulated in Transcription
  misc_feature: MA Experiment 20000437 PARAMETER Experiment Name: At_Drought_P Parameter: Age (day) Value: 8
  misc_feature: MA Experiment 20000437 PARAMETER Experiment Name: At_Drought_P Parameter: Organism Value: A. thaliana
  misc_feature: MA Experiment 20000437 PARAMETER Experiment Name: At_Drought_P Parameter: Plant Line Value: WS
  misc_feature: MA Experiment 20000437 PARAMETER Experiment Name: At_Drought_P Parameter: Timepoint (hr) Value: 24
  misc_feature: MA Experiment 20000437 PARAMETER Experiment Name: At_Drought_P Parameter: Tissue Value: Whole Plant
  misc_feature: MA Experiment 20000437 PARAMETER Experiment Name: At_Drought_P Parameter: Treatment Value: Drought vs. No Drought
  misc_feature: MA Experiment ID: 20000438 Result: Up-regulated in Transcription
  misc_feature: MA Experiment 20000438 PARAMETER Experiment Name: At_Shoots__P Parameter: Age (day) Value: 14
  misc_feature: MA Experiment 20000438 PARAMETER Experiment Name: At_Shoots__P Parameter: Tissue Value: Shoots vs. Whole Plant
  misc_feature: MA Experiment ID: 20000441 Result: Up-regulated in Transcription
  misc_feature: MA Experiment 20000441 PARAMETER Experiment Name: At_1uM_BR-BRZ__P Parameter: Tissue Value: Shoot Apices
  misc_feature: MA Experiment 20000441 PARAMETER Experiment Name: At_1uM_BR-BRZ__P Parameter: Treatment Value: 1uM BR vs. No Treatment
  misc_feature: MA Experiment ID: 20000443 Result: Up-regulated in Transcription
  misc_feature: MA Experiment 20000443 PARAMETER Experiment Name: At_1uM_BR-BRZ__P Parameter: Tissue Value: Shoot Apices
  misc_feature: MA Experiment 20000443 PARAMETER Experiment Name: At_1uM_BR-BRZ__P Parameter: Treatment Value: 1uM BRZ vs. No Treatment
  misc_feature: MA Experiment ID: 20000496 Result: Down-regulated in Transcription
  misc_feature: MA Experiment 20000496 PARAMETER Experiment Name: At_Guard_Cells_P Parameter: Harvest Date Value: 7/19/2002
  misc_feature: MA Experiment 20000496 PARAMETER Experiment Name: At_Guard_Cells_P Parameter: Organism Value: Canola
  misc_feature: MA Experiment 20000496 PARAMETER Experiment Name: At_Guard_Cells_P Parameter: Tissue Value: Guard Cells vs. Leaves
  misc_feature: MA Experiment ID: 20000794 Result: Up-regulated in Transcription
  misc_feature: MA Experiment 20000794 PARAMETER Experiment Name: At_Petals_P Parameter: Age (day) Value: 23-25 days
  misc_feature: MA Experiment 20000794 PARAMETER Experiment Name: At_Petals_P Parameter: Plant Line Value: WS
  misc_feature: MA Experiment 20000794 PARAMETER Experiment Name: At_Petals_P Parameter: Tissue Value: Petals vs. Whole plant
  misc_feature: MA Experiment ID: 20001451 Result: Down-regulated in Transcription
  misc_feature: MA Experiment 20001451 PARAMETER Experiment Name: At_Far-red-induction_P Parameter: Age (day) Value: 7
  misc_feature: MA Experiment 20001451 PARAMETER Experiment Name: At_Far-red-induction_P Parameter: Light Value: Far-red vs. White
  misc_feature: MA Experiment 20001451 PARAMETER Experiment Name: At_Far-red-induction_P Parameter: Organism Value: A. thaliana
  misc_feature: MA Experiment 20001451 PARAMETER Experiment Name: At_Far-red-induction_P Parameter: Plant Line Value: Columbia
  misc_feature: MA Experiment 20001451 PARAMETER Experiment Name: At_Far-red-induction_P Parameter: Timepoint (hr) Value: 24
  misc_feature: MA Experiment 20001451 PARAMETER Experiment Name: At_Far-red-induction_P Parameter: Tissue Value: Whole Plant
  misc_feature: MA Experiment ID: 20001554 Result: Down-regulated in Transcription
  misc_feature: MA Experiment 20001554 PARAMETER Experiment Name: At_Drought_Soil_Dry_P Parameter: Age (day) Value: 21
  misc_feature: MA Experiment 20001554 PARAMETER Experiment Name: At_Drought_Soil_Dry_P Parameter: Organism Value: A. thaliana
  misc_feature: MA Experiment 20001554 PARAMETER Experiment Name: At_Drought_Soil_Dry_P Parameter: Plant Line Value: WS
  misc_feature: MA Experiment 20001554 PARAMETER Experiment Name: At_Drought_Soil_Dry_P Parameter: Post Timepoint (hr) Value: None
  misc_feature: MA Experiment 20001554 PARAMETER Experiment Name: At_Drought_Soil_Dry_P Parameter: Post-Treatment Value: None
  misc_feature: MA Experiment 20001554 PARAMETER Experiment Name: At_Drought_Soil_Dry_P Parameter: Timepoint (day) Value: 7
  misc_feature: MA Experiment 20001554 PARAMETER Experiment Name: At_Drought_Soil_Dry_P Parameter: Treatment Value: Drought vs. No Drought
  misc_feature: MA Experiment ID: 20001555 Result: Down-regulated in Transcription
  misc_feature: MA Experiment 20001555 PARAMETER Experiment Name: At_Drought_Soil_Dry_P Parameter: Age (day) Value: 24
  misc_feature: MA Experiment 20001555 PARAMETER Experiment Name: At_Drought_Soil_Dry_P Parameter: Organism Value: A. thaliana
  misc_feature: MA Experiment 20001555 PARAMETER Experiment Name: At_Drought_Soil_Dry_P Parameter: Plant Line Value: WS
  misc_feature: MA Experiment 20001555 PARAMETER Experiment Name: At_Drought_Soil_Dry_P Parameter: Post Timepoint (hr) Value: None
  misc_feature: MA Experiment 20001555 PARAMETER Experiment Name: At_Drought_Soil_Dry_P Parameter: Post-Treatment Value: None
  misc_feature: MA Experiment 20001555 PARAMETER Experiment Name: At_Drought_Soil_Dry_P Parameter: Timepoint (day) Value: 10
  misc_feature: MA Experiment 20001555 PARAMETER Experiment Name: At_Drought_Soil_Dry_P Parameter: Treatment Value: Drought vs. No Drought
  misc_feature: MA Experiment ID: 20001556 Result: Down-regulated in Transcription
  misc_feature: MA Experiment 20001556 PARAMETER Experiment Name: At_Drought_Soil_Dry_P Parameter: Age (day) Value: 26
  misc_feature: MA Experiment 20001556 PARAMETER Experiment Name: At_Drought_Soil_Dry_P Parameter: Organism Value: A. thaliana
  misc_feature: MA Experiment 20001556 PARAMETER Experiment Name: At_Drought_Soil_Dry_P Parameter: Plant Line Value: WS
  misc_feature: MA Experiment 20001556 PARAMETER Experiment Name: At_Drought_Soil_Dry_P Parameter: Post Timepoint (hr) Value: None
  misc_feature: MA Experiment 20001556 PARAMETER Experiment Name: At_Drought_Soil_Dry_P Parameter: Post-Treatment Value: None
  misc_feature: MA Experiment 20001556 PARAMETER Experiment Name: At_Drought_Soil_Dry_P Parameter: Timepoint (day) Value: 12
  misc_feature: MA Experiment 20001556 PARAMETER Experiment Name: At_Drought_Soil_Dry_P Parameter: Treatment Value: Drought vs. No Drought
  misc_feature: MA Experiment ID: 20001559 Result: Down-regulated in Transcription
  misc_feature: MA Experiment 20001559 PARAMETER Experiment Name: At_Drought_Soil_Dry_P Parameter: Age (day) Value: 28
  misc_feature: MA Experiment 20001559 PARAMETER Experiment Name: At_Drought_Soil_Dry_P Parameter: Organism Value: A. thaliana
  misc_feature: MA Experiment 20001559 PARAMETER Experiment Name: At_Drought_Soil_Dry_P Parameter: Plant Line Value: WS
  misc_feature: MA Experiment 20001559 PARAMETER Experiment Name: At_Drought_Soil_Dry_P Parameter: Post Timepoint (hr) Value: 29
  misc_feature: MA Experiment 20001559 PARAMETER Experiment Name: At_Drought_Soil_Dry_P Parameter: Post-Treatment Value: Re-Water vs. No Drought
  misc_feature: MA Experiment 20001559 PARAMETER Experiment Name: At_Drought_Soil_Dry_P Parameter: Timepoint (day) Value: 14
  misc_feature: MA Experiment 20001559 PARAMETER Experiment Name: At_Drought_Soil_Dry_P Parameter: Treatment Value: Drought vs. No Drought
  misc_feature: MA Experiment ID: 20001771 Result: Up-regulated in Transcription
  misc_feature: MA Experiment 20001771 PARAMETER Experiment Name: At_Far-red-enriched-adult_P Parameter: Age (day) Value: 28
  misc_feature: MA Experiment 20001771 PARAMETER Experiment Name: At_Far-red-enriched-adult_P Parameter: Light Value: Far-red enriched vs. White
  misc_feature: MA Experiment 20001771 PARAMETER Experiment Name: At_Far-red-enriched-adult_P Parameter: Organism Value: A. thaliana
  misc_feature: MA Experiment 20001771 PARAMETER Experiment Name: At_Far-red-enriched-adult_P Parameter: Plant Line Value: Columbia
  misc_feature: MA Experiment 20001771 PARAMETER Experiment Name: At_Far-red-enriched-adult_P Parameter: Timepoint (hr) Value: 16
  misc_feature: MA Experiment 20001771 PARAMETER Experiment Name: At_Far-red-enriched-adult_P Parameter: Tissue Value: Aerial
  misc_feature: MA Experiment ID: 20001905 Result: Up-regulated in Transcription
  misc_feature: MA Experiment 20001905 PARAMETER Experiment Name: At_Drought_Reproduction_P Parameter: Age (day) Value: 40
  misc_feature: MA Experiment 20001905 PARAMETER Experiment Name: At_Drought_Reproduction_P Parameter: Organism Value: A. thaliana
  misc_feature: MA Experiment 20001905 PARAMETER Experiment Name: At_Drought_Reproduction_P Parameter: Plant Line Value: WS
  misc_feature: MA Experiment 20001905 PARAMETER Experiment Name: At_Drought_Reproduction_P Parameter: Timepoint (day) Value: 10
  misc_feature: MA Experiment 20001905 PARAMETER Experiment Name: At_Drought_Reproduction_P Parameter: Tissue Value: Rosettes
  misc_feature: MA Experiment 20001905 PARAMETER Experiment Name: At_Drought_Reproduction_P Parameter: Treatment Value: Drought vs. No Drought
  misc_feature: MA Experiment ID: 20001911 Result: Down-regulated in Transcription
  misc_feature: MA Experiment 20001911 PARAMETER Experiment Name: At_Drought_Reproduction_P Parameter: Age (day) Value: 40
  misc_feature: MA Experiment 20001911 PARAMETER Experiment Name: At_Drought_Reproduction_P Parameter: Organism Value: A. thaliana
  misc_feature: MA Experiment 20001911 PARAMETER Experiment Name: At_Drought_Reproduction_P Parameter: Plant Line Value: WS
  misc_feature: MA Experiment 20001911 PARAMETER Experiment Name: At_Drought_Reproduction_P Parameter: Timepoint (day) Value: 10
  misc_feature: MA Experiment 20001911 PARAMETER Experiment Name: At_Drought_Reproduction_P Parameter: Tissue Value: Flowers
  misc_feature: MA Experiment 20001911 PARAMETER Experiment Name: At_Drought_Reproduction_P Parameter: Treatment Value: Drought vs. No Drought
acatcaaagcaattaacaaatacacaacttgtaacttcaaatagattactttcaaagaagagagagagaaagaaagatggagaagaacatgaagtttccagtagtagacttgtccaagctcaatggggaagagagagaccaaaccatggctctaatcaatgaagcttgtgagaattggggcttctttgagatagtgaaccatggattaccacatgacttaatggacaagatcgagaagatgacaaaggaccattacaagacatgccaagaacaaaagttcaatgacatgctcaagtccaaaggtttggataatcttgagacagaagtcgaagatgtcgattgggaaagcactttctacgttcgtcacctccctcaatccaatctcaatgacatttcagatgtgtctgatgaatacaggacggccatgaaagactttggtaagagactggagaatcttgctgaggatttgttggatctactgtgtgagaatctagggttagagaaagggtatttgaagaaagtgtttcatggaacaaaaggcccaacctttgggacaaaggtgagcaattatccaccatgtcctaaaccagagatgatcaaaggtcttagggcccacactgatgcaggaggcatcatcttgttgtttcaagacgacaaggtcagtggtctccagcttcttaaagatggtgactggattgatgttcctcctctcaaccactctattgtcatcaatcttggtgaccaacttgaggtgataaccaacgggaagtataagagtgtgctgcaccgtgtggtgactcaacaagaaggaaacaggatgtcggttgcatcgttttacaacccgggaagcgatgcggagatctcaccagctacttcgcttgtcgagaaagattccgagtacccgagtttcgtctttgatgactacatgaagctttatgcaggggtcaagtttcagcccaaggagccacggttcgcagcaatgaagaatgcttctgcagttacagaactgaatcctacagcagccgtagagactttctaaaaatggatttgagattcaagtgaagcagagaaagaaagatgagtttgtgttgtgtgttatggcaataagttaaaacttgtattagtgttgattaattgttggtcaattggtgtgttttaaagtgtggggtgtttatgtttatggaagatgataataattataaaaatctaaattct

SEQ ID NO: 21706 - protein, 320 aa, Arabidopsis thaliana
  peptide (1)..(320): Ceres Seq. ID no. 12651615
  misc_feature (156)..(256): Pfam Name: 2OG-Fe(II) oxygenase superfamily Pfam Description: 2OG-Fe(II) oxygenase superfamily
  misc_feature (7)..(315): Homolog of NCBI NO: 18496053 NR Description: ACC oxidase 1 [Fagus sylvatica]
  misc_feature (1)..(320): Homolog of NCBI NO: 14148975 NR Description: ACC oxidase [Brassica rapa subsp. rapa]
  misc_feature (1)..(320): Homolog of NCBI NO: 7433194 NR Description: probable 1-aminocyclopropane-1-carboxylate
  misc_feature (1)..(320): Homolog of NCBI NO: 15221170 NR Description: putative amino-cyclopropane-carboxylic acid
  misc_feature (1)..(320): Homolog of NCBI NO: 7433206 NR Description: probable 1-aminocyclopropane-1-carboxylate
  misc_feature (1)..(320): Homolog of NCBI NO: 7638440 NR Description: 1-aminocyclopropane-1-carboxylate oxidase
  misc_feature (1)..(320): Homolog of NCBI NO: 728780 NR Description: 1-aminocyclopropane-1-carboxylate oxidase (ACC
  misc_feature (1)..(320): Homolog of NCBI NO: 587086 NR Description: ACC oxidase [Brassica oleracea]
  misc_feature (1)..(320): Homolog of NCBI NO: 25285704 NR Description: 1-aminocyclopropane-1-carboxylate oxidase (EC
  misc_feature (1)..(320): Homolog of NCBI NO: 15220770 NR Description: ACC oxidase, putative
MEKNMKFPVVDLSKLNGEERDQTMALINEACENWGFFEIVNHGLPHDLMDKIEKMTKDHYKTCQEQKFNDMLKSKGLDNLETEVEDVDWESTFYVRHLPQSNLNDISDVSDEYRTAMKDFGKRLENLAEDLLDLLCENLGLEKGYLKKVFHGTKGPTFGTKVSNYPPCPKPEMIKGLRAHTDAGGIILLFQDDKVSGLQLLKDGDWIDVPPLNHSIVINLGDQLEVITNGKYKSVLHRVVTQQEGNRMSVASFYNPGSDAEISPATSLVEKDSEYPSFVFDDYMKLYAGVKFQPKEPRFAAMKNASAVTELNPTAAVETF

SEQ ID NO: 21707 - protein, 316 aa, Arabidopsis thaliana
  peptide (1)..(316): Ceres Seq. ID no. 12651616
  misc_feature (152)..(252): Pfam Name: 2OG-Fe(II) oxygenase superfamily Pfam Description: 2OG-Fe(II) oxygenase superfamily
  misc_feature (3)..(311): Homolog of NCBI NO: 18496053 NR Description: ACC oxidase 1 [Fagus sylvatica]
  misc_feature (1)..(316): Homolog of NCBI NO: 14148975 NR Description: ACC oxidase [Brassica rapa subsp. rapa]
  misc_feature (1)..(316): Homolog of NCBI NO: 7433194 NR Description: probable 1-aminocyclopropane-1-carboxylate
  misc_feature (1)..(316): Homolog of NCBI NO: 15221170 NR Description: putative amino-cyclopropane-carboxylic acid
  misc_feature (1)..(316): Homolog of NCBI NO: 7433206 NR Description: probable 1-aminocyclopropane-1-carboxylate
  misc_feature (1)..(316): Homolog of NCBI NO: 7638440 NR Description: 1-aminocyclopropane-1-carboxylate oxidase
  misc_feature (1)..(316): Homolog of NCBI NO: 728780 NR Description: 1-aminocyclopropane-1-carboxylate oxidase (ACC
  misc_feature (1)..(316): Homolog of NCBI NO: 587086 NR Description: ACC oxidase [Brassica oleracea]
  misc_feature (1)..(316): Homolog of NCBI NO: 25285704 NR Description: 1-aminocyclopropane-1-carboxylate oxidase (EC
  misc_feature (1)..(316): Homolog of NCBI NO: 15220770 NR Description: ACC oxidase, putative
MKFPVVDLSKLNGEERDQTMALINEACENWGFFEIVNHGLPHDLMDKIEKMTKDHYKTCQEQKFNDMLKSKGLDNLETEVEDVDWESTFYVRHLPQSNLNDISDVSDEYRTAMKDFGKRLENLAEDLLDLLCENLGLEKGYLKKVFHGTKGPTFGTKVSNYPPCPKPEMIKGLRAHTDAGGIILLFQDDKVSGLQLLKDGDWIDVPPLNHSIVINLGDQLEVITNGKYKSVLHRVVTQQEGNRMSVASFYNPGSDAEISPATSLVEKDSEYPSFVFDDYMKLYAGVKFQPKEPRFAAMKNASAVTELNPTAAVETF

SEQ ID NO: 21708 - protein, 297 aa, Arabidopsis thaliana
  peptide (1)..(297): Ceres Seq. ID no. 12651617
  misc_feature (133)..(233): Pfam Name: 2OG-Fe(II) oxygenase superfamily Pfam Description: 2OG-Fe(II) oxygenase superfamily
  misc_feature (1)..(292): Homolog of NCBI NO: 18496053 NR Description: ACC oxidase 1 [Fagus sylvatica]
  misc_feature (1)..(297): Homolog of NCBI NO: 14148975 NR Description: ACC oxidase [Brassica rapa subsp. rapa]
  misc_feature (1)..(297): Homolog of NCBI NO: 7433194 NR Description: probable 1-aminocyclopropane-1-carboxylate
  misc_feature (1)..(297): Homolog of NCBI NO: 15221170 NR Description: putative amino-cyclopropane-carboxylic acid
  misc_feature (1)..(297): Homolog of NCBI NO: 7433206 NR Description: probable 1-aminocyclopropane-1-carboxylate
  misc_feature (1)..(297): Homolog of NCBI NO: 7638440 NR Description: 1-aminocyclopropane-1-carboxylate oxidase
  misc_feature (1)..(297): Homolog of NCBI NO: 728780 NR Description: 1-aminocyclopropane-1-carboxylate oxidase (ACC
  misc_feature (1)..(297): Homolog of NCBI NO: 587086 NR Description: ACC oxidase [Brassica oleracea]
  misc_feature (1)..(297): Homolog of NCBI NO: 25285704 NR Description: 1-aminocyclopropane-1-carboxylate oxidase (EC
  misc_feature (1)..(297): Homolog of NCBI NO: 15220770 NR Description: ACC oxidase, putative
MALINEACENWGFFEIVNHGLPHDLMDKIEKMTKDHYKTCQEQKFNDMLKSKGLDNLETEVEDVDWESTFYVRHLPQSNLNDISDVSDEYRTAMKDFGKRLENLAEDLLDLLCENLGLEKGYLKKVFHGTKGPTFGTKVSNYPPCPKPEMIKGLRAHTDAGGIILLFQDDKVSGLQLLKDGDWIDVPPLNHSIVINLGDQLEVITNGKYKSVLHRVVTQQEGNRMSVASFYNPGSDAEISPATSLVEKDSEYPSFVFDDYMKLYAGVKFQPKEPRFAAMKNASAVTELNPTAAVETF

SEQ ID NO: 21709 - DNA, 617 bp, Arabidopsis thaliana
  misc_feature (1)..(617): Ceres Seq. ID no. 12321434
  misc_feature: MA Experiment ID: 20000179 Result: Up-regulated in Transcription
  misc_feature: MA Experiment 20000179 PARAMETER Experiment Name: At_Germinating_Seeds_P Parameter: Age (hr) Value: 6 vs. 0
  misc_feature: MA Experiment 20000179 PARAMETER Experiment Name: At_Germinating_Seeds_P Parameter: Tissue Value: Germinating Seeds
gtcttctgctgatttctgagcttcggagctatcgaaaattctgaatctgaaaggtttgagtgaagatgtcttcagatcggaaggttctaagttttgaagaagtttcaaagcacaacaaaactaaggattgttggcttattatttccggcaaggtgtatgatgtgactccattcatggatgatcatcctggaggcgatgaagtcttgttgtcctcaacagggaaagatgctacaaatgattttgaagacgttggtcacagcgacactgcaagggacatgatggacaaatatttcattggtgagattgattcgtctagtgttccagcaactaggacatacgttgcaccacagcaaccagcctacaaccaagacaagacaccagaattcattatcaagattcttcagttccttgttccgatcttgatcttgggattggctcttgtcgtccgtcactataccaagaaagactagaagaagccaaaggcttgctttgatgcttgtcattgaatatctctaccgatctctgtctatctctcttgcgaaaaaaagtactgttactgttgtttggtcttagactgattcttgttgaaattacgaaccaaaaatcattgtgttgct

SEQ ID NO: 21710 - protein, 134 aa, Arabidopsis thaliana
  peptide (1)..(134): Ceres Seq. ID no. 12321435
  misc_feature (7)..(81): Pfam Name: Cytochrome b5-like Heme/Steroid binding domain Pfam Description: Cytochrome b5-like Heme/Steroid binding domain
  misc_feature (1)..(133): Homolog of NCBI NO: 1345882 NR Description: CYTOCHROME B5
  misc_feature (1)..(133): Homolog of NCBI NO: 1076621 NR Description: cytochrome b5 - common tobacco
  misc_feature (3)..(134): Homolog of NCBI NO: 34905998 NR Description: putative cytochrome B5 [Oryza sativa (japonica
  misc_feature (1)..(134): Homolog of NCBI NO: 37536104 NR Description: putative cytochrome [Oryza sativa (japonica
  misc_feature (1)..(134): Homolog of NCBI NO: 1345881 NR Description: Cytochrome b5
  misc_feature (1)..(134): Homolog of NCBI NO: 14719320 NR Description: cytochrome B5 [Oryza sativa]
  misc_feature (1)..(134): Homolog of NCBI NO: 25044825 NR Description: cytochrome b5 [Ananas comosus]
  misc_feature (1)..(133): Homolog of NCBI NO: 2695711 NR Description: cytochome b5 [Olea europaea]
  misc_feature (1)..(134): Homolog of NCBI NO: 729252 NR Description: Cytochrome B5
  misc_feature (1)..(134): Homolog of NCBI NO: 15238776 NR Description: cytochrome b5 (dbj|BAA74839.1)
MSSDRKVLSFEEVSKHNKTKDCWLIISGKVYDVTPFMDDHPGGDEVLLSSTGKDATNDFEDVGHSDTARDMMDKYFIGEIDSSSVPATRTYVAPQQPAYNQDKTPEFIIKILQFLVPILILGLALVVRHYTKKD

SEQ ID NO: 21711 - protein, 98 aa, Arabidopsis thaliana
  peptide (1)..(98): Ceres Seq. ID no. 12321436
  misc_feature (1)..(97): Homolog of NCBI NO: 1345882 NR Description: CYTOCHROME B5
  misc_feature (1)..(97): Homolog of NCBI NO: 1076621 NR Description: cytochrome b5 - common tobacco
  misc_feature (1)..(98): Homolog of NCBI NO: 34905998 NR Description: putative cytochrome B5 [Oryza sativa (japonica
  misc_feature (1)..(98): Homolog of NCBI NO: 37536104 NR Description: putative cytochrome [Oryza sativa (japonica
  misc_feature (1)..(98): Homolog of NCBI NO: 1345881 NR Description: Cytochrome b5
  misc_feature (1)..(98): Homolog of NCBI NO: 14719320 NR Description: cytochrome B5 [Oryza sativa]
  misc_feature (1)..(98): Homolog of NCBI NO: 25044825 NR Description: cytochrome b5 [Ananas comosus]
  misc_feature (1)..(97): Homolog of NCBI NO: 2695711 NR Description: cytochome b5 [Olea europaea]
  misc_feature (1)..(98): Homolog of NCBI NO: 729252 NR Description: Cytochrome B5
  misc_feature (1)..(98): Homolog of NCBI NO: 15238776 NR Description: cytochrome b5 (dbj|BAA74839.1)
MDDHPGGDEVLLSSTGKDATNDFEDVGHSDTARDMMDKYFIGEIDSSSVPATRTYVAPQQPAYNQDKTPEFIIKILQFLVPILILGLALVVRHYTKKD

SEQ ID NO: 21712 - DNA, 839 bp, Arabidopsis thaliana
  misc_feature (1)..(839): Ceres Seq. ID no. 12385067
  misc_feature: MA Experiment ID: 108434 Result: Down-regulated in Transcription
  misc_feature: MA Experiment 108434 PARAMETER Experiment Name: At_Root_Tips_cDNA_P Parameter: Tissue Value: Root Tips
  misc_feature: MA Experiment ID: 108462 Result: Up-regulated in Transcription
  misc_feature: MA Experiment 108462 PARAMETER Experiment Name: At_Germinating_Seeds_cDNA_P Parameter: Age (day) Value: 2 vs. 0
  misc_feature: MA Experiment 108462 PARAMETER Experiment Name: At_Germinating_Seeds_cDNA_P Parameter: Tissue Value: Germinating Seeds
  misc_feature: MA Experiment ID: 108463 Result: Up-regulated in Transcription
  misc_feature: MA Experiment 108463 PARAMETER Experiment Name: At_Germinating_Seeds_cDNA_P Parameter: Age (day) Value: 3 vs. 0
  misc_feature: MA Experiment 108463 PARAMETER Experiment Name: At_Germinating_Seeds_cDNA_P Parameter: Tissue Value: Germinating Seeds
  misc_feature: MA Experiment ID: 108464 Result: Up-regulated in Transcription
  misc_feature: MA Experiment 108464 PARAMETER Experiment Name: At_Germinating_Seeds_cDNA_P Parameter: Age (day) Value: 4 vs. 0
  misc_feature: MA Experiment 108464 PARAMETER Experiment Name: At_Germinating_Seeds_cDNA_P Parameter: Tissue Value: Germinating Seeds
  misc_feature: MA Experiment ID: 108501 Result: Down-regulated in Transcription
  misc_feature: MA Experiment 108501 PARAMETER Experiment Name: At_ap2_floral_buds_cDNA_P Parameter: Plant Line Value: ap2 (Ler.)
  misc_feature: MA Experiment 108501 PARAMETER Experiment Name: At_ap2_floral_buds_cDNA_P Parameter: Tissue Value: Closed Flower
  misc_feature: MA Experiment ID: 108667 Result: Up-regulated in Transcription
  misc_feature: MA Experiment 108667 PARAMETER Experiment Name: At_2mM_SA_cDNA_P Parameter: Plant Line Value: WS
  misc_feature: MA Experiment 108667 PARAMETER Experiment Name: At_2mM_SA_cDNA_P Parameter: Timepoint (hr) Value: 1
  misc_feature: MA Experiment 108667 PARAMETER Experiment Name: At_2mM_SA_cDNA_P Parameter: Treatment Value: 2mM SA vs. No Treatment
  misc_feature: MA Experiment ID: 20000093 Result: Up-regulated in Transcription
  misc_feature: MA Experiment 20000093 PARAMETER Experiment Name: At_42deg_Heat_cDNA_P Parameter: Temperature (deg C) Value: 42 vs. 22
  misc_feature: MA Experiment 20000093 PARAMETER Experiment Name: At_42deg_Heat_cDNA_P Parameter: Timepoint (hr) Value: 0.5
  misc_feature: MA Experiment 20000093 PARAMETER Experiment Name: At_42deg_Heat_cDNA_P Parameter: Tissue Value: Aerial
  misc_feature: MA Experiment ID: 20000111 Result: Down-regulated in Transcription
  misc_feature: MA Experiment 20000111 PARAMETER Experiment Name: At_42deg_Heat_cDNA_P Parameter: Temperature (deg C) Value: 42 vs. 22
  misc_feature: MA Experiment 20000111 PARAMETER Experiment Name: At_42deg_Heat_cDNA_P Parameter: Timepoint (hr) Value: 6
  misc_feature: MA Experiment 20000111 PARAMETER Experiment Name: At_42deg_Heat_cDNA_P Parameter: Tissue Value: Aerial
  misc_feature: MA Experiment ID: 20000144 Result: Up-regulated in Transcription
  misc_feature: MA Experiment 20000144 PARAMETER Experiment Name: At_42deg_Heat_cDNA_P Parameter: Temperature (deg C) Value: 42 vs. 22
  misc_feature: MA Experiment 20000144 PARAMETER Experiment Name: At_42deg_Heat_cDNA_P Parameter: Timepoint (hr) Value: 1
  misc_feature: MA Experiment 20000144 PARAMETER Experiment Name: At_42deg_Heat_cDNA_P Parameter: Tissue Value: Aerial
  misc_feature: MA Experiment ID: 20000171 Result: Up-regulated in Transcription
  misc_feature: MA Experiment 20000171 PARAMETER Experiment Name: At_42deg_Heat_P Parameter: Age (day) Value: 14
  misc_feature: MA Experiment 20000171 PARAMETER Experiment Name: At_42deg_Heat_P Parameter: Organism Value: A. thaliana
  misc_feature: MA Experiment 20000171 PARAMETER Experiment Name: At_42deg_Heat_P Parameter: Plant Line Value: WS
  misc_feature: MA Experiment 20000171 PARAMETER Experiment Name: At_42deg_Heat_P Parameter: Temperature (deg C) Value: 42 vs. 22
  misc_feature: MA Experiment 20000171 PARAMETER Experiment Name: At_42deg_Heat_P Parameter: Timepoint (hr) Value: 1
  misc_feature: MA Experiment 20000171 PARAMETER Experiment Name: At_42deg_Heat_P Parameter: Tissue Value: Aerial
  misc_feature: MA Experiment ID: 20000173 Result: Down-regulated in Transcription
  misc_feature: MA Experiment 20000173 PARAMETER Experiment Name: At_42deg_Heat_P Parameter: Age (day) Value: 14
  misc_feature: MA Experiment 20000173 PARAMETER Experiment Name: At_42deg_Heat_P Parameter: Organism Value: A. thaliana
  misc_feature: MA Experiment 20000173 PARAMETER Experiment Name: At_42deg_Heat_P Parameter: Plant Line Value: WS
  misc_feature: MA Experiment 20000173 PARAMETER Experiment Name: At_42deg_Heat_P Parameter: Temperature (deg C) Value: 42 vs. 22
  misc_feature: MA Experiment 20000173 PARAMETER Experiment Name: At_42deg_Heat_P Parameter: Timepoint (hr) Value: 6
  misc_feature: MA Experiment 20000173 PARAMETER Experiment Name: At_42deg_Heat_P Parameter: Tissue Value: Aerial
  misc_feature: MA Experiment ID: 20000185 Result: Up-regulated in Transcription
  misc_feature: MA Experiment 20000185 PARAMETER Experiment Name: At_Roots__P Parameter: Age (day) Value: 7 vs. 21
  misc_feature: MA Experiment 20000185 PARAMETER Experiment Name: At_Roots__P Parameter: Organism Value: A. thaliana
  misc_feature: MA Experiment 20000185 PARAMETER Experiment Name: At_Roots__P Parameter: Tissue Value: Roots vs. Whole Plant
  misc_feature: MA Experiment ID: 20000224 Result: Down-regulated in Transcription
  misc_feature: MA Experiment ID: 20000227 Result: Down-regulated in Transcription
  misc_feature: MA Experiment 20000227 PARAMETER Experiment Name: At_Root-Tips-vs-Tops_P Parameter: Tissue Value: Root Tips vs. Root Tops
  misc_feature: MA Experiment ID: 20000265 Result: Down-regulated in Transcription
  misc_feature: MA Experiment 20000265 PARAMETER Experiment Name: At_Open_Flower_P Parameter: Age (day) Value: 21
  misc_feature: MA Experiment 20000265 PARAMETER Experiment Name: At_Open_Flower_P Parameter: Plant Line Value: WS
  misc_feature: MA Experiment 20000265 PARAMETER Experiment Name: At_Open_Flower_P Parameter: Tissue Value: Closed Flower vs. Whole Plant
  misc_feature: MA Experiment ID: 20000286 Result: Down-regulated in Transcription
  misc_feature: MA Experiment 20000286 PARAMETER Experiment Name: At_Open_Flower_P Parameter: Age (day) Value: 21
  misc_feature: MA Experiment 20000286 PARAMETER Experiment Name: At_Open_Flower_P Parameter: Plant Line Value: WS
  misc_feature: MA Experiment 20000286 PARAMETER Experiment Name: At_Open_Flower_P Parameter: Tissue Value: Half Open vs. Whole Plant
  misc_feature: MA Experiment ID: 20000438 Result: Down-regulated in Transcription
  misc_feature: MA Experiment 20000438 PARAMETER Experiment Name: At_Shoots__P Parameter: Age (day) Value: 14
  misc_feature: MA Experiment 20000438 PARAMETER Experiment Name: At_Shoots__P Parameter: Tissue Value: Shoots vs. Whole Plant
  misc_feature: MA Experiment ID: 20000439 Result: Up-regulated in Transcription
  misc_feature: MA Experiment 20000439 PARAMETER Experiment Name: At_Roots__P Parameter: Age (day) Value: 14 vs. 21
  misc_feature: MA Experiment 20000439 PARAMETER Experiment Name: At_Roots__P Parameter: Organism Value: A. thaliana
  misc_feature: MA Experiment 20000439 PARAMETER Experiment Name: At_Roots__P Parameter: Tissue Value: Roots vs. Whole Plant
  misc_feature: MA Experiment ID: 20000496 Result: Up-regulated in Transcription
  misc_feature: MA Experiment 20000496 PARAMETER Experiment Name: At_Guard_Cells_P Parameter: Harvest Date Value: 7/19/2002
  misc_feature: MA Experiment 20000496 PARAMETER Experiment Name: At_Guard_Cells_P Parameter: Organism Value: Canola
  misc_feature: MA Experiment 20000496 PARAMETER Experiment Name: At_Guard_Cells_P Parameter: Tissue Value: Guard Cells vs. Leaves
  misc_feature: MA Experiment ID: 20000527 Result: Down-regulated in Transcription
  misc_feature: MA Experiment 20000527 PARAMETER Experiment Name: At_10percent_PEG_P Parameter: Age (day) Value: 20
  misc_feature: MA Experiment 20000527 PARAMETER Experiment Name: At_10percent_PEG_P Parameter: Organism Value: A. thaliana
  misc_feature: MA Experiment 20000527 PARAMETER Experiment Name: At_10percent_PEG_P Parameter: Plant Line Value: WS
  misc_feature: MA Experiment 20000527 PARAMETER Experiment Name: At_10percent_PEG_P Parameter: Timepoint (day) Value: 20
  misc_feature: MA Experiment 20000527 PARAMETER Experiment Name: At_10percent_PEG_P Parameter: Tissue Value: Whole Plant
  misc_feature: MA Experiment 20000527 PARAMETER Experiment Name: At_10percent_PEG_P Parameter: Treatment Value: 10percent PEG vs. No Treatment
  misc_feature: MA Experiment ID: 20000794 Result: Down-regulated in Transcription
  misc_feature: MA Experiment 20000794 PARAMETER Experiment Name: At_Petals_P Parameter: Age (day) Value: 23-25 days
  misc_feature: MA Experiment 20000794 PARAMETER Experiment Name: At_Petals_P Parameter: Plant Line Value: WS
  misc_feature: MA Experiment 20000794 PARAMETER Experiment Name: At_Petals_P Parameter: Tissue Value: Petals vs. Whole plant
  misc_feature: MA Experiment ID: 20001247 Result: Up-regulated in Transcription
  misc_feature: MA Experiment 20001247 PARAMETER Experiment Name: At_Far-red-induction_P Parameter: Age (day) Value: 7
  misc_feature: MA Experiment 20001247 PARAMETER Experiment Name: At_Far-red-induction_P Parameter: Light Value: Far-red vs. White
  misc_feature: MA Experiment 20001247 PARAMETER Experiment Name: At_Far-red-induction_P Parameter: Organism Value: A. thaliana
  misc_feature: MA Experiment 20001247 PARAMETER Experiment Name: At_Far-red-induction_P Parameter: Plant Line Value: Columbia
  misc_feature: MA Experiment 20001247 PARAMETER Experiment Name: At_Far-red-induction_P Parameter: Timepoint (hr) Value: 1
  misc_feature: MA Experiment 20001247 PARAMETER Experiment Name: At_Far-red-induction_P Parameter: Tissue Value: Whole Plant
  misc_feature: MA Experiment ID: 20001248 Result: Up-regulated in Transcription
  misc_feature: MA Experiment 20001248 PARAMETER Experiment Name: At_Far-red-induction_P Parameter: Age (day) Value: 7
  misc_feature: MA Experiment 20001248 PARAMETER Experiment Name: At_Far-red-induction_P Parameter: Light Value: Far-red vs. White
  misc_feature: MA Experiment 20001248 PARAMETER Experiment Name: At_Far-red-induction_P Parameter: Organism Value: A. thaliana
  misc_feature: MA Experiment 20001248 PARAMETER Experiment Name: At_Far-red-induction_P Parameter: Plant Line Value: Columbia
  misc_feature: MA Experiment 20001248 PARAMETER Experiment Name: At_Far-red-induction_P Parameter: Timepoint (hr) Value: 4
  misc_feature: MA Experiment 20001248 PARAMETER Experiment Name: At_Far-red-induction_P Parameter: Tissue Value: Whole Plant
  misc_feature: MA Experiment ID: 20001451 Result: Up-regulated in Transcription
  misc_feature: MA Experiment 20001451 PARAMETER Experiment Name: At_Far-red-induction_P Parameter: Age (day) Value: 7
  misc_feature: MA Experiment 20001451 PARAMETER Experiment Name: At_Far-red-induction_P Parameter: Light Value: Far-red vs. White
  misc_feature: MA Experiment 20001451 PARAMETER Experiment Name: At_Far-red-induction_P Parameter: Organism Value: A. thaliana
  misc_feature: MA Experiment 20001451 PARAMETER Experiment Name: At_Far-red-induction_P Parameter: Plant Line Value: Columbia
  misc_feature: MA Experiment 20001451 PARAMETER Experiment Name: At_Far-red-induction_P Parameter: Timepoint (hr) Value: 24
  misc_feature: MA Experiment 20001451 PARAMETER Experiment Name: At_Far-red-induction_P Parameter: Tissue Value: Whole Plant
  misc_feature: MA Experiment ID: 20001757 Result: Up-regulated in Transcription
  misc_feature: MA Experiment 20001757 PARAMETER Experiment Name: At_50mM_NH4NO3_L-to-H_P Parameter: Timepoint (hr) Value: 6
  misc_feature: MA Experiment 20001757 PARAMETER Experiment Name: At_50mM_NH4NO3_L-to-H_P Parameter: Tissue Value: Leaf
  misc_feature: MA Experiment 20001757 PARAMETER Experiment Name: At_50mM_NH4NO3_L-to-H_P Parameter: Treatment Value: 50mM NH4NO3 vs 100mM Mannitol
  misc_feature: MA Experiment ID: 20001904 Result: Down-regulated in Transcription
  misc_feature: MA Experiment 20001904 PARAMETER Experiment Name: At_Drought_Reproduction_P Parameter: Age (day) Value: 37
  misc_feature: MA Experiment 20001904 PARAMETER Experiment Name: At_Drought_Reproduction_P Parameter: Organism Value: A. thaliana
  misc_feature: MA Experiment 20001904 PARAMETER Experiment Name: At_Drought_Reproduction_P Parameter: Plant Line Value: WS
  misc_feature: MA Experiment 20001904 PARAMETER Experiment Name: At_Drought_Reproduction_P Parameter: Timepoint (day) Value: 7
  misc_feature: MA Experiment 20001904 PARAMETER Experiment Name: At_Drought_Reproduction_P Parameter: Tissue Value: Rosettes
  misc_feature: MA Experiment 20001904 PARAMETER Experiment Name: At_Drought_Reproduction_P Parameter: Treatment Value: Drought vs. No Drought
atataagtctttctcactccttctctttcctttgtgattcatatccttcttcttctccaagaacctctctctctttctgcttctctatattttaacactttcttccgaatttgcccctcaagttttattttaattgctaaaatggctggaaccctagttaactccgccgggagattctcaccgggaaattgtattcttcctcaacagagaacagccagattctacagcggaaccgcgagatttcccaccggagctccttcgtttaaggcttcagctcagacgcttaacgccgagccagctgtaacggaatccgttcgtcggagagtttctagcctctacgaattactgaaagtgaatgaaacggcgtccttgacggagatcaagacggcgtaccggagcttagctaaagtatatcatccagatgcgtcggaatcggacggtcgagatttcatggagattcacaaagcttacgcgacacttgcggatccgactacaagagcgatttacgactcgacgcttagagtaccacggagacgggtacacgccggagcgatgggtcggtcggggcgggtttacgctacgacccggagatgggagacggatcagtgttggtgattttaggcttcctatgattttgcagcagcgaaagggcactttttgacttactttcccctttgattacgttttttttttccttgtcatatctttggaaaattaaggggaaattaagtttaatccgctctttttttttttttttgtttttcttttaacttaagcagttaacaatgtataaagaagttatgagtagagaaatgtatatgattttagttttctccttt

SEQ ID NO: 21713 - protein, 157 aa, Arabidopsis thaliana
  peptide (1)..(157): Ceres Seq. ID no. 12385068
  misc_feature (64)..(126): Pfam Name: DnaJ domain Pfam Description: DnaJ domain
  misc_feature (29)..(157): Homolog of NCBI NO: 15233446 NR Description: DnaJ-like protein; protein id: At4g36040.1
  misc_feature (29)..(157): Homolog of NCBI NO: 9843641 NR Description: J11 protein [Arabidopsis thaliana]
  misc_feature (64)..(126): Homolog of NCBI NO: 6691127 NR Description: DnaJ-like protein [Arabidopsis thaliana]
  misc_feature (64)..(128): Homolog of NCBI NO: 497646 NR Description: unknown
  misc_feature (64)..(127): Homolog of NCBI NO: 13507741 NR Description: similar to j-domain of DnaJ [Mycoplasma
  misc_feature (63)..(157): Homolog of NCBI NO: 15227919 NR Description: putative DnaJ protein
  misc_feature (64)..(126): Homolog of NCBI NO: 34894012 NR Description: P0672D08.16 [Oryza sativa (japonica
  misc_feature (64)..(128): Homolog of NCBI NO: 12044852 NR Description: dnaJ-like protein [Mycoplasma genitalium]
  misc_feature (6)..(157): Homolog of NCBI NO: 7488763 NR Description: DnaJ protein homolog - kidney bean (fragment)
  misc_feature (1)..(157): Homolog of NCBI NO: 15231204 NR Description: DnaJ protein, putative
MAGTLVNSAGRFSPGNCILPQQRTARFYSGTARFPTGAPSFKASAQTLNAEPAVTESVRRRVSSLYELLKVNETASLTEIKTAYRSLAKVYHPDASESDGRDFMEIHKAYATLADPTTRAIYDSTLRVPRRRVHAGAMGRSGRVYATTRRWETDQCW

SEQ ID NO: 21714 - protein, 79 aa, Arabidopsis thaliana
  peptide (1)..(79): Ceres Seq. ID no. 12385069
MRRNRTVEISWRFTKLTRHLRIRLQERFTTRRLEYHGDGYTPERWVGRGGFTLRPGDGRRISVGDFRLPMILQQRKGTF

SEQ ID NO: 21715 - DNA, 640 bp, Arabidopsis thaliana
  misc_feature (1)..(640): Ceres Seq. ID no. 12323094
  misc_feature: MA Experiment ID: 108434 Result: Up-regulated in Transcription
  misc_feature: MA Experiment 108434 PARAMETER Experiment Name: At_Root_Tips_cDNA_P Parameter: Tissue Value: Root Tips
  misc_feature: MA Experiment ID: 108462 Result: Down-regulated in Transcription
  misc_feature: MA Experiment 108462 PARAMETER Experiment Name: At_Germinating_Seeds_cDNA_P Parameter: Age (day) Value: 2 vs. 0
  misc_feature: MA Experiment 108462 PARAMETER Experiment Name: At_Germinating_Seeds_cDNA_P Parameter: Tissue Value: Germinating Seeds
  misc_feature: MA Experiment ID: 108463 Result: Down-regulated in Transcription
  misc_feature: MA Experiment 108463 PARAMETER Experiment Name: At_Germinating_Seeds_cDNA_P Parameter: Age (day) Value: 3 vs. 0
  misc_feature: MA Experiment 108463 PARAMETER Experiment Name: At_Germinating_Seeds_cDNA_P Parameter: Tissue Value: Germinating Seeds
  misc_feature: MA Experiment ID: 108464 Result: Down-regulated in Transcription
  misc_feature: MA Experiment 108464 PARAMETER Experiment Name: At_Germinating_Seeds_cDNA_P Parameter: Age (day) Value: 4 vs. 0
  misc_feature: MA Experiment 108464 PARAMETER Experiment Name: At_Germinating_Seeds_cDNA_P Parameter: Tissue Value: Germinating Seeds
  misc_feature: MA Experiment ID: 20000184 Result: Down-regulated in Transcription
  misc_feature: MA Experiment 20000184 PARAMETER Experiment Name: At_Shoots__P Parameter: Age (day) Value: 7
  misc_feature: MA Experiment 20000184 PARAMETER Experiment Name: At_Shoots__P Parameter: Tissue Value: Shoots vs. Whole Plant
  misc_feature: MA Experiment ID: 20000224 Result: Up-regulated in Transcription
  misc_feature: Phenotype: FLOWERS Other
  misc_feature: Phenotype: FERTILITY Fertility-Reduced
  misc_feature: Phenotype: ROSETTE LEAVES Disorganized Rosette-Disorganized Rosette
  misc_feature: Phenotype: ROSETTE LEAVES Other
  misc_feature: Phenotype: SILIQUES Other
  misc_feature: Phenotype: FERTILITY Fertility-Reduced
  misc_feature: Phenotype: ROSETTE LEAVES Other
  misc_feature: Phenotype: CAULINE LEAVES Other
aatcgtcgtctctccccaattcaaaaaaagaaataacctaaacgtgttcacacagagatctcgagatgaaagataaccaaacggaagttgaatcgaggagcactgatgatagattgaaagttagagggaacaaagttggaaagaaaacaaaggatccaaacaggcctaagaaaccaccaagtcctttcttcgtcttcctggacgatttccgaaaggagtttaatctggctaaccctgacaacaaatccgtcggtaatgttggtagagcagctggaaagaaatggaaaaccatgactgaagaagaaagagcaccttttgtagcaaaatcacagagcaaaaagactgagtatgctgtgactatgcaacagtataacatggaactggctaatggaaacaagacaactggagatgatgagaaacaagagaaagctgctgatgattaggaagttggatcagtgatttgtgtatcaactatatctgttgttttatgtcaacttttagctagcttttagggagaacaattgttacattcctgttttatcctttctgtcaactgtgggattattcagatgtaactttggatttagctttgagcttcaattccaccttttatgagatcatatcatatgtttgcaatctt

SEQ ID NO: 21716 - protein, 125 aa, Arabidopsis thaliana
  peptide (1)..(125): Ceres Seq. ID no. 12323095
  misc_feature (34)..(103): Pfam Name: HMG (high mobility group) box Pfam Description: HMG (high mobility group) box
  misc_feature (34)..(103): Pfam Name: HMG (high mobility group) box Pfam Description: HMG (high mobility group) box
  misc_feature (1)..(125): Homolog of NCBI NO: 11346367 NR Description: high mobility group protein HMG-gamma
  misc_feature (1)..(125): Homolog of NCBI NO: 13877775 NR Description: putative HMG protein [Arabidopsis thaliana]
  misc_feature (1)..(125): Homolog of NCBI NO: 21592453 NR Description: putative HMG protein [Arabidopsis thaliana]
  misc_feature (1)..(125): Homolog of NCBI NO: 13877775 NR Description: putative HMG protein [Arabidopsis thaliana]
  misc_feature (1)..(125): Homolog of NCBI NO: 15227862 NR Description: putative HMG protein
  misc_feature (1)..(125): Homolog of NCBI NO: 15237040 NR Description: HMG delta protein
  misc_feature (1)..(125): Homolog of NCBI NO: 21592453 NR Description: putative HMG protein [Arabidopsis thaliana]
  misc_feature (1)..(125): Homolog of NCBI NO: 11346367 NR Description: high mobility group protein HMG-gamma
  misc_feature (1)..(125): Homolog of NCBI NO: 15227862 NR Description: putative HMG protein
  misc_feature (1)..(125): Homolog of NCBI NO: 15237040 NR Description: HMG delta protein
MKDNQTEVESRSTDDRLKVRGNKVGKKTKDPNRPKKPPSPFFVFLDDFRKEFNLANPDNKSVGNVGRAAGKKWKTMTEEERAPFVAKSQSKKTEYAVTMQQYNMELANGNKTTGDDEKQEKAADD

SEQ ID NO: 21717 - DNA, 982 bp, Arabidopsis thaliana
  misc_feature (1)..(982): Ceres Seq. ID no. 12332364
  misc_feature: MA Experiment ID: 20000184 Result: Up-regulated in Transcription
  misc_feature: MA Experiment 20000184 PARAMETER Experiment Name: At_Shoots__P Parameter: Age (day) Value: 7
  misc_feature: MA Experiment 20000184 PARAMETER Experiment Name: At_Shoots__P Parameter: Tissue Value: Shoots vs. Whole Plant
  misc_feature: MA Experiment ID: 20000185 Result: Up-regulated in Transcription
  misc_feature: MA Experiment 20000185 PARAMETER Experiment Name: At_Roots__P Parameter: Age (day) Value: 7 vs. 21
  misc_feature: MA Experiment 20000185 PARAMETER Experiment Name: At_Roots__P Parameter: Organism Value: A. thaliana
  misc_feature: MA Experiment 20000185 PARAMETER Experiment Name: At_Roots__P Parameter: Tissue Value: Roots vs. Whole Plant
  misc_feature: MA Experiment ID: 20000314 Result: Up-regulated in Transcription
  misc_feature: MA Experiment 20000314 PARAMETER Experiment Name: At_14day_Shoots-Roots_Sub_P Parameter: Age (day) Value: 14
  misc_feature: MA Experiment 20000314 PARAMETER Experiment Name: At_14day_Shoots-Roots_Sub_P Parameter: Organism Value: A. thaliana
  misc_feature: MA Experiment 20000314 PARAMETER Experiment Name: At_14day_Shoots-Roots_Sub_P Parameter: Plant Line Value: WS
  misc_feature: MA Experiment 20000314 PARAMETER Experiment Name: At_14day_Shoots-Roots_Sub_P Parameter: Tissue Value: Roots vs. Whole Plant
  misc_feature: MA Experiment ID: 20000355 Result: Up-regulated in Transcription
  misc_feature: MA Experiment 20000355 PARAMETER Experiment Name: At_Siliques_Sub_P Parameter: Age (day) Value: 21
  misc_feature: MA Experiment 20000355 PARAMETER Experiment Name: At_Siliques_Sub_P Parameter: Organism Value: A. thaliana
  misc_feature: MA Experiment 20000355 PARAMETER Experiment Name: At_Siliques_Sub_P Parameter: Plant Line Value: WS
  misc_feature: MA Experiment 20000355 PARAMETER Experiment Name: At_Siliques_Sub_P Parameter: Tissue Value: Less Than 5mm Siliques vs. Whole Plant
  misc_feature: MA Experiment ID: 20000440 Result: Up-regulated in Transcription
  misc_feature: MA Experiment 20000440 PARAMETER Experiment Name: At_Closed-Flower__Sub_P Parameter: Tissue Value: Closed Flower vs. Whole Plant
aaggtaaaaaaaagctttgtgcagagagagagagaagaagaaaaatgggtttgcttacgaacaagattgagagagaagagctaaagccaggagatcacatctatacttacagagcaatcttcgcttattctcaccacggaatctttgtcggtgggtccaaagttgttcatttcagacctgaacacaaccccatggattcatcaacatcatcaatatcatcatcttcctctgaagatatctgttccatatttcctgattgcggtttcagacaaccggacagtggagtagtcctttcttgcttagactgtttcctcaagaacggctcactctactgcttcgaatatggagtcagtccatcggttttcctaaccaaagtccgcggagggacttgcacaaccgcgcaatctgatacaactgattcagtcatccacagggcaatgtaccttctccaaaacggatttggcaactacgacattttcaagaacaactgtgaggatttcgcgctctattgcaagaccggtttgcttataatggataagctcggtgtagggagaagcggtcaagcttcttcaattgttggtgctcctttggctgcactcctctcttctccttccaaattgcttattccaagtcccattggtgtggcaacagttactgctggtatgtactgtatgagtcgctatgctaccgatattggtgttagaagcgacgtcattaaggtctcagttgaggatttggctctcaaccttgacgtaaagaccattgagcaaggtgaagaagaagaagaagacgaagaagaagattctgataccgactatgttaggtgacaaacagatacctatcacctttgttcacgaatttcgatatacataagaaaacatttcagttagaatcctcatgttggttttatgttccctttattgcatttgttggcctattttctgtctgtacaaaatgaaaacgcagacgttttggtttgggt

SEQ ID NO: 21718 - protein, 274 aa, Arabidopsis thaliana
  peptide (1)..(274): Ceres Seq. ID no. 12332365
  misc_feature (110)..(191): Pfam Name: NC domain Pfam Description: NC domain
  misc_feature (14)..(245): Homolog of NCBI NO: 15237327 NR Description: putative protein; protein id: At5g16330.1
  misc_feature (46)..(249): Homolog of NCBI NO: 9758417 NR Description: gb|AAF32477.1~gene_id:MHF15.11~similar to unknown
  misc_feature (175)..(259): Homolog of NCBI NO: 15237330 NR Description: putative protein; protein id: At5g16360.1
  misc_feature (15)..(194): Homolog of NCBI NO: 15237330 NR Description: putative protein; protein id: At5g16360.1
  misc_feature (15)..(265): Homolog of NCBI NO: 21594170 NR Description: unknown [Arabidopsis thaliana]
  misc_feature (15)..(265): Homolog of NCBI NO: 18396282 NR Description: expressed protein
  misc_feature (15)..(249): Homolog of NCBI NO: 18415178 NR Description: putative protein
  misc_feature (15)..(256): Homolog of NCBI NO: 22328196 NR Description: unknown protein; protein id: At4g00905.1
  misc_feature (15)..(274): Homolog of NCBI NO: 18378812 NR Description: Expressed protein
  misc_feature (15)..(274): Homolog of NCBI NO: 21592684 NR Description: unknown [Arabidopsis thaliana]
GKKKLCAERERRRKMGLLTNKIEREELKPGDHIYTYRAIFAYSHHGIFVGGSKVVHFRPEHNPMDSSTSSISSSSSEDICSIFPDCGFRQPDSGVVLSCLDCFLKNGSLYCFEYGVSPSVFLTKVRGGTCTTAQSDTTDSVIHRAMYLLQNGFGNYDIFKNNCEDFALYCKTGLLIMDKLGVGRSGQASSIVGAPLAALLSSPSKLLIPSPIGVATVTAGMYCMSRYATDIGVRSDVIKVSVEDLALNLDVKTIEQGEEEEEDEEEDSDTDYVR

SEQ ID NO: 21719 - protein, 260 aa, Arabidopsis thaliana
  peptide (1)..(260): Ceres Seq. ID no. 12332366
  misc_feature (96)..(177): Pfam Name: NC domain Pfam Description: NC domain
  misc_feature (1)..(231): Homolog of NCBI NO: 15237327 NR Description: putative protein; protein id: At5g16330.1
  misc_feature (32)..(235): Homolog of NCBI NO: 9758417 NR Description: gb|AAF32477.1~gene_id:MHF15.11~similar to unknown
  misc_feature (161)..(245): Homolog of NCBI NO: 15237330 NR Description: putative protein; protein id: At5g16360.1
  misc_feature (1)..(180): Homolog of NCBI NO: 15237330 NR Description: putative protein; protein id: At5g16360.1
  misc_feature (1)..(251): Homolog of NCBI NO: 21594170 NR Description: unknown [Arabidopsis thaliana]
  misc_feature (1)..(251): Homolog of NCBI NO: 18396282 NR Description: expressed protein
  misc_feature (1)..(235): Homolog of NCBI NO: 18415178 NR Description: putative protein
  misc_feature (1)..(242): Homolog of NCBI NO: 22328196 NR Description: unknown protein; protein id: At4g00905.1
  misc_feature (1)..(260): Homolog of NCBI NO: 18378812 NR Description: Expressed protein
  misc_feature (1)..(260): Homolog of NCBI NO: 21592684 NR Description: unknown [Arabidopsis thaliana]
MGLLTNKIEREELKPGDHIYTYRAIFAYSHHGIFVGGSKVVHFRPEHNPMDSSTSSISSSSSEDICSIFPDCGFRQPDSGVVLSCLDCFLKNGSLYCFEYGVSPSVFLTKVRGGTCTTAQSDTTDSVIHRAMYLLQNGFGNYDIFKNNCEDFALYCKTGLLIMDKLGVGRSGQASSIVGAPLAALLSSPSKLLIPSPIGVATVTAGMYCMSRYATDIGVRSDVIKVSVEDLALNLDVKTIEQGEEEEEDEEEDSDTDYVR

SEQ ID NO: 21720 - protein, 211 aa, Arabidopsis thaliana
  peptide (1)..(211): Ceres Seq. ID no. 12332367
  misc_feature (47)..(128): Pfam Name: NC domain Pfam Description: NC domain
  misc_feature (1)..(182): Homolog of NCBI NO: 15237327 NR Description: putative protein; protein id: At5g16330.1
  misc_feature (1)..(186): Homolog of NCBI NO: 9758417 NR Description: gb|AAF32477.1~gene_id:MHF15.11~similar to unknown
  misc_feature (112)..(196): Homolog of NCBI NO: 15237330 NR Description: putative protein; protein id: At5g16360.1
  misc_feature (1)..(131): Homolog of NCBI NO: 15237330 NR Description: putative protein; protein id: At5g16360.1
  misc_feature (1)..(202): Homolog of NCBI NO: 21594170 NR Description: unknown [Arabidopsis thaliana]
  misc_feature (1)..(202): Homolog of NCBI NO: 18396282 NR Description: expressed protein
  misc_feature (1)..(186): Homolog of NCBI NO: 18415178 NR Description: putative protein
  misc_feature (1)..(193): Homolog of NCBI NO: 22328196 NR Description: unknown protein; protein id: At4g00905.1
  misc_feature (1)..(211): Homolog of NCBI NO: 18378812 NR Description: Expressed protein
  misc_feature (1)..(211): Homolog of NCBI NO: 21592684 NR Description: unknown [Arabidopsis thaliana]
MDSSTSSISSSSSEDICSIFPDCGFRQPDSGVVLSCLDCFLKNGSLYCFEYGVSPSVFLTKVRGGTCTTAQSDTTDSVIHRAMYLLQNGFGNYDIFKNNCEDFALYCKTGLLIMDKLGVGRSGQASSIVGAPLAALLSSPSKLLIPSPIGVATVTAGMYCMSRYATDIGVRSDVIKVSVEDLALNLDVKTIEQGEEEEEDEEEDSDTDYVR

SEQ ID NO: 21721 - DNA, 925 bp, Arabidopsis thaliana
  misc_feature (1)..(925): Ceres Seq. ID no. 13497033
  misc_feature: MA Experiment ID: 108434 Result: Down-regulated in Transcription
  misc_feature: MA Experiment 108434 PARAMETER Experiment Name: At_Root_Tips_cDNA_P Parameter: Tissue Value: Root Tips
  misc_feature: MA Experiment ID: 108462 Result: Up-regulated in Transcription
  misc_feature: MA Experiment 108462 PARAMETER Experiment Name: At_Germinating_Seeds_cDNA_P Parameter: Age (day) Value: 2 vs. 0
  misc_feature: MA Experiment 108462 PARAMETER Experiment Name: At_Germinating_Seeds_cDNA_P Parameter: Tissue Value: Germinating Seeds
  misc_feature: MA Experiment ID: 108463 Result: Up-regulated in Transcription
  misc_feature: MA Experiment 108463 PARAMETER Experiment Name: At_Germinating_Seeds_cDNA_P Parameter: Age (day) Value: 3 vs. 0
  misc_feature: MA Experiment 108463 PARAMETER Experiment Name: At_Germinating_Seeds_cDNA_P Parameter: Tissue Value: Germinating Seeds
  misc_feature: MA Experiment ID: 108469 Result: Up-regulated in Transcription
  misc_feature: MA Experiment ID: 108488 Result: Down-regulated in Transcription
  misc_feature: MA Experiment ID: 108489 Result: Up-regulated in Transcription
  misc_feature: MA Experiment ID: 108577 Result: Down-regulated in Transcription
  misc_feature: MA Experiment 108577 PARAMETER Experiment Name: At_42deg_Heat_cDNA_P Parameter: Temperature (deg C) Value: 42 vs. 22
  misc_feature: MA Experiment 108577 PARAMETER Experiment Name: At_42deg_Heat_cDNA_P Parameter: Timepoint (hr) Value: 6
  misc_feature: MA Experiment 108577 PARAMETER Experiment Name: At_42deg_Heat_cDNA_P Parameter: Tissue Value: Aerial
  misc_feature: MA Experiment ID: 108585 Result: Up-regulated in Transcription
  misc_feature: MA Experiment 108585 PARAMETER Experiment Name: At_5mM_NaNP_cDNA_P Parameter: Timepoint (hr) Value: 6
  misc_feature: MA Experiment 108585 PARAMETER Experiment Name: At_5mM_NaNP_cDNA_P Parameter: Tissue Value: Aerial
  misc_feature: MA Experiment 108585 PARAMETER Experiment Name: At_5mM_NaNP_cDNA_P Parameter: Treatment Value: null
  misc_feature: MA Experiment ID: 108594 Result: Up-regulated in Transcription
  misc_feature: MA Experiment 108594 PARAMETER Experiment Name: At_Ler-rhl_Root_cDNA_P Parameter: Plant Line Value: null
  misc_feature: MA Experiment ID: 108605 Result: Up-regulated in Transcription
  misc_feature: MA Experiment 108605 PARAMETER Experiment Name: At_100uM_ABA_cDNA_P Parameter: Timepoint (hr) Value: 6
  misc_feature: MA Experiment 108605 PARAMETER Experiment Name: At_100uM_ABA_cDNA_P Parameter: Tissue Value: Aerial
  misc_feature: MA Experiment 108605 PARAMETER Experiment Name: At_100uM_ABA_cDNA_P Parameter: Treatment Value: 100uM ABA vs. No Treatment
  misc_feature: MA Experiment ID: 108609 Result: Up-regulated in Transcription
  misc_feature: MA Experiment 108609 PARAMETER Experiment Name: At_100uM_ABA_cDNA_P Parameter: Timepoint (hr) Value: 24
  misc_feature: MA Experiment 108609 PARAMETER Experiment Name: At_100uM_ABA_cDNA_P Parameter: Tissue Value: Aerial
  misc_feature: MA Experiment 108609 PARAMETER Experiment Name: At_100uM_ABA_cDNA_P Parameter: Treatment Value: 100uM ABA vs. No Treatment
  misc_feature: MA Experiment ID: 108667 Result: Up-regulated in Transcription
  misc_feature: MA Experiment 108667 PARAMETER Experiment Name: At_2mM_SA_cDNA_P Parameter: Plant Line Value: WS
  misc_feature: MA Experiment 108667 PARAMETER Experiment Name: At_2mM_SA_cDNA_P Parameter: Timepoint (hr) Value: 1
  misc_feature: MA Experiment 108667 PARAMETER Experiment Name: At_2mM_SA_cDNA_P Parameter: Treatment Value: 2mM SA vs. No Treatment
  misc_feature: MA Experiment ID: 108668 Result: Up-regulated in Transcription
  misc_feature: MA Experiment 108668 PARAMETER Experiment Name: At_2mM_SA_cDNA_P Parameter: Plant Line Value: WS
  misc_feature: MA Experiment 108668 PARAMETER Experiment Name: At_2mM_SA_cDNA_P Parameter: Timepoint (hr) Value: 6
  misc_feature: MA Experiment 108668 PARAMETER Experiment Name: At_2mM_SA_cDNA_P Parameter: Treatment Value: 2mM SA vs. No Treatment
  misc_feature: MA Experiment ID: 20000069 Result: Up-regulated in Transcription
  misc_feature: MA Experiment 20000069 PARAMETER Experiment Name: At_100uM_ABA_Mutants_cDNA_P Parameter: Plant Line Value: CS23
  misc_feature: MA Experiment 20000069 PARAMETER Experiment Name: At_100uM_ABA_Mutants_cDNA_P Parameter: Timepoint (hr) Value: 6
  misc_feature: MA Experiment 20000069 PARAMETER Experiment Name: At_100uM_ABA_Mutants_cDNA_P Parameter: Tissue Value: Aerial
  misc_feature: MA Experiment 20000069 PARAMETER Experiment Name: At_100uM_ABA_Mutants_cDNA_P Parameter: Treatment Value: 100uM ABA vs. No Treatment
  misc_feature: MA Experiment ID: 20000090 Result: Up-regulated in Transcription
  misc_feature: MA Experiment ID: 20000184 Result: Down-regulated in Transcription
  misc_feature: MA Experiment 20000184 PARAMETER Experiment Name: At_Shoots__P Parameter: Age (day) Value: 7
  misc_feature: MA Experiment 20000184 PARAMETER Experiment Name: At_Shoots__P Parameter: Tissue Value: Shoots vs. Whole Plant
  misc_feature: MA Experiment ID: 20000185 Result: Down-regulated in Transcription
  misc_feature: MA Experiment 20000185 PARAMETER Experiment Name: At_Roots__P Parameter: Age (day) Value: 7 vs. 21
  misc_feature: MA Experiment 20000185 PARAMETER Experiment Name: At_Roots__P Parameter: Organism Value: A. thaliana
  misc_feature: MA Experiment 20000185 PARAMETER Experiment Name: At_Roots__P Parameter: Tissue Value: Roots vs. Whole Plant
  misc_feature: MA Experiment ID: 20000234 Result: Down-regulated in Transcription
  misc_feature: MA Experiment 20000234 PARAMETER Experiment Name: At_Siliques_P Parameter: Age (day) Value: 21
  misc_feature: MA Experiment 20000234 PARAMETER Experiment Name: At_Siliques_P Parameter: Organism Value: A. thaliana
  misc_feature: MA Experiment 20000234 PARAMETER Experiment Name: At_Siliques_P Parameter: Plant Line Value: WS
  misc_feature: MA Experiment 20000234 PARAMETER Experiment Name: At_Siliques_P Parameter: Tissue Value: Less Than 5mm Siliques vs. Whole Plant
  misc_feature: MA Experiment ID: 20000235 Result: Down-regulated in Transcription
  misc_feature: MA Experiment 20000235 PARAMETER Experiment Name: At_Siliques_P Parameter: Age (day) Value: 21
  misc_feature: MA Experiment 20000235 PARAMETER Experiment Name: At_Siliques_P Parameter: Organism Value: A. thaliana
  misc_feature: MA Experiment 20000235 PARAMETER Experiment Name: At_Siliques_P Parameter: Plant Line Value: WS
  misc_feature: MA Experiment 20000235 PARAMETER Experiment Name: At_Siliques_P Parameter: Tissue Value: 5-10mm Siliques vs. Whole Plant
  misc_feature: MA Experiment ID: 20000265 Result: Down-regulated in Transcription
  misc_feature: MA Experiment 20000265 PARAMETER Experiment Name: At_Open_Flower_P Parameter: Age (day) Value: 21
  misc_feature: MA Experiment 20000265 PARAMETER Experiment Name: At_Open_Flower_P Parameter: Plant Line Value: WS
  misc_feature: MA Experiment 20000265 PARAMETER Experiment Name: At_Open_Flower_P Parameter: Tissue Value: Closed Flower vs. Whole Plant
  misc_feature: MA Experiment ID: 20000286 Result: Down-regulated in Transcription
  misc_feature: MA Experiment 20000286 PARAMETER Experiment Name: At_Open_Flower_P Parameter: Age (day) Value: 21
  misc_feature: MA Experiment 20000286 PARAMETER Experiment Name: At_Open_Flower_P Parameter: Plant Line Value: WS
  misc_feature: MA Experiment 20000286 PARAMETER Experiment Name: At_Open_Flower_P Parameter: Tissue Value: Half Open vs. Whole Plant
  misc_feature: MA Experiment ID: 20000438 Result: Down-regulated in Transcription
  misc_feature: MA Experiment 20000438 PARAMETER Experiment Name: At_Shoots__P Parameter: Age (day) Value: 14
  misc_feature: MA Experiment 20000438 PARAMETER Experiment Name: At_Shoots__P Parameter: Tissue Value: Shoots vs. Whole Plant
  misc_feature: MA Experiment ID: 20000439 Result: Down-regulated in Transcription
  misc_feature: MA Experiment 20000439 PARAMETER Experiment Name: At_Roots__P Parameter: Age (day) Value: 14 vs. 21
  misc_feature: MA Experiment 20000439 PARAMETER Experiment Name: At_Roots__P Parameter: Organism Value: A. thaliana
  misc_feature: MA Experiment 20000439 PARAMETER Experiment Name: At_Roots__P Parameter: Tissue Value: Roots vs. Whole Plant
  misc_feature: MA Experiment ID: 20000441 Result: Up-regulated in Transcription
  misc_feature: MA Experiment 20000441 PARAMETER Experiment Name: At_1uM_BR-BRZ__P Parameter: Tissue Value: Shoot Apices
  misc_feature: MA Experiment 20000441 PARAMETER Experiment Name: At_1uM_BR-BRZ__P Parameter: Treatment Value: 1uM BR vs. No Treatment
  misc_feature: MA Experiment ID: 20000445 Result: Up-regulated in Transcription
  misc_feature: MA Experiment 20000445 PARAMETER Experiment Name: At_100uM_NAA__P Parameter: Age (day) Value: 14
  misc_feature: MA Experiment 20000445 PARAMETER Experiment Name: At_100uM_NAA__P Parameter: Organism Value: A. thaliana
  misc_feature: MA Experiment 20000445 PARAMETER Experiment Name: At_100uM_NAA__P Parameter: Plant Line Value: WS
  misc_feature: MA Experiment 20000445 PARAMETER Experiment Name: At_100uM_NAA__P Parameter: Timepoint (hr) Value: 6
  misc_feature: MA Experiment 20000445 PARAMETER Experiment Name: At_100uM_NAA__P Parameter: Tissue Value: Aerial
  misc_feature: MA Experiment 20000445 PARAMETER Experiment Name: At_100uM_NAA__P Parameter: Treatment Value: 100uM NAA vs. No Treatment
  misc_feature: MA Experiment ID: 20000794 Result: Down-regulated in Transcription
  misc_feature: MA Experiment 20000794 PARAMETER Experiment Name: At_Petals_P Parameter: Age (day) Value: 23-25 days
  misc_feature: MA Experiment 20000794 PARAMETER Experiment Name: At_Petals_P Parameter: Plant Line Value: WS
  misc_feature: MA Experiment 20000794 PARAMETER Experiment Name: At_Petals_P Parameter: Tissue Value: Petals vs. Whole plant
  misc_feature: MA Experiment ID: 20001911 Result: Up-regulated in Transcription
  misc_feature: MA Experiment 20001911 PARAMETER Experiment Name: At_Drought_Reproduction_P Parameter: Age (day) Value: 40
  misc_feature: MA Experiment 20001911 PARAMETER Experiment Name: At_Drought_Reproduction_P Parameter: Organism Value: A. thaliana
  misc_feature: MA Experiment 20001911 PARAMETER Experiment Name: At_Drought_Reproduction_P Parameter: Plant Line Value: WS
  misc_feature: MA Experiment 20001911 PARAMETER Experiment Name: At_Drought_Reproduction_P Parameter: Timepoint (day) Value: 10
  misc_feature: MA Experiment 20001911 PARAMETER Experiment Name: At_Drought_Reproduction_P Parameter: Tissue Value: Flowers
  misc_feature: MA Experiment 20001911 PARAMETER Experiment Name: At_Drought_Reproduction_P Parameter: Treatment Value: Drought vs. No Drought
catcgctgtctggaacagcgatgaccgagaaaggcaatggagtcggctaaatcaatcatcggtggccaccaaaatgtcatcctgatgcgtcatggtgatcgactcgacaatttcgagccactctggacttcaacagctgcgagaccgtgggatccaccgcttgctcaagacggtaaggatcgggcctttagaactggtcagagaatccggtctcaacttggggttccgattcaccgtgtcttcgtctcccctttcctccgctgcatccagaccgcttccgaagtcgttgccgccctctcagccgtcgatttcgatcccattgctatgtcatctaaagacgtgctttccatcgacaatactaagatcaaggtggctattgaatttggattgtccgagataccgcacccaatctttattaagagtgaagttgctcccaaagatgggaaatttgatttcaagatttcagatcttgaagctatgtttcctgaaggaacagtggattctaatgtggatatggtttataaagaggtgccagaatggggagaatctgcacaagcctttgaggatcgatattataagacagtgaagattcttgcggagaagtatccttctgagaacttgctcttagtcactcattggggagcagtaagtgttgcattttacaactacttcaaagacgcaactaagtacgtggtagattattgtggtagtgttgaaatgagaaggcagattttgaatggtgatgggtttggtaaatttgaggtagttactagtcatggagtatcttataagtacaccaaaatcccagtccatgatcatgtagttgtaagccgccaatctcccctttaaccggtttatatgtgaatatctggtttaacgggttgcttcaataaaaaaaaatatataagaataatggttcagttag

SEQ ID NO: 21722 - protein, 270 aa, Arabidopsis thaliana
  peptide (1)..(270): Ceres Seq. ID no. 13497034
  misc_feature (12)..(87): Pfam Name: Phosphoglycerate mutase family Pfam Description: Phosphoglycerate mutase family
  misc_feature (12)..(88): Homolog of NCBI NO: 23128704 NR Description: hypothetical protein [Nostoc punctiforme]
  misc_feature (12)..(87): Homolog of NCBI NO: 17230464 NR Description: hypothetical protein [Nostoc sp. PCC 7120]
  misc_feature (12)..(93): Homolog of NCBI NO: 23042637 NR Description: hypothetical protein [Trichodesmium erythraeum
  misc_feature (38)..(251): Homolog of NCBI NO: 25347741 NR Description: pRIB5 protein [imported] - Ribes nigrum
  misc_feature (4)..(248): Homolog of NCBI NO: 15232326 NR Description: hypothetical protein [Arabidopsis thaliana]
  misc_feature (1)..(260): Homolog of NCBI NO: 15232328 NR Description: expressed protein [Arabidopsis thaliana]
  misc_feature (1)..(270): Homolog of NCBI NO: 21553703 NR Description: pRIB5 protein [Arabidopsis thaliana]
  misc_feature (1)..(270): Homolog of NCBI NO: 15232331 NR Description: expressed protein [Arabidopsis thaliana]
  misc_feature (17)..(270): Homolog of NCBI NO: 21592687 NR Description: unknown [Arabidopsis thaliana]
  misc_feature (1)..(270): Homolog of NCBI NO: 15232324 NR Description: expressed protein [Arabidopsis thaliana]
MESAKSIIGGHQNVILMRHGDRLDNFEPLWTSTAARPWDPPLAQDGKDRAFRTGQRIRSQLGVPIHRVFVSPFLRCIQTASEVVAALSAVDFDPIAMSSKDVLSIDNTKIKVAIEFGLSEIPHPIFIKSEVAPKDGKFDFKISDLEAMFPEGTVDSNVDMVYKEVPEWGESAQAFEDRYYKTVKILAEKYPSENLLLVTHWGAVSVAFYNYFKDATKYVVDYCGSVEMRRQILNGDGFGKFEVVTSHGVSYKYTKIPVHDHVVVSRQSPL

SEQ ID NO: 21723 - protein, 254 aa, Arabidopsis thaliana
  peptide (1)..(254): Ceres Seq. ID no. 13497035
  misc_feature (1)..(71): Pfam Name: Phosphoglycerate mutase family Pfam Description: Phosphoglycerate mutase family
  misc_feature (1)..(72): Homolog of NCBI NO: 23128704 NR Description: hypothetical protein [Nostoc punctiforme]
  misc_feature (1)..(71): Homolog of NCBI NO: 17230464 NR Description: hypothetical protein [Nostoc sp. PCC 7120]
  misc_feature (1)..(77): Homolog of NCBI NO: 23042637 NR Description: hypothetical protein [Trichodesmium erythraeum
  misc_feature (22)..(235): Homolog of NCBI NO: 25347741 NR Description: pRIB5 protein [imported] - Ribes nigrum
  misc_feature (1)..(232): Homolog of NCBI NO: 15232326 NR Description: hypothetical protein [Arabidopsis thaliana]
  misc_feature (1)..(244): Homolog of NCBI NO: 15232328 NR Description: expressed protein [Arabidopsis thaliana]
  misc_feature (1)..(254): Homolog of NCBI NO: 21553703 NR Description: pRIB5 protein [Arabidopsis thaliana]
  misc_feature (1)..(254): Homolog of NCBI NO: 15232331 NR Description: expressed protein [Arabidopsis thaliana]
  misc_feature (1)..(254): Homolog of NCBI NO: 21592687 NR Description: unknown [Arabidopsis thaliana]
  misc_feature (1)..(254): Homolog of NCBI NO: 15232324 NR Description: expressed protein [Arabidopsis thaliana]
MRHGDRLDNFEPLWTSTAARPWDPPLAQDGKDRAFRTGQRIRSQLGVPIHRVFVSPFLRCIQTASEVVAALSAVDFDPIAMSSKDVLSIDNTKIKVAIEFGLSEIPHPIFIKSEVAPKDGKFDFKISDLEAMFPEGTVDSNVDMVYKEVPEWGESAQAFEDRYYKTVKILAEKYPSENLLLVTHWGAVSVAFYNYFKDATKYVVDYCGSVEMRRQILNGDGFGKFEVVTSHGVSYKYTKIPVHDHVVVSRQSPL

SEQ ID NO: 21724 - protein, 174 aa, Arabidopsis thaliana
  peptide (1)..(174): Ceres Seq. ID no. 13497036
  misc_feature (1)..(155): Homolog of NCBI NO: 25347741 NR Description: pRIB5 protein [imported] - Ribes nigrum
  misc_feature (1)..(152): Homolog of NCBI NO: 15232326 NR Description: hypothetical protein [Arabidopsis thaliana]
  misc_feature (1)..(164): Homolog of NCBI NO: 15232328 NR Description: expressed protein [Arabidopsis thaliana]
  misc_feature (1)..(174): Homolog of NCBI NO: 21553703 NR Description: pRIB5 protein [Arabidopsis thaliana]
  misc_feature (1)..(174): Homolog of NCBI NO: 15232331 NR Description: expressed protein [Arabidopsis thaliana]
  misc_feature (1)..(174): Homolog of NCBI NO: 21592687 NR Description: unknown [Arabidopsis thaliana]
  misc_feature (1)..(174): Homolog of NCBI NO: 15232324 NR Description: expressed protein [Arabidopsis thaliana]
MSSKDVLSIDNTKIKVAIEFGLSEIPHPIFIKSEVAPKDGKFDFKISDLEAMFPEGTVDSNVDMVYKEVPEWGESAQAFEDRYYKTVKILAEKYPSENLLLVTHWGAVSVAFYNYFKDATKYVVDYCGSVEMRRQILNGDGFGKFEVVTSHGVSYKYTKIPVHDHVVVSRQSPL

SEQ ID NO: 21725 - DNA, 736 bp, Arabidopsis thaliana
  misc_feature (1)..(736): Ceres Seq. ID no. 12397229
  misc_feature: MA Experiment ID: 108435 Result: Down-regulated in Transcription
  misc_feature: MA Experiment 108435 PARAMETER Experiment Name: At_stm_Mutants_cDNA_P Parameter: Plant Line Value: wt Landsburg vs stm
  misc_feature: MA Experiment 108435 PARAMETER Experiment Name: At_stm_Mutants_cDNA_P Parameter: Tissue Value: Shoot Apical Meristem Region
  misc_feature: MA Experiment ID: 108462 Result: Up-regulated in Transcription
  misc_feature: MA Experiment 108462 PARAMETER Experiment Name: At_Germinating_Seeds_cDNA_P Parameter: Age (day) Value: 2 vs. 0
  misc_feature: MA Experiment 108462 PARAMETER Experiment Name: At_Germinating_Seeds_cDNA_P Parameter: Tissue Value: Germinating Seeds
  misc_feature: MA Experiment ID: 108463 Result: Up-regulated in Transcription
  misc_feature: MA Experiment 108463 PARAMETER Experiment Name: At_Germinating_Seeds_cDNA_P Parameter: Age (day) Value: 3 vs. 0
  misc_feature: MA Experiment 108463 PARAMETER Experiment Name: At_Germinating_Seeds_cDNA_P Parameter: Tissue Value: Germinating Seeds
  misc_feature: MA Experiment ID: 108464 Result: Up-regulated in Transcription
  misc_feature: MA Experiment 108464 PARAMETER Experiment Name: At_Germinating_Seeds_cDNA_P Parameter: Age (day) Value: 4 vs. 0
  misc_feature: MA Experiment 108464 PARAMETER Experiment Name: At_Germinating_Seeds_cDNA_P Parameter: Tissue Value: Germinating Seeds
  misc_feature: MA Experiment ID: 108573 Result: Up-regulated in Transcription
  misc_feature: MA Experiment 108573 PARAMETER Experiment Name: At_Drought_cDNA_P Parameter: Timepoint (hr) Value: 6
  misc_feature: MA Experiment 108573 PARAMETER Experiment Name: At_Drought_cDNA_P Parameter: Tissue Value: Aerial
  misc_feature: MA Experiment 108573 PARAMETER Experiment Name: At_Drought_cDNA_P Parameter: Treatment Value: Drought vs. No Drought
  misc_feature: MA Experiment ID: 108577 Result: Down-regulated in Transcription
  misc_feature: MA Experiment 108577 PARAMETER Experiment Name: At_42deg_Heat_cDNA_P Parameter: Temperature (deg C) Value: 42 vs. 22
  misc_feature: MA Experiment 108577 PARAMETER Experiment Name: At_42deg_Heat_cDNA_P Parameter: Timepoint (hr) Value: 6
  misc_feature: MA Experiment 108577 PARAMETER Experiment Name: At_42deg_Heat_cDNA_P Parameter: Tissue Value: Aerial
  misc_feature: MA Experiment ID: 108585 Result: Down-regulated in Transcription
  misc_feature: MA Experiment 108585 PARAMETER Experiment Name: At_5mM_NaNP_cDNA_P Parameter: Timepoint (hr) Value: 6
  misc_feature: MA Experiment 108585 PARAMETER Experiment Name: At_5mM_NaNP_cDNA_P Parameter: Tissue Value: Aerial
  misc_feature: MA Experiment 108585 PARAMETER Experiment Name: At_5mM_NaNP_cDNA_P Parameter: Treatment Value: null
  misc_feature: MA Experiment ID: 108595 Result: Down-regulated in Transcription
  misc_feature: MA Experiment 108595 PARAMETER Experiment Name: At_Ler-pi_Ovule_cDNA_P Parameter: Plant Line Value: null
  misc_feature: MA Experiment ID: 20000069 Result: Up-regulated in Transcription
  misc_feature: MA Experiment 20000069 PARAMETER Experiment Name: At_100uM_ABA_Mutants_cDNA_P Parameter: Plant Line Value: CS23
  misc_feature: MA Experiment 20000069 PARAMETER Experiment Name: At_100uM_ABA_Mutants_cDNA_P Parameter: Timepoint (hr) Value: 6
  misc_feature: MA Experiment 20000069 PARAMETER Experiment Name: At_100uM_ABA_Mutants_cDNA_P Parameter: Tissue Value: Aerial
  misc_feature: MA Experiment 20000069 PARAMETER Experiment Name: At_100uM_ABA_Mutants_cDNA_P Parameter: Treatment Value: 100uM ABA vs. No Treatment
  misc_feature: MA Experiment ID: 20000070 Result: Up-regulated in Transcription
  misc_feature: MA Experiment 20000070 PARAMETER Experiment Name: At_100uM_ABA_Mutants_cDNA_P Parameter: Plant Line Value: CS24
  misc_feature: MA Experiment 20000070 PARAMETER Experiment Name: At_100uM_ABA_Mutants_cDNA_P Parameter: Timepoint (hr) Value: 6
  misc_feature: MA Experiment 20000070 PARAMETER Experiment Name: At_100uM_ABA_Mutants_cDNA_P Parameter: Tissue Value: Aerial
  misc_feature: MA Experiment 20000070 PARAMETER Experiment Name: At_100uM_ABA_Mutants_cDNA_P Parameter: Treatment Value: 100uM ABA vs. No Treatment
  misc_feature: MA Experiment ID: 20000071 Result: Up-regulated in Transcription
  misc_feature: MA Experiment 20000071 PARAMETER Experiment Name: At_100uM_ABA_Mutants_cDNA_P Parameter: Plant Line Value: CS8104
  misc_feature: MA Experiment 20000071 PARAMETER Experiment Name: At_100uM_ABA_Mutants_cDNA_P Parameter: Timepoint (hr) Value: 6
  misc_feature: MA Experiment 20000071 PARAMETER Experiment Name: At_100uM_ABA_Mutants_cDNA_P Parameter: Tissue Value: Aerial
  misc_feature: MA Experiment 20000071 PARAMETER Experiment Name: At_100uM_ABA_Mutants_cDNA_P Parameter: Treatment Value: 100uM ABA vs. No Treatment
  misc_feature: MA Experiment ID: 20000086 Result: Up-regulated in Transcription
  misc_feature: MA Experiment 20000086 PARAMETER Experiment Name: At_100uM_ABA_Mutants_cDNA_P Parameter: Plant Line Value: CS22
  misc_feature: MA Experiment 20000086 PARAMETER Experiment Name: At_100uM_ABA_Mutants_cDNA_P Parameter: Timepoint (hr) Value: 6
  misc_feature: MA Experiment 20000086 PARAMETER Experiment Name: At_100uM_ABA_Mutants_cDNA_P Parameter: Tissue Value: Aerial
  misc_feature: MA Experiment 20000086 PARAMETER Experiment Name: At_100uM_ABA_Mutants_cDNA_P Parameter: Treatment Value: 100uM ABA vs. No Treatment
  misc_feature: MA Experiment ID: 20000087 Result: Up-regulated in Transcription
  misc_feature: MA Experiment 20000087 PARAMETER Experiment Name: At_100uM_ABA_Mutants_cDNA_P Parameter: Plant Line Value: WS
  misc_feature: MA Experiment 20000087 PARAMETER Experiment Name: At_100uM_ABA_Mutants_cDNA_P Parameter: Timepoint (hr) Value: 6
  misc_feature: MA Experiment 20000087 PARAMETER Experiment Name: At_100uM_ABA_Mutants_cDNA_P Parameter: Tissue Value: Aerial
  misc_feature: MA Experiment 20000087 PARAMETER Experiment Name: At_100uM_ABA_Mutants_cDNA_P Parameter: Treatment Value: 100uM ABA vs. No Treatment
  misc_feature: MA Experiment ID: 20000088 Result: Up-regulated in Transcription
  misc_feature: MA Experiment 20000088 PARAMETER Experiment Name: At_100uM_ABA_Mutants_cDNA_P Parameter: Plant Line Value: Landsberg
  misc_feature: MA Experiment 20000088 PARAMETER Experiment Name: At_100uM_ABA_Mutants_cDNA_P Parameter: Timepoint (hr) Value: 6
  misc_feature: MA Experiment 20000088 PARAMETER Experiment Name: At_100uM_ABA_Mutants_cDNA_P Parameter: Tissue Value: Aerial
  misc_feature: MA Experiment 20000088 PARAMETER Experiment Name: At_100uM_ABA_Mutants_cDNA_P Parameter: Treatment Value: 100uM ABA vs. No Treatment
  misc_feature: MA Experiment ID: 20000117 Result: Up-regulated in Transcription
  misc_feature: MA Experiment 20000117 PARAMETER Experiment Name: At_100uM_ABA_Mutants_cDNA_P Parameter: Plant Line Value: Columbia
  misc_feature: MA Experiment 20000117 PARAMETER Experiment Name: At_100uM_ABA_Mutants_cDNA_P Parameter: Timepoint (hr) Value: 6
  misc_feature: MA Experiment 20000117 PARAMETER Experiment Name: At_100uM_ABA_Mutants_cDNA_P Parameter: Tissue Value: Aerial
  misc_feature: MA Experiment 20000117 PARAMETER Experiment Name: At_100uM_ABA_Mutants_cDNA_P Parameter: Treatment Value: 100uM ABA vs. No Treatment
  misc_feature: MA Experiment ID: 20000180 Result: Up-regulated in Transcription
  misc_feature: MA Experiment 20000180 PARAMETER Experiment Name: At_Germinating_Seeds_P Parameter: Age (hr) Value: 24 vs. 0
  misc_feature: MA Experiment 20000180 PARAMETER Experiment Name: At_Germinating_Seeds_P Parameter: Tissue Value: Germinating Seeds
  misc_feature: MA Experiment ID: 20000185 Result: Down-regulated in Transcription
  misc_feature: MA Experiment 20000185 PARAMETER Experiment Name: At_Roots__P Parameter: Age (day) Value: 7 vs. 21
  misc_feature: MA Experiment 20000185 PARAMETER Experiment Name: At_Roots__P Parameter: Organism Value: A. thaliana
  misc_feature: MA Experiment 20000185 PARAMETER Experiment Name: At_Roots__P Parameter: Tissue Value: Roots vs. Whole Plant
  misc_feature: MA Experiment ID: 20000264 Result: Down-regulated in Transcription
  misc_feature: MA Experiment 20000264 PARAMETER Experiment Name: At_Open_Flower_P Parameter: Age (day) Value: 21
  misc_feature: MA Experiment 20000264 PARAMETER Experiment Name: At_Open_Flower_P Parameter: Plant Line Value: WS
  misc_feature: MA Experiment 20000264 PARAMETER Experiment Name: At_Open_Flower_P Parameter: Tissue Value: Open Flower vs. Whole Plant
  misc_feature: MA Experiment ID: 20000286 Result: Down-regulated in Transcription
  misc_feature: MA Experiment 20000286 PARAMETER Experiment Name: At_Open_Flower_P Parameter: Age (day) Value: 21
  misc_feature: MA Experiment 20000286 PARAMETER Experiment Name: At_Open_Flower_P Parameter: Plant Line Value: WS
  misc_feature: MA Experiment 20000286 PARAMETER Experiment Name: At_Open_Flower_P Parameter: Tissue Value: Half Open vs. Whole Plant
  misc_feature: MA Experiment ID: 20000439 Result: Down-regulated in Transcription
  misc_feature: MA Experiment 20000439 PARAMETER Experiment Name: At_Roots__P Parameter: Age (day) Value: 14 vs. 21
  misc_feature: MA Experiment 20000439 PARAMETER Experiment Name: At_Roots__P Parameter: Organism Value: A. thaliana
  misc_feature: MA Experiment 20000439 PARAMETER Experiment Name: At_Roots__P Parameter: Tissue Value: Roots vs. Whole Plant
  misc_feature: MA Experiment ID: 20000495 Result: Down-regulated in Transcription
  misc_feature: MA Experiment 20000495 PARAMETER Experiment Name: At_Guard_Cells_P Parameter: Harvest Date Value: 8/2/2002
  misc_feature: MA Experiment 20000495 PARAMETER Experiment Name: At_Guard_Cells_P Parameter: Organism Value: A. thaliana
  misc_feature: MA Experiment 20000495 PARAMETER Experiment Name: At_Guard_Cells_P Parameter: Tissue Value: Guard Cells vs. Leaves
  misc_feature: MA Experiment ID: 20000794 Result: Down-regulated in Transcription
  misc_feature: MA Experiment 20000794 PARAMETER Experiment Name: At_Petals_P Parameter: Age (day) Value: 23-25 days
  misc_feature: MA Experiment 20000794 PARAMETER Experiment Name: At_Petals_P Parameter: Plant Line Value: WS
  misc_feature: MA Experiment 20000794 PARAMETER Experiment Name: At_Petals_P Parameter: Tissue Value: Petals vs. Whole plant
  misc_feature: MA Experiment ID: 20001557 Result: Down-regulated in Transcription
  misc_feature: MA Experiment 20001557 PARAMETER Experiment Name: At_Drought_Soil_Dry_P Parameter: Age (day) Value: 27
  misc_feature: MA Experiment 20001557 PARAMETER Experiment Name: At_Drought_Soil_Dry_P Parameter: Organism Value: A. thaliana
  misc_feature: MA Experiment 20001557 PARAMETER Experiment Name: At_Drought_Soil_Dry_P Parameter: Plant Line Value: WS
  misc_feature: MA Experiment 20001557 PARAMETER Experiment Name: At_Drought_Soil_Dry_P Parameter: Post Timepoint (hr) Value: 3
  misc_feature: MA Experiment 20001557 PARAMETER Experiment Name: At_Drought_Soil_Dry_P Parameter: Post-Treatment Value: Re-Water vs. No Drought
  misc_feature: MA Experiment 20001557 PARAMETER Experiment Name: At_Drought_Soil_Dry_P Parameter: Timepoint (day) Value: 13
  misc_feature: MA Experiment 20001557 PARAMETER Experiment Name: At_Drought_Soil_Dry_P Parameter: Treatment Value: Drought vs. No Drought
  misc_feature: MA Experiment ID: 20001558 Result: Down-regulated in Transcription
  misc_feature: MA Experiment 20001558 PARAMETER Experiment Name: At_Drought_Soil_Dry_P Parameter: Age (day) Value: 27
  misc_feature: MA Experiment 20001558 PARAMETER Experiment Name: At_Drought_Soil_Dry_P Parameter: Organism Value: A. thaliana
  misc_feature: MA Experiment 20001558 PARAMETER Experiment Name: At_Drought_Soil_Dry_P Parameter: Plant Line Value: WS
  misc_feature: MA Experiment 20001558 PARAMETER Experiment Name: At_Drought_Soil_Dry_P Parameter: Post Timepoint (hr) Value: 6
  misc_feature: MA Experiment 20001558 PARAMETER Experiment Name: At_Drought_Soil_Dry_P Parameter: Post-Treatment Value: Re-Water vs. No Drought
  misc_feature: MA Experiment 20001558 PARAMETER Experiment Name: At_Drought_Soil_Dry_P Parameter: Timepoint (day) Value: 13
  misc_feature: MA Experiment 20001558 PARAMETER Experiment Name: At_Drought_Soil_Dry_P Parameter: Treatment Value: Drought vs. No Drought
cttttttgttttctctcacactttcttaagatttttttcttcggctcggacgcagatgactaacagttacgctctgtcaccggcgattatcgccgccgttcgtcctccggcatctcaagactatctagttgctgcttctcttagtggacgcaaatcgatcaactcttcatcttcgtccattttcgtacctatctcattatctacttcctacggtcgaagcaaatgcgccttctcaatctcgcggaagaatccaaaatcgacgattcgttgcgatattgctgtgaaatcggcggcttctgtagacgcggacgctgatctatcgtcatctacgtcgttggagacggaggaagacgagaaagcgaaggagaagattggagctagggttagggttacggttccgttgaaagtttaccatgtggttcgtgtaccggaggttgaattgatgggaatggaaggttttatcaaagattacgtcgttctttggaaaggaaagaaaatctcagctaatctgccgtttaaggtacagttcgtgaaagagatcgaaggtcgtggtcctgtcaaattcttcacgcatcttaaggaagacgagttcgagttaattgatccgtgattgaattgaaaaaggcaaaaacttttcttctctttctgatattagacttgaaaaatcttttgtgaatggtttgtttgtatgtacttttgtatacatttagcttattatatacataagatttcaccc

SEQ ID NO: 21726 - protein, 202 aa, Arabidopsis thaliana
  peptide (1)..(202): Ceres Seq. ID no. 12397230
  misc_feature (123)..(200): Homolog of NCBI NO: 17229961 NR Description: ferredoxin-thioredoxin reductase variable subunit
  misc_feature (116)..(201): Homolog of NCBI NO: 1362192 NR Description: ferredoxin-thioredoxin reductase (EC 1.18.-.-)
  misc_feature (65)..(200): Homolog of NCBI NO: 729538 NR Description: Ferredoxin-thioredoxin reductase, variable chain, precursor (FTR-V) (Ferredoxin-thioredoxin reductase subunit A)
  misc_feature (116)..(201): Homolog of NCBI NO: 2498397 NR Description: FERREDOXIN-THIOREDOXIN REDUCTASE, VARIABLE CHAIN
  misc_feature (65)..(200): Homolog of NCBI NO: 505186 NR Description: ferredoxin-thioredoxin reductase SU A [Spinacia
  misc_feature (54)..(201): Homolog of NCBI NO: 14275856 NR Description: subunit A of ferredoxin-thioredoxin-reductase
  misc_feature (90)..(201): Homolog of NCBI NO: 38346617 NR Description: OSJNBa0074L08.8 [Oryza sativa (japonica
  misc_feature (19)..(201): Homolog of NCBI NO: 15237763 NR Description: putative protein; protein id: At5g23440.1
  misc_feature (19)..(202): Homolog of NCBI NO: 18415805 NR Description: Expressed protein
  misc_feature (19)..(202): Homolog of NCBI NO: 10178283 NR Description: lipoic acid synthase-like protein [Arabidopsis
FFVFSHTFLRFFSSARTQMTNSYALSPAIIAAVRPPASQDYLVAASLSGRKSINSSSSSIFVPISLSTSYGRSKCAFSISRKNPKSTIRCDIAVKSAASVDADADLSSSTSLETEEDEKAKEKIGARVRVTVPLKVYHVVRVPEVELMGMEGFIKDYVVLWKGKKISANLPFKVQFVKEIEGRGPVKFFTHLKEDEFELIDP

SEQ ID NO: 21727 - protein, 184 aa, Arabidopsis thaliana
  peptide (1)..(184): Ceres Seq. ID no. 12397231
  misc_feature (1)..(184): Homolog of NCBI NO: 18415805 NR Description: Expressed protein
  misc_feature (1)..(184): Homolog of NCBI NO: 10178283 NR Description: lipoic acid synthase-like protein [Arabidopsis
  misc_feature (105)..(182): Homolog of NCBI NO: 17229961 NR Description: ferredoxin-thioredoxin reductase variable subunit
  misc_feature (98)..(183): Homolog of NCBI NO: 1362192 NR Description: ferredoxin-thioredoxin reductase (EC 1.18.-.-)
  misc_feature (47)..(182): Homolog of NCBI NO: 729538 NR Description: Ferredoxin-thioredoxin reductase, variable chain, precursor (FTR-V) (Ferredoxin-thioredoxin reductase subunit A)
  misc_feature (98)..(183): Homolog of NCBI NO: 2498397 NR Description: FERREDOXIN-THIOREDOXIN REDUCTASE, VARIABLE CHAIN
  misc_feature (47)..(182): Homolog of NCBI NO: 505186 NR Description: ferredoxin-thioredoxin reductase SU A [Spinacia
  misc_feature (36)..(183): Homolog of NCBI NO: 14275856 NR Description: subunit A of ferredoxin-thioredoxin-reductase
  misc_feature (72)..(183): Homolog of NCBI NO: 38346617 NR Description: OSJNBa0074L08.8 [Oryza sativa (japonica
  misc_feature (1)..(183): Homolog of NCBI NO: 15237763 NR Description: putative protein; protein id: At5g23440.1
MTNSYALSPAIIAAVRPPASQDYLVAASLSGRKSINSSSSSIFVPISLSTSYGRSKCAFSISRKNPKSTIRCDIAVKSAASVDADADLSSSTSLETEEDEKAKEKIGARVRVTVPLKVYHVVRVPEVELMGMEGFIKDYVVLWKGKKISANLPFKVQFVKEIEGRGPVKFFTHLKEDEFELIDP

SEQ ID NO: 21728 - DNA, 925 bp, Arabidopsis thaliana
  misc_feature (1)..(925): Ceres Seq. ID no. 12384569
  misc_feature: MA Experiment ID: 108434 Result: Up-regulated in Transcription
  misc_feature: MA Experiment 108434 PARAMETER Experiment Name: At_Root_Tips_cDNA_P Parameter: Tissue Value: Root Tips
  misc_feature: MA Experiment ID: 108594 Result: Down-regulated in Transcription
  misc_feature: MA Experiment 108594 PARAMETER Experiment Name: At_Ler-rhl_Root_cDNA_P Parameter: Plant Line Value: null
  misc_feature: MA Experiment ID: 108595 Result: Down-regulated in Transcription
  misc_feature: MA Experiment 108595 PARAMETER Experiment Name: At_Ler-pi_Ovule_cDNA_P Parameter: Plant Line Value: null
  misc_feature: MA Experiment ID: 20000495 Result: Down-regulated in Transcription
  misc_feature: MA Experiment 20000495 PARAMETER Experiment Name: At_Guard_Cells_P Parameter: Harvest Date Value: 8/2/2002
  misc_feature: MA Experiment 20000495 PARAMETER Experiment Name: At_Guard_Cells_P Parameter: Organism Value: A. thaliana
  misc_feature: MA Experiment 20000495 PARAMETER Experiment Name: At_Guard_Cells_P Parameter: Tissue Value: Guard Cells vs. Leaves
aaacctccaacttttttttgttttatcagattgtagaattagggaagagactttcgcaagcaatctagaagcaaatcgatcgccaaatctccggattatttgcaagaatcattcccagataatcttccccagattctccacttctccaggtattaatttcgtattgagtggattagattagatttcaagatatgagagcctcactggcgttctaatgtcactgtttcgtattttcattaatcagcttgaagaagacgacgaagatatggctacttcgaagaaaatgattacacgtgaagagtgggagaagaaactaaatgctgtgaagcttaggaaagaagatatgaatactttggtgatgaattttcttgtgactgaaggatatgttgaagctgctgagaaattccaaagggagtctggaaccaaaccagagatagatcttgcgaccatcactgatcgaatggctgttaaaaaggctgttcaaaacggaaatgtcgaggatgcgattgaaaaagttaatgatttgaatcctgagatactagacacgaatccggagctcttttttcatcttcagcagcaaaggttgatagaattaattcgacaagggaagacagaagaggccttggagtttgctcaagaggaacttgcaccacgtggcggaagaaaaccaagcgtttctagaagaaaatnggaaaaaactgtagccctacttgtttttgacgatgcctctacctgcccggttaaagagcttcttgatctttcccaccgtcttaagacagcaagtgaagtaaatgcagcgattcttacaagccagagccacgaaaaagatcctaaacttccaagcttgttgaagatgttgatttgggctcaaaatcaactggacgagaaagcagtgtatcctcacattaatgatttgtctaccggt

SEQ ID NO: 21729 - protein, 237 aa, Arabidopsis thaliana
  peptide (1)..(237): Ceres Seq. ID no. 12384570
  misc_feature (20)..(233): Homolog of NCBI NO: 7487558 NR Description: hypothetical protein T30A10.60 - Arabidopsis
  misc_feature (25)..(236): Homolog of NCBI NO: 24643081 NR Description: CG6617-PA [Drosophila melanogaster]
  misc_feature (10)..(236): Homolog of NCBI NO: 26451919 NR Description: unknown protein [Arabidopsis thaliana]
  misc_feature (18)..(236): Homolog of NCBI NO: 37748055 NR Description: Unknown (protein for MGC:73100) [Danio rerio]
  misc_feature (25)..(236): Homolog of NCBI NO: 21594655 NR Description: chromosome 20 open reading frame 11 [Homo sapiens]
  misc_feature (25)..(236): Homolog of NCBI NO: 8923557 NR Description: chromosome 20 open reading frame 11
  misc_feature (25)..(236): Homolog of NCBI NO: 20863687 NR Description: RIKEN cDNA 2310003C23 [Mus musculus]
  misc_feature (18)..(236): Homolog of NCBI NO: 30681030 NR Description: expressed protein [Arabidopsis thaliana]
  misc_feature (1)..(236): Homolog of NCBI NO: 25404311 NR Description: hypothetical protein F11P17.12 [imported] -
  misc_feature (1)..(236): Homolog of NCBI NO: 15219873 NR Description: hypothetical protein; protein id: At1g61150.1
  misc_feature (159)..(159): Xaa is any aa, unknown or other
MSLFRIFINQLEEDDEDMATSKKMITREEWEKKLNAVKLRKEDMNTLVMNFLVTEGYVEAAEKFQRESGTKPEIDLATITDRMAVKKAVQNGNVEDAIEKVNDLNPEILDTNPELFFHLQQQRLIELIRQGKTEEALEFAQEELAPRGGRKPSVSRRKXEKTVALLVFDDASTCPVKELLDLSHRLKTASEVNAAILTSQSHEKDPKLPSLLKMLIWAQNQLDEKAVYPHINDLSTG

SEQ ID NO: 21730 - protein, 220 aa, Arabidopsis thaliana
  peptide (1)..(220): Ceres Seq. ID no. 12384571
  misc_feature (3)..(216): Homolog of NCBI NO: 7487558 NR Description: hypothetical protein T30A10.60 - Arabidopsis
  misc_feature (8)..(219): Homolog of NCBI NO: 24643081 NR Description: CG6617-PA [Drosophila melanogaster]
  misc_feature (1)..(219): Homolog of NCBI NO: 26451919 NR Description: unknown protein [Arabidopsis thaliana]
  misc_feature (1)..(219): Homolog of NCBI NO: 37748055 NR Description: Unknown (protein for MGC:73100) [Danio rerio]
  misc_feature (8)..(219): Homolog of NCBI NO: 21594655 NR Description: chromosome 20 open reading frame 11 [Homo sapiens]
  misc_feature (8)..(219): Homolog of NCBI NO: 8923557 NR Description: chromosome 20 open reading frame 11
  misc_feature (8)..(219): Homolog of NCBI NO: 20863687 NR Description: RIKEN cDNA 2310003C23 [Mus musculus]
  misc_feature (1)..(219): Homolog of NCBI NO: 30681030 NR Description: expressed protein [Arabidopsis thaliana]
  misc_feature (1)..(219): Homolog of NCBI NO: 25404311 NR Description: hypothetical protein F11P17.12 [imported] -
  misc_feature (1)..(219): Homolog of NCBI NO: 15219873 NR Description: hypothetical protein; protein id: At1g61150.1
  misc_feature (142)..(142): Xaa is any aa, unknown or other
MATSKKMITREEWEKKLNAVKLRKEDMNTLVMNFLVTEGYVEAAEKFQRESGTKPEIDLATITDRMAVKKAVQNGNVEDAIEKVNDLNPEILDTNPELFFHLQQQRLIELIRQGKTEEALEFAQEELAPRGGRKPSVSRRKXEKTVALLVFDDASTCPVKELLDLSHRLKTASEVNAAILTSQSHEKDPKLPSLLKMLIWAQNQLDEKAVYPHINDLSTG

SEQ ID NO: 21731 - protein, 214 aa, Arabidopsis thaliana
  peptide (1)..(214): Ceres Seq. ID no. 12384572
  misc_feature (1)..(210): Homolog of NCBI NO: 7487558 NR Description: hypothetical protein T30A10.60 - Arabidopsis
  misc_feature (2)..(213): Homolog of NCBI NO: 24643081 NR Description: CG6617-PA [Drosophila melanogaster]
  misc_feature (1)..(213): Homolog of NCBI NO: 26451919 NR Description: unknown protein [Arabidopsis thaliana]
  misc_feature (1)..(213): Homolog of NCBI NO: 37748055 NR Description: Unknown (protein for MGC:73100) [Danio rerio]
  misc_feature (2)..(213): Homolog of NCBI NO: 21594655 NR Description: chromosome 20 open reading frame 11 [Homo sapiens]
  misc_feature (2)..(213): Homolog of NCBI NO: 8923557 NR Description: chromosome 20 open reading frame 11
  misc_feature (2)..(213): Homolog of NCBI NO: 20863687 NR Description: RIKEN cDNA 2310003C23 [Mus musculus]
  misc_feature (1)..(213): Homolog of NCBI NO: 30681030 NR Description: expressed protein [Arabidopsis thaliana]
  misc_feature (1)..(213): Homolog of NCBI NO: 25404311 NR Description: hypothetical protein F11P17.12 [imported] -
  misc_feature (1)..(213): Homolog of NCBI NO: 15219873 NR Description: hypothetical protein; protein id: At1g61150.1
  misc_feature (136)..(136): Xaa is any aa, unknown or other
MITREEWEKKLNAVKLRKEDMNTLVMNFLVTEGYVEAAEKFQRESGTKPEIDLATITDRMAVKKAVQNGNVEDAIEKVNDLNPEILDTNPELFFHLQQQRLIELIRQGKTEEALEFAQEELAPRGGRKPSVSRRKXEKTVALLVFDDASTCPVKELLDLSHRLKTASEVNAAILTSQSHEKDPKLPSLLKMLIWAQNQLDEKAVYPHINDLSTG

SEQ ID NO: 21732 - DNA, 651 bp, Arabidopsis thaliana
  misc_feature (1)..(651): Ceres Seq. ID no. 12340144
  misc_feature: MA Experiment ID: 108434 Result: Down-regulated in Transcription
  misc_feature: MA Experiment 108434 PARAMETER Experiment Name: At_Root_Tips_cDNA_P Parameter: Tissue Value: Root Tips
  misc_feature: MA Experiment ID: 108435 Result: Down-regulated in Transcription
  misc_feature: MA Experiment 108435 PARAMETER Experiment Name: At_stm_Mutants_cDNA_P Parameter: Plant Line Value: wt Landsburg vs stm
  misc_feature: MA Experiment 108435 PARAMETER Experiment Name: At_stm_Mutants_cDNA_P Parameter: Tissue Value: Shoot Apical Meristem Region
  misc_feature: MA Experiment ID: 108461 Result: Up-regulated in Transcription
  misc_feature: MA Experiment 108461 PARAMETER Experiment Name: At_Germinating_Seeds_cDNA_P Parameter: Age (day) Value: 1 vs. 0
  misc_feature: MA Experiment 108461 PARAMETER Experiment Name: At_Germinating_Seeds_cDNA_P Parameter: Tissue Value: Germinating Seeds
  misc_feature: MA Experiment ID: 108462 Result: Up-regulated in Transcription
  misc_feature: MA Experiment 108462 PARAMETER Experiment Name: At_Germinating_Seeds_cDNA_P Parameter: Age (day) Value: 2 vs. 0
  misc_feature: MA Experiment 108462 PARAMETER Experiment Name: At_Germinating_Seeds_cDNA_P Parameter: Tissue Value: Germinating Seeds
  misc_feature: MA Experiment ID: 108464 Result: Up-regulated in Transcription
  misc_feature: MA Experiment 108464 PARAMETER Experiment Name: At_Germinating_Seeds_cDNA_P Parameter: Age (day) Value: 4 vs. 0
  misc_feature: MA Experiment 108464 PARAMETER Experiment Name: At_Germinating_Seeds_cDNA_P Parameter: Tissue Value: Germinating Seeds
  misc_feature: MA Experiment ID: 108501 Result: Down-regulated in Transcription
  misc_feature: MA Experiment 108501 PARAMETER Experiment Name: At_ap2_floral_buds_cDNA_P Parameter: Plant Line Value: ap2 (Ler.)
  misc_feature: MA Experiment 108501 PARAMETER Experiment Name: At_ap2_floral_buds_cDNA_P Parameter: Tissue Value: Closed Flower
  misc_feature: MA Experiment ID: 108577 Result: Down-regulated in Transcription
  misc_feature: MA Experiment 108577 PARAMETER Experiment Name: At_42deg_Heat_cDNA_P Parameter: Temperature (deg C) Value: 42 vs. 22
  misc_feature: MA Experiment 108577 PARAMETER Experiment Name: At_42deg_Heat_cDNA_P Parameter: Timepoint (hr) Value: 6
  misc_feature: MA Experiment 108577 PARAMETER Experiment Name: At_42deg_Heat_cDNA_P Parameter: Tissue Value: Aerial
  misc_feature: MA Experiment ID: 108607 Result: Up-regulated in Transcription
  misc_feature: MA Experiment 108607 PARAMETER Experiment Name: At_100uM_ABA_cDNA_P Parameter: Timepoint (hr) Value: 4
  misc_feature: MA Experiment 108607 PARAMETER Experiment Name: At_100uM_ABA_cDNA_P Parameter: Tissue Value: Aerial
  misc_feature: MA Experiment 108607 PARAMETER Experiment Name: At_100uM_ABA_cDNA_P Parameter: Treatment Value: 100uM ABA vs. No Treatment
  misc_feature: MA Experiment ID: 20000072 Result: Up-regulated in Transcription
  misc_feature: MA Experiment 20000072 PARAMETER Experiment Name: At_100uM_ABA_Mutants_cDNA_P Parameter: Plant Line Value: CS8105
  misc_feature: MA Experiment 20000072 PARAMETER Experiment Name: At_100uM_ABA_Mutants_cDNA_P Parameter: Timepoint (hr) Value: 6
  misc_feature: MA Experiment 20000072 PARAMETER Experiment Name: At_100uM_ABA_Mutants_cDNA_P Parameter: Tissue Value: Aerial
  misc_feature: MA Experiment 20000072 PARAMETER Experiment Name: At_100uM_ABA_Mutants_cDNA_P Parameter: Treatment Value: 100uM ABA vs. No Treatment
  misc_feature: MA Experiment ID: 20000087 Result: Up-regulated in Transcription
  misc_feature: MA Experiment 20000087 PARAMETER Experiment Name: At_100uM_ABA_Mutants_cDNA_P Parameter: Plant Line Value: WS
  misc_feature: MA Experiment 20000087 PARAMETER Experiment Name: At_100uM_ABA_Mutants_cDNA_P Parameter: Timepoint (hr) Value: 6
  misc_feature: MA Experiment 20000087 PARAMETER Experiment Name: At_100uM_ABA_Mutants_cDNA_P Parameter: Tissue Value: Aerial
  misc_feature: MA Experiment 20000087 PARAMETER Experiment Name: At_100uM_ABA_Mutants_cDNA_P Parameter: Treatment Value: 100uM ABA vs. No Treatment
  misc_feature: MA Experiment ID: 20000111 Result: Down-regulated in Transcription
  misc_feature: MA Experiment 20000111 PARAMETER Experiment Name: At_42deg_Heat_cDNA_P Parameter: Temperature (deg C) Value: 42 vs. 22
  misc_feature: MA Experiment 20000111 PARAMETER Experiment Name: At_42deg_Heat_cDNA_P Parameter: Timepoint (hr) Value: 6
  misc_feature: MA Experiment 20000111 PARAMETER Experiment Name: At_42deg_Heat_cDNA_P Parameter: Tissue Value: Aerial
  misc_feature: MA Experiment ID: 20000112 Result: Down-regulated in Transcription
  misc_feature: MA Experiment 20000112 PARAMETER Experiment Name: At_42deg_Heat_cDNA_P Parameter: Temperature (deg C) Value: 42 vs. 22
  misc_feature: MA Experiment 20000112 PARAMETER Experiment Name: At_42deg_Heat_cDNA_P Parameter: Timepoint (hr) Value: 2
  misc_feature: MA Experiment 20000112 PARAMETER Experiment Name: At_42deg_Heat_cDNA_P Parameter: Tissue Value: Aerial
  misc_feature: MA Experiment ID: 20000113 Result: Down-regulated in Transcription
  misc_feature: MA Experiment 20000113 PARAMETER Experiment Name: At_42deg_Heat_cDNA_P Parameter: Temperature (deg C) Value: 42 vs. 22
  misc_feature: MA Experiment 20000113 PARAMETER Experiment Name: At_42deg_Heat_cDNA_P Parameter: Timepoint (hr) Value: 8
  misc_feature: MA Experiment 20000113 PARAMETER Experiment Name: At_42deg_Heat_cDNA_P Parameter: Tissue Value: Aerial
  misc_feature: MA Experiment ID: 20000117 Result: Up-regulated in Transcription
  misc_feature: MA Experiment 20000117 PARAMETER Experiment Name: At_100uM_ABA_Mutants_cDNA_P Parameter: Plant Line Value: Columbia
  misc_feature: MA Experiment 20000117 PARAMETER Experiment Name: At_100uM_ABA_Mutants_cDNA_P Parameter: Timepoint (hr) Value: 6
  misc_feature: MA Experiment 20000117 PARAMETER Experiment Name: At_100uM_ABA_Mutants_cDNA_P Parameter: Tissue Value: Aerial
  misc_feature: MA Experiment 20000117 PARAMETER Experiment Name: At_100uM_ABA_Mutants_cDNA_P Parameter: Treatment Value: 100uM ABA vs. No Treatment
  misc_feature: MA Experiment ID: 20000144 Result: Down-regulated in Transcription
  misc_feature: MA Experiment 20000144 PARAMETER Experiment Name: At_42deg_Heat_cDNA_P Parameter: Temperature (deg C) Value: 42 vs. 22
  misc_feature: MA Experiment 20000144 PARAMETER Experiment Name: At_42deg_Heat_cDNA_P Parameter: Timepoint (hr) Value: 1
  misc_feature: MA Experiment 20000144 PARAMETER Experiment Name: At_42deg_Heat_cDNA_P Parameter: Tissue Value: Aerial
  misc_feature: MA Experiment ID: 20000234 Result: Down-regulated in Transcription
  misc_feature: MA Experiment 20000234 PARAMETER Experiment Name: At_Siliques_P Parameter: Age (day) Value: 21
  misc_feature: MA Experiment 20000234 PARAMETER Experiment Name: At_Siliques_P Parameter: Organism Value: A. thaliana
  misc_feature: MA Experiment 20000234 PARAMETER Experiment Name: At_Siliques_P Parameter: Plant Line Value: WS
  misc_feature: MA Experiment 20000234 PARAMETER Experiment Name: At_Siliques_P Parameter: Tissue Value: Less Than 5mm Siliques vs. Whole Plant
  misc_feature: MA Experiment ID: 20000235 Result: Down-regulated in Transcription
  misc_feature: MA Experiment 20000235 PARAMETER Experiment Name: At_Siliques_P Parameter: Age (day) Value: 21
  misc_feature: MA Experiment 20000235 PARAMETER Experiment Name: At_Siliques_P Parameter: Organism Value: A. thaliana
  misc_feature: MA Experiment 20000235 PARAMETER Experiment Name: At_Siliques_P Parameter: Plant Line Value: WS
  misc_feature: MA Experiment 20000235 PARAMETER Experiment Name: At_Siliques_P Parameter: Tissue Value: 5-10mm Siliques vs. Whole Plant
  misc_feature: MA Experiment ID: 20001247 Result: Up-regulated in Transcription
  misc_feature: MA Experiment 20001247 PARAMETER Experiment Name: At_Far-red-induction_P Parameter: Age (day) Value: 7
  misc_feature: MA Experiment 20001247 PARAMETER Experiment Name: At_Far-red-induction_P Parameter: Light Value: Far-red vs. White
  misc_feature: MA Experiment 20001247 PARAMETER Experiment Name: At_Far-red-induction_P Parameter: Organism Value: A. thaliana
  misc_feature: MA Experiment 20001247 PARAMETER Experiment Name: At_Far-red-induction_P Parameter: Plant Line Value: Columbia
  misc_feature: MA Experiment 20001247 PARAMETER Experiment Name: At_Far-red-induction_P Parameter: Timepoint (hr) Value: 1
  misc_feature: MA Experiment 20001247 PARAMETER Experiment Name: At_Far-red-induction_P Parameter: Tissue Value: Whole Plant
  misc_feature: MA Experiment ID: 20001248 Result: Up-regulated in Transcription
  misc_feature: MA Experiment 20001248 PARAMETER Experiment Name: At_Far-red-induction_P Parameter: Age (day) Value: 7
  misc_feature: MA Experiment 20001248 PARAMETER Experiment Name: At_Far-red-induction_P Parameter: Light Value: Far-red vs. White
  misc_feature: MA Experiment 20001248 PARAMETER Experiment Name: At_Far-red-induction_P Parameter: Organism Value: A. thaliana
  misc_feature: MA Experiment 20001248 PARAMETER Experiment Name: At_Far-red-induction_P Parameter: Plant Line Value: Columbia
  misc_feature: MA Experiment 20001248 PARAMETER Experiment Name: At_Far-red-induction_P Parameter: Timepoint (hr) Value: 4
  misc_feature: MA Experiment 20001248 PARAMETER Experiment Name: At_Far-red-induction_P Parameter: Tissue Value: Whole Plant
  misc_feature: MA Experiment ID: 20001450 Result: Up-regulated in Transcription
  misc_feature: MA Experiment 20001450 PARAMETER Experiment Name: At_Far-red-induction_P Parameter: Age (day) Value: 7
  misc_feature: MA Experiment 20001450 PARAMETER Experiment Name: At_Far-red-induction_P Parameter: Light Value: Far-red vs. White
  misc_feature: MA Experiment 20001450 PARAMETER Experiment Name: At_Far-red-induction_P Parameter: Organism Value: A. thaliana
  misc_feature: MA Experiment 20001450 PARAMETER Experiment Name: At_Far-red-induction_P Parameter: Plant Line Value: Columbia
  misc_feature: MA Experiment 20001450 PARAMETER Experiment Name: At_Far-red-induction_P Parameter: Timepoint (hr) Value: 8
  misc_feature: MA Experiment 20001450 PARAMETER Experiment Name: At_Far-red-induction_P Parameter: Tissue Value: Whole Plant
  misc_feature: MA Experiment ID: 20001560 Result: Down-regulated in Transcription
  misc_feature: MA Experiment 20001560 PARAMETER Experiment Name: At_Drought_Soil_Dry_P Parameter: Age (day) Value: 28
  misc_feature: MA Experiment 20001560 PARAMETER Experiment Name: At_Drought_Soil_Dry_P Parameter: Organism Value: A. thaliana
  misc_feature: MA Experiment 20001560 PARAMETER Experiment Name: At_Drought_Soil_Dry_P Parameter: Plant Line Value: WS
  misc_feature: MA Experiment 20001560 PARAMETER Experiment Name: At_Drought_Soil_Dry_P Parameter: Post Timepoint (hr) Value: None
  misc_feature: MA Experiment 20001560 PARAMETER Experiment Name: At_Drought_Soil_Dry_P Parameter: Post-Treatment Value: None
  misc_feature: MA Experiment 20001560 PARAMETER Experiment Name: At_Drought_Soil_Dry_P Parameter: Timepoint (day) Value: 14
  misc_feature: MA Experiment 20001560 PARAMETER Experiment Name: At_Drought_Soil_Dry_P Parameter: Treatment Value: Drought vs. No Drought
atatttgaagttcgtggattttgaaggatttgattggtttccatgatctagagttttgagaatggcgatggtatcaggaagacgatctactctaaaccccgacgcacctctttttattccggcagctgtacgacaagtggaagatttctcaccggagtggtggcaattggtgacaacttcgacttggtaccctgattactggatcagtcagcagcagcaaggcgcggatggtttctatgacaacggagagaatgagaatggtggaggtcatatcgatgtagctgatcttcttccagaatcattttattttgatgatatggaagatttctttgacactgatgctgctgagtttgatcaaggattcgatggaagaatgtattaccaagcaccttccgaatttggctttggaaagaatggtgagatggttaagaaatcaagtggaaacaggagcccgagatcgattgtggaaccagctaagtatgcggaaaagccagcgaaatggggaaaccagagggttgctgctgctccgagaaacatccaccagcctcgctgaagagatatgttgttaactagtcagagaagtcagagcagttcggtctgtgtatctttagccaccactgtacctttgtaatttttagtatttgcttccac

SEQ ID NO: 21733 - protein, 163 aa, Arabidopsis thaliana
  peptide (1)..(163): Ceres Seq. ID no. 12340145
  misc_feature (2)..(58): Homolog of NCBI NO: 21592596 NR Description: unknown [Arabidopsis thaliana]
  misc_feature (2)..(58): Homolog of NCBI NO: 18414176 NR Description: Expressed protein
  misc_feature (9)..(163): Homolog of NCBI NO: 34899128 NR Description: P0496C02.30 [Oryza sativa (japonica
  misc_feature (9)..(163): Homolog of NCBI NO: 34395186 NR Description: unknown protein [Oryza sativa (japonica
  misc_feature (9)..(163): Homolog of NCBI NO: 32352142 NR Description: hypothetical protein [Oryza sativa (japonica
  misc_feature (1)..(163): Homolog of NCBI NO: 8489786 NR Description: dehydration-induced protein ERD15 [Lycopersicon
  misc_feature (1)..(163): Homolog of NCBI NO: 15227351 NR Description: ERD15 protein
  misc_feature (1)..(163): Homolog of NCBI NO: 21592689 NR Description: ERD15 protein [Arabidopsis thaliana]
MAMVSGRRSTLNPDAPLFIPAAVRQVEDFSPEWWQLVTTSTWYPDYWISQQQQGADGFYDNGENENGGGHIDVADLLPESFYFDDMEDFFDTDAAEFDQGFDGRMYYQAPSEFGFGKNGEMVKKSSGNRSPRSIVEPAKYAEKPAKWGNQRVAAAPRNIHQPR

SEQ ID NO: 21734 - protein, 161 aa, Arabidopsis thaliana
  peptide (1)..(161): Ceres Seq. ID no. 12340146
  misc_feature (1)..(56): Homolog of NCBI NO: 21592596 NR Description: unknown [Arabidopsis thaliana]
  misc_feature (1)..(56): Homolog of NCBI NO: 18414176 NR Description: Expressed protein
  misc_feature (7)..(161): Homolog of NCBI NO: 34899128 NR Description: P0496C02.30 [Oryza sativa (japonica
  misc_feature (7)..(161): Homolog of NCBI NO: 34395186 NR Description: unknown protein [Oryza sativa (japonica
  misc_feature (7)..(161): Homolog of NCBI NO: 32352142 NR Description: hypothetical protein [Oryza sativa (japonica
  misc_feature (1)..(161): Homolog of NCBI NO: 8489786 NR Description: dehydration-induced protein ERD15 [Lycopersicon
  misc_feature (1)..(161): Homolog of NCBI NO: 15227351 NR Description: ERD15 protein
  misc_feature (1)..(161): Homolog of NCBI NO: 21592689 NR Description: ERD15 protein [Arabidopsis thaliana]
MVSGRRSTLNPDAPLFIPAAVRQVEDFSPEWWQLVTTSTWYPDYWISQQQQGADGFYDNGENENGGGHIDVADLLPESFYFDDMEDFFDTDAAEFDQGFDGRMYYQAPSEFGFGKNGEMVKKSSGNRSPRSIVEPAKYAEKPAKWGNQRVAAAPRNIHQPR

SEQ ID NO: 21735 - protein, 85 aa, Arabidopsis thaliana; identical to SEQ ID NO: 20803
  peptide (1)..(85): Ceres Seq. ID no. 12340147

SEQ ID NO: 21736 - DNA, 2530 bp, Arabidopsis thaliana
  misc_feature (1)..(2530): Ceres Seq. ID no. 12422840
  misc_feature: MA Experiment ID: 108434 Result: Down-regulated in Transcription
  misc_feature: MA Experiment 108434 PARAMETER Experiment Name: At_Root_Tips_cDNA_P Parameter: Tissue Value: Root Tips
  misc_feature: MA Experiment ID: 108461 Result: Up-regulated in Transcription
  misc_feature: MA Experiment 108461 PARAMETER Experiment Name: At_Germinating_Seeds_cDNA_P Parameter: Age (day) Value: 1 vs. 0
  misc_feature: MA Experiment 108461 PARAMETER Experiment Name: At_Germinating_Seeds_cDNA_P Parameter: Tissue Value: Germinating Seeds
  misc_feature: MA Experiment ID: 108462 Result: Up-regulated in Transcription
  misc_feature: MA Experiment 108462 PARAMETER Experiment Name: At_Germinating_Seeds_cDNA_P Parameter: Age (day) Value: 2 vs. 0
  misc_feature: MA Experiment 108462 PARAMETER Experiment Name: At_Germinating_Seeds_cDNA_P Parameter: Tissue Value: Germinating Seeds
  misc_feature: MA Experiment ID: 108463 Result: Up-regulated in Transcription
  misc_feature: MA Experiment 108463 PARAMETER Experiment Name: At_Germinating_Seeds_cDNA_P Parameter: Age (day) Value: 3 vs. 0
  misc_feature: MA Experiment 108463 PARAMETER Experiment Name: At_Germinating_Seeds_cDNA_P Parameter: Tissue Value: Germinating Seeds
  misc_feature: MA Experiment ID: 108464 Result: Up-regulated in Transcription
  misc_feature: MA Experiment 108464 PARAMETER Experiment Name: At_Germinating_Seeds_cDNA_P Parameter: Age (day) Value: 4 vs. 0
  misc_feature: MA Experiment 108464 PARAMETER Experiment Name: At_Germinating_Seeds_cDNA_P Parameter: Tissue Value: Germinating Seeds
  misc_feature: MA Experiment ID: 108469 Result: Up-regulated in Transcription
  misc_feature: MA Experiment ID: 108573 Result: Up-regulated in Transcription
  misc_feature: MA Experiment 108573 PARAMETER Experiment Name: At_Drought_cDNA_P Parameter: Timepoint (hr) Value: 6
  misc_feature: MA Experiment 108573 PARAMETER Experiment Name: At_Drought_cDNA_P Parameter: Tissue Value: Aerial
  misc_feature: MA Experiment 108573 PARAMETER Experiment Name: At_Drought_cDNA_P Parameter: Treatment Value: Drought vs. No Drought
  misc_feature: MA Experiment ID: 108668 Result: Up-regulated in Transcription
  misc_feature: MA Experiment 108668 PARAMETER Experiment Name: At_2mM_SA_cDNA_P Parameter: Plant Line Value: WS
  misc_feature: MA Experiment 108668 PARAMETER Experiment Name: At_2mM_SA_cDNA_P Parameter: Timepoint (hr) Value: 6
  misc_feature: MA Experiment 108668 PARAMETER Experiment Name: At_2mM_SA_cDNA_P Parameter: Treatment Value: 2mM SA vs. No Treatment
  misc_feature: MA Experiment ID: 20000179 Result: Up-regulated in Transcription
  misc_feature: MA Experiment 20000179 PARAMETER Experiment Name: At_Germinating_Seeds_P Parameter: Age (hr) Value: 6 vs. 0
  misc_feature: MA Experiment 20000179 PARAMETER Experiment Name: At_Germinating_Seeds_P Parameter: Tissue Value: Germinating Seeds
  misc_feature: MA Experiment ID: 20000180 Result: Up-regulated in Transcription
  misc_feature: MA Experiment 20000180 PARAMETER Experiment Name: At_Germinating_Seeds_P Parameter: Age (hr) Value: 24 vs. 0
  misc_feature: MA Experiment 20000180 PARAMETER Experiment Name: At_Germinating_Seeds_P Parameter: Tissue Value: Germinating Seeds
  misc_feature: MA Experiment ID: 20000182 Result: Up-regulated in Transcription
  misc_feature: MA Experiment 20000182 PARAMETER Experiment Name: At_2mM_SA_P Parameter: Age (day) Value: 14
  misc_feature: MA Experiment 20000182 PARAMETER Experiment Name: At_2mM_SA_P Parameter: Organism Value: A. thaliana
  misc_feature: MA Experiment 20000182 PARAMETER Experiment Name: At_2mM_SA_P Parameter: Plant Line Value: WS
  misc_feature: MA Experiment 20000182 PARAMETER Experiment Name: At_2mM_SA_P Parameter: Timepoint (hr) Value: 6
  misc_feature: MA Experiment 20000182 PARAMETER Experiment Name: At_2mM_SA_P Parameter: Tissue Value: Aerial
  misc_feature: MA Experiment 20000182 PARAMETER Experiment Name: At_2mM_SA_P Parameter: Treatment Value: 2mM SA vs. No Treatment
  misc_feature: MA Experiment ID: 20000184 Result: Down-regulated in Transcription
  misc_feature: MA Experiment 20000184 PARAMETER Experiment Name: At_Shoots__P Parameter: Age (day) Value: 7
  misc_feature: MA Experiment 20000184 PARAMETER Experiment Name: At_Shoots__P Parameter: Tissue Value: Shoots vs. Whole Plant
  misc_feature: MA Experiment ID: 20000265 Result: Down-regulated in Transcription
  misc_feature: MA Experiment 20000265 PARAMETER Experiment Name: At_Open_Flower_P Parameter: Age (day) Value: 21
  misc_feature: MA Experiment 20000265 PARAMETER Experiment Name: At_Open_Flower_P Parameter: Plant Line Value: WS
  misc_feature: MA Experiment 20000265 PARAMETER Experiment Name: At_Open_Flower_P Parameter: Tissue Value: Closed Flower vs. Whole Plant
  misc_feature: MA Experiment ID: 20000438 Result: Down-regulated in Transcription
  misc_feature: MA Experiment 20000438 PARAMETER Experiment Name: At_Shoots__P Parameter: Age (day) Value: 14
  misc_feature: MA Experiment 20000438 PARAMETER Experiment Name: At_Shoots__P Parameter: Tissue Value: Shoots vs. Whole Plant
  misc_feature: MA Experiment ID: 20001451 Result: Down-regulated in Transcription
  misc_feature: MA Experiment 20001451 PARAMETER Experiment Name: At_Far-red-induction_P Parameter: Age (day) Value: 7
  misc_feature: MA Experiment 20001451 PARAMETER Experiment Name: At_Far-red-induction_P Parameter: Light Value: Far-red vs. White
  misc_feature: MA Experiment 20001451 PARAMETER Experiment Name: At_Far-red-induction_P Parameter: Organism Value: A. thaliana
  misc_feature: MA Experiment 20001451 PARAMETER Experiment Name: At_Far-red-induction_P Parameter: Plant Line Value: Columbia
  misc_feature: MA Experiment 20001451 PARAMETER Experiment Name: At_Far-red-induction_P Parameter: Timepoint (hr) Value: 24
  misc_feature: MA Experiment 20001451 PARAMETER Experiment Name: At_Far-red-induction_P Parameter: Tissue Value: Whole Plant
  misc_feature: MA Experiment ID: 20001757 Result: Down-regulated in Transcription
  misc_feature: MA Experiment 20001757 PARAMETER Experiment Name: At_50mM_NH4NO3_L-to-H_P Parameter: Timepoint (hr) Value: 6
  misc_feature: MA Experiment 20001757 PARAMETER Experiment Name: At_50mM_NH4NO3_L-to-H_P Parameter: Tissue Value: Leaf
  misc_feature: MA Experiment 20001757 PARAMETER Experiment Name: At_50mM_NH4NO3_L-to-H_P Parameter: Treatment Value: 50mM NH4NO3 vs 100mM Mannitol
aaccatctcactttcttttttctgtcttacactccaagatcggtctcgatggcttcgttcatagatcttttcgccggcgacatcacgacgcaactcttaaagctgctcgctctagtagctaacacagtctacagttgcaaaggaatcgccgaacgactgatcacgatgatcagagacgttcaaccaacgatcagggagatccaatacagtggcgcggagctgagtaaccatcaccaaactcaactgggagtattctatgagatcttggagaaagcaagaaagctatgtgaaaaggttttaagatgcaataggtggaaccttaaacatgtgtaccacgcgaataagatgaaggatctcgagaaaaaaatatctcgtttcctcaacagccagattttgctctttgttcttgctgaggtatgtcatctacgggtcaatggtgacaggattgagaggaatatggatagactgttgactgagcggaatgattctttgtcgtttccggagactatgatggagattgagacggtaagcgatccggagattcagacggtattggaattggggaagaaaaaggtgaaggagatgatgtttaagtttacggatacacatttgtttgggatctctggaatgagcggttcagggaaaaccactcttgcaatagagctttcaaaggacgatgatgttcgaggactctttaagaataaggttttgtttttgactgtgtcacggtctccgaattttgagaatttggagtcttgtatacgagaatttctttatgatggagttcatcaacggaagctagtgattcttgatgatgtttggacaagggagtccttggacaggctgatgtctaaaattcgtggaagcactactttagtagtgtcacggtccaagcttgcagatcctagaaccacctacaatgtggaattattaaagaaagatgaagcaatgtctcttttgtgtctctgtgctttcgaacaaaagtccccgccttctccattcaacaaatatttggtgaagcaggttgttgatgagtgtaaaggtttacctttatctttgaaagttcttggtgcttcgttaaaaaacaaacctgaaagatattgggaaggcgtagtgaagaggttattaagaggagaagctgctgatgaaactcatgagagcagagtgtttgctcatatggaagaaagtctagaaaacctcgacccgaaaatccgagactgtttcttggatatgggtgctttccctgaagacaagaagatccctcttgatcttctcacgagcgtgtgggttgagaggcatgatgttgacgaggaaactgcgttttcctttgttcttcgtttagctgacaagaatctccttactatagtgaacaatccgaggtttggcgatgtgcacattggctactatgatgtatttgtgacgcaacacgatgttttgagagacctagcccttcatatgtccaatcgtgtggacgtaaataggagagagcggttattaatgccaaaaacagagccaatgcttccaagagaatgggaaaagaataaagatgagccatttgatgccaagatagtttcccttcatacagtggaaatggatgaaatgaattggtttgacatggacctccctaaggcagaagttttaatactgaacttctcttcggacaactacgtcttgccaccatttattggtaagatgagtagactcagggtgctcgtgattatcaacaatggcatgtctcctgcgcgtctacatggcttctccatctttgccaatttggccaaactgaggagtctctggctcaagagggtacatgtccctgaactcaccagctgcaccattccactgaaaaacctgcacaagatgcatctaatcttttgtaaggtcaagaacagctttgttcagacgtcattcgacatctcgaaaatattcccaagcttgtctgatctcactattgatcactgtgatgatcttttggaactaaaatccatatttggaataacctctctcaactctctcagcataaccaactgtccacggattcttgaattgcccaagaatttgagtaacgtacagtcccttgaacgtctaaggttatatgcctgccccgagctgatatccctcccggtcgaagtttgtgagctgccatgtctaaagtacgttgacatttcacagtgtgtcagcctggtttctcttcctgaaaagtttggaaagctagggagtcttgagaaaattgacatgagagaatgcagtttattgggtttaccaagttctgtagctgcacttgtgtctctacgccatgtcatttgcgatgaggagacttcgtctatgtgggaaatggtcaagaaggtggttcctgaactttgcattgaagtcgccaaaaaatgcttcaccgtggattggcttgacgattaggcttcttgttccttcaaactcttgataaccccttgtattaatcattgatcagcagtaattagagcgagttatttgaagtttggaatgtttctctctatatataagatcatttttagct

SEQ ID NO: 21737 - protein, 803 aa, Arabidopsis thaliana
  peptide (1)..(803): Ceres Seq. ID no. 12422841
  misc_feature (263)..(430): Pfam Name: NB-ARC domain Pfam Description: NB-ARC domain
  misc_feature (338)..(803): Homolog of NCBI NO: 21655203 NR Description: NBS/LRR [Pinus taeda]
  misc_feature (25)..(247): Homolog of NCBI NO: 15240127 NR Description: disease resistance protein (CC-NBS-LRR class),
  misc_feature (250)..(787): Homolog of NCBI NO: 15240127 NR Description: disease resistance protein (CC-NBS-LRR class),
  misc_feature (195)..(803): Homolog of NCBI NO: 15238054 NR Description: disease resistance protein (NBS-LRR class),
  misc_feature (171)..(803): Homolog of NCBI NO: 30689664 NR Description: disease resistance protein (CC-NBS-LRR class),
  misc_feature (22)..(258): Homolog of NCBI NO: 7485661 NR Description: hypothetical protein F17M5.60 - Arabidopsis
  misc_feature (527)..(803): Homolog of NCBI NO: 7485661 NR Description: hypothetical protein F17M5.60 - Arabidopsis
  misc_feature (257)..(528): Homolog of NCBI NO: 7485661 NR Description: hypothetical protein F17M5.60 - Arabidopsis
  misc_feature (22)..(214): Homolog of NCBI NO: 15238281 NR Description: disease resistance protein (CC-NBS-LRR class),
  misc_feature (162)..(803): Homolog of NCBI NO: 15238281 NR Description: disease resistance protein (CC-NBS-LRR class),
NHLTFFFLSYTPRSVSMASFIDLFAGDITTQLLKLLALVANTVYSCKGIAERLITMIRDVQPTIREIQYSGAELSNHHQTQLGVFYEILEKARKLCEKVLRCNRWNLKHVYHANKMKDLEKKISRFLNSQILLFVLAEVCHLRVNGDRIERNMDRLLTERNDSLSFPETMMEIETVSDPEIQTVLELGKKKVKEMMFKFTDTHLFGISGMSGSGKTTLAIELSKDDDVRGLFKNKVLFLTVSRSPNFENLESCIREFLYDGVHQRKLVILDDVWTRESLDRLMSKIRGSTTLVVSRSKLADPRTTYNVELLKKDEAMSLLCLCAFEQKSPPSPFNKYLVKQVVDECKGLPLSLKVLGASLKNKPERYWEGVVKRLLRGEAADETHESRVFAHMEESLENLDPKIRDCFLDMGAFPEDKKIPLDLLTSVWVERHDVDEETAFSFVLRLADKNLLTIVNNPRFGDVHIGYYDVFVTQHDVLRDLALHMSNRVDVNRRERLLMPKTEPMLPREWEKNKDEPFDAKIVSLHTVEMDEMNWFDMDLPKAEVLILNFSSDNYVLPPFIGKMSRLRVLVIINNGMSPARLHGFSIFANLAKLRSLWLKRVHVPELTSCTIPLKNLHKMHLIFCKVKNSFVQTSFDISKIFPSLSDLTIDHCDDLLELKSIFGITSLNSLSITNCPRILELPKNLSNVQSLERLRLYACPELISLPVEVCELPCLKYVDISQCVSLVSLPEKFGKLGSLEKIDMRECSLLGLPSSVAALVSLRHVICDEETSSMWEMVKKVVPELCIEVAKKCFTVDWLDD

SEQ ID NO: 21738 - protein, 787 aa, Arabidopsis thaliana
  peptide (1)..(787): Ceres Seq. ID no. 12422842
  misc_feature (247)..(414): Pfam Name: NB-ARC domain Pfam Description: NB-ARC domain
  misc_feature (322)..(787): Homolog of NCBI NO: 21655203 NR Description: NBS/LRR [Pinus taeda]
  misc_feature (9)..(231): Homolog of NCBI NO: 15240127 NR Description: disease resistance protein (CC-NBS-LRR class),
  misc_feature (234)..(771): Homolog of NCBI NO: 15240127 NR Description: disease resistance protein (CC-NBS-LRR class),
  misc_feature (179)..(787): Homolog of NCBI NO: 15238054 NR Description: disease resistance protein (NBS-LRR class),
  misc_feature (155)..(787): Homolog of NCBI NO: 30689664 NR Description: disease resistance protein (CC-NBS-LRR class),
  misc_feature (6)..(242): Homolog of NCBI NO: 7485661 NR Description: hypothetical protein F17M5.60 - Arabidopsis
  misc_feature (511)..(787): Homolog of NCBI NO: 7485661 NR Description: hypothetical protein F17M5.60 - Arabidopsis
  misc_feature (241)..(512): Homolog of NCBI NO: 7485661 NR Description: hypothetical protein F17M5.60 - Arabidopsis
  misc_feature (6)..(198): Homolog of NCBI NO: 15238281 NR Description: disease resistance protein (CC-NBS-LRR class),
  misc_feature (146)..(787): Homolog of NCBI NO: 15238281 NR Description: disease resistance protein (CC-NBS-LRR class),
MASFIDLFAGDITTQLLKLLALVANTVYSCKGIAERLITMIRDVQPTIREIQYSGAELSNHHQTQLGVFYEILEKARKLCEKVLRCNRWNLKHVYHANKMKDLEKKISRFLNSQILLFVLAEVCHLRVNGDRIERNMDRLLTERNDSLSFPETMMEIETVSDPEIQTVLELGKKKVKEMMFKFTDTHLFGISGMSGSGKTTLAIELSKDDDVRGLFKNKVLFLTVSRSPNFENLESCIREFLYDGVHQRKLVILDDVWTRESLDRLMSKIRGSTTLVVSRSKLADPRTTYNVELLKKDEAMSLLCLCAFEQKSPPSPFNKYLVKQVVDECKGLPLSLKVLGASLKNKPERYWEGVVKRLLRGEAADETHESRVFAHMEESLENLDPKIRDCFLDMGAFPEDKKIPLDLLTSVWVERHDVDEETAFSFVLRLADKNLLTIVNNPRFGDVHIGYYDVFVTQHDVLRDLALHMSNRVDVNRRERLLMPKTEPMLPREWEKNKDEPFDAKIVSLHTVEMDEMNWFDMDLPKAEVLILNFSSDNYVLPPFIGKMSRLRVLVIINNGMSPARLHGFSIFANLAKLRSLWLKRVHVPELTSCTIPLKNLHKMHLIFCKVKNSFVQTSFDISKIFPSLSDLTIDHCDDLLELKSIFGITSLNSLSITNCPRILELPKNLSNVQSLERLRLYACPELISLPVEVCELPCLKYVDISQCVSLVSLPEKFGKLGSLEKIDMRECSLLGLPSSVAALVSLRHVICDEETSSMWEMVKKVVPELCIEVAKKCFTVDWLDD

SEQ ID NO: 21739 - protein, 748 aa, Arabidopsis thaliana
  peptide (1)..(748): Ceres Seq. ID no. 12422843
  misc_feature (208)..(375): Pfam Name: NB-ARC domain Pfam Description: NB-ARC domain
  misc_feature (472)..(748): Homolog of NCBI NO: 7485661 NR Description: hypothetical protein F17M5.60 - Arabidopsis
  misc_feature (202)..(473): Homolog of NCBI NO: 7485661 NR Description: hypothetical protein F17M5.60 - Arabidopsis
  misc_feature (283)..(748): Homolog of NCBI NO: 21655203 NR Description: NBS/LRR [Pinus taeda]
  misc_feature (195)..(732): Homolog of NCBI NO: 15240127 NR Description: disease resistance protein (CC-NBS-LRR class),
  misc_feature (116)..(748): Homolog of NCBI NO: 30689664 NR Description: disease resistance protein (CC-NBS-LRR class),
  misc_feature (1)..(203): Homolog of NCBI NO: 7485661 NR Description: hypothetical protein F17M5.60 - Arabidopsis
  misc_feature (140)..(748): Homolog of NCBI NO: 15238054 NR Description: disease resistance protein (NBS-LRR class),
  misc_feature (1)..(192): Homolog of NCBI NO: 15240127 NR Description: disease resistance protein (CC-NBS-LRR class),
  misc_feature (1)..(159): Homolog of NCBI NO: 15238281 NR Description: disease resistance protein (CC-NBS-LRR class),
  misc_feature (107)..(748): Homolog of NCBI NO: 15238281 NR Description: disease resistance protein (CC-NBS-LRR class),
MIRDVQPTIREIQYSGAELSNHHQTQLGVFYEILEKARKLCEKVLRCNRWNLKHVYHANKMKDLEKKISRFLNSQILLFVLAEVCHLRVNGDRIERNMDRLLTERNDSLSFPETMMEIETVSDPEIQTVLELGKKKVKEMMFKFTDTHLFGISGMSGSGKTTLAIELSKDDDVRGLFKNKVLFLTVSRSPNFENLESCIREFLYDGVHQRKLVILDDVWTRESLDRLMSKIRGSTTLVVSRSKLADPRTTYNVELLKKDEAMSLLCLCAFEQKSPPSPFNKYLVKQVVDECKGLPLSLKVLGASLKNKPERYWEGVVKRLLRGEAADETHESRVFAHMEESLENLDPKIRDCFLDMGAFPEDKKIPLDLLTSVWVERHDVDEETAFSFVLRLADKNLLTIVNNPRFGDVHIGYYDVFVTQHDVLRDLALHMSNRVDVNRRERLLMPKTEPMLPREWEKNKDEPFDAKIVSLHTVEMDEMNWFDMDLPKAEVLILNFSSDNYVLPPFIGKMSRLRVLVIINNGMSPARLHGFSIFANLAKLRSLWLKRVHVPELTSCTIPLKNLHKMHLIFCKVKNSFVQTSFDISKIFPSLSDLTIDHCDDLLELKSIFGITSLNSLSITNCPRILELPKNLSNVQSLERLRLYACPELISLPVEVCELPCLKYVDISQCVSLVSLPEKFGKLGSLEKIDMRECSLLGLPSSVAALVSLRHVICDEETSSMWEMVKKVVPELCIEVAKKCFTVDWLDD

SEQ ID NO: 21740 - DNA, 704 bp, Arabidopsis thaliana
  misc_feature (1)..(704): Ceres Seq. ID no. 12337877
  misc_feature: MA Experiment ID: 20000180 Result: Up-regulated in Transcription
  misc_feature: MA Experiment 20000180 PARAMETER Experiment Name: At_Germinating_Seeds_P Parameter: Age (hr) Value: 24 vs. 0
  misc_feature: MA Experiment 20000180 PARAMETER Experiment Name: At_Germinating_Seeds_P Parameter: Tissue Value: Germinating Seeds
  misc_feature: MA Experiment ID: 20000185 Result: Down-regulated in Transcription
  misc_feature: MA Experiment 20000185 PARAMETER Experiment Name: At_Roots__P Parameter: Age (day) Value: 7 vs. 21
  misc_feature: MA Experiment 20000185 PARAMETER Experiment Name: At_Roots__P Parameter: Organism Value: A. thaliana
  misc_feature: MA Experiment 20000185 PARAMETER Experiment Name: At_Roots__P Parameter: Tissue Value: Roots vs. Whole Plant
  misc_feature: MA Experiment ID: 20000439 Result: Down-regulated in Transcription
  misc_feature: MA Experiment 20000439 PARAMETER Experiment Name: At_Roots__P Parameter: Age (day) Value: 14 vs. 21
  misc_feature: MA Experiment 20000439 PARAMETER Experiment Name: At_Roots__P Parameter: Organism Value: A. thaliana
  misc_feature: MA Experiment 20000439 PARAMETER Experiment Name: At_Roots__P Parameter: Tissue Value: Roots vs. Whole Plant
  misc_feature: MA Experiment ID: 20000451 Result: Down-regulated in Transcription
  misc_feature: MA Experiment 20000451 PARAMETER Experiment Name: At_CS6879_Shoots-Roots_P Parameter: Age (day) Value: 14
  misc_feature: MA Experiment 20000451 PARAMETER Experiment Name: At_CS6879_Shoots-Roots_P Parameter: Organism Value: A. thaliana
  misc_feature: MA Experiment 20000451 PARAMETER Experiment Name: At_CS6879_Shoots-Roots_P Parameter: Plant Line Value: CS6879 vs. WS
  misc_feature: MA Experiment 20000451 PARAMETER Experiment Name: At_CS6879_Shoots-Roots_P Parameter: Tissue Value: Roots
  misc_feature: MA Experiment ID: 20000794 Result: Down-regulated in Transcription
  misc_feature: MA Experiment 20000794 PARAMETER Experiment Name: At_Petals_P Parameter: Age (day) Value: 23-25 days
  misc_feature: MA Experiment 20000794 PARAMETER Experiment Name: At_Petals_P Parameter: Plant Line Value: WS
  misc_feature: MA Experiment 20000794 PARAMETER Experiment Name: At_Petals_P Parameter: Tissue Value: Petals vs. Whole plant
  misc_feature: MA Experiment ID: 20001248 Result: Down-regulated in Transcription
  misc_feature: MA Experiment 20001248 PARAMETER Experiment Name: At_Far-red-induction_P Parameter: Age (day) Value: 7
  misc_feature: MA Experiment 20001248 PARAMETER Experiment Name: At_Far-red-induction_P Parameter: Light Value: Far-red vs. White
  misc_feature: MA Experiment 20001248 PARAMETER Experiment Name: At_Far-red-induction_P Parameter: Organism Value: A. thaliana
  misc_feature: MA Experiment 20001248 PARAMETER Experiment Name: At_Far-red-induction_P Parameter: Plant Line Value: Columbia
  misc_feature: MA Experiment 20001248 PARAMETER Experiment Name: At_Far-red-induction_P Parameter: Timepoint (hr) Value: 4
  misc_feature: MA Experiment 20001248 PARAMETER Experiment Name: At_Far-red-induction_P Parameter: Tissue Value: Whole Plant
  misc_feature: MA Experiment ID: 20001450 Result: Down-regulated in Transcription
  misc_feature: MA Experiment 20001450 PARAMETER Experiment Name: At_Far-red-induction_P Parameter: Age (day) Value: 7
  misc_feature: MA Experiment 20001450 PARAMETER Experiment Name: At_Far-red-induction_P Parameter: Light Value: Far-red vs. White
  misc_feature: MA Experiment 20001450 PARAMETER Experiment Name: At_Far-red-induction_P Parameter: Organism Value: A. thaliana
  misc_feature: MA Experiment 20001450 PARAMETER Experiment Name: At_Far-red-induction_P Parameter: Plant Line Value: Columbia
  misc_feature: MA Experiment 20001450 PARAMETER Experiment Name: At_Far-red-induction_P Parameter: Timepoint (hr) Value: 8
  misc_feature: MA Experiment 20001450 PARAMETER Experiment Name: At_Far-red-induction_P Parameter: Tissue Value: Whole Plant
  misc_feature: MA Experiment ID: 20001557 Result: Down-regulated in Transcription
  misc_feature: MA Experiment 20001557 PARAMETER Experiment Name: At_Drought_Soil_Dry_P Parameter: Age (day) Value: 27
  misc_feature: MA Experiment 20001557 PARAMETER Experiment Name: At_Drought_Soil_Dry_P Parameter: Organism Value: A. thaliana
  misc_feature: MA Experiment 20001557 PARAMETER Experiment Name: At_Drought_Soil_Dry_P Parameter: Plant Line Value: WS
  misc_feature: MA Experiment 20001557 PARAMETER Experiment Name: At_Drought_Soil_Dry_P Parameter: Post Timepoint (hr) Value: 3
  misc_feature: MA Experiment 20001557 PARAMETER Experiment Name: At_Drought_Soil_Dry_P Parameter: Post-Treatment Value: Re-Water vs. No Drought
  misc_feature: MA Experiment 20001557 PARAMETER Experiment Name: At_Drought_Soil_Dry_P Parameter: Timepoint (day) Value: 13
  misc_feature: MA Experiment 20001557 PARAMETER Experiment Name: At_Drought_Soil_Dry_P Parameter: Treatment Value: Drought vs. No Drought
  misc_feature: MA Experiment ID: 20001558 Result: Down-regulated in Transcription
  misc_feature: MA Experiment 20001558 PARAMETER Experiment Name: At_Drought_Soil_Dry_P Parameter: Age (day) Value: 27
  misc_feature: MA Experiment 20001558 PARAMETER Experiment Name: At_Drought_Soil_Dry_P Parameter: Organism Value: A. thaliana
  misc_feature: MA Experiment 20001558 PARAMETER Experiment Name: At_Drought_Soil_Dry_P Parameter: Plant Line Value: WS
  misc_feature: MA Experiment 20001558 PARAMETER Experiment Name: At_Drought_Soil_Dry_P Parameter: Post Timepoint (hr) Value: 6
  misc_feature: MA Experiment 20001558 PARAMETER Experiment Name: At_Drought_Soil_Dry_P Parameter: Post-Treatment Value: Re-Water vs. No Drought
  misc_feature: MA Experiment 20001558 PARAMETER Experiment Name: At_Drought_Soil_Dry_P Parameter: Timepoint (day) Value: 13
  misc_feature: MA Experiment 20001558 PARAMETER Experiment Name: At_Drought_Soil_Dry_P Parameter: Treatment Value: Drought vs. No Drought
  misc_feature: MA Experiment ID: 20001559 Result: Down-regulated in Transcription
  misc_feature: MA Experiment 20001559 PARAMETER Experiment Name: At_Drought_Soil_Dry_P Parameter: Age (day) Value: 28
  misc_feature: MA Experiment 20001559 PARAMETER Experiment Name: At_Drought_Soil_Dry_P Parameter: Organism Value: A. thaliana
  misc_feature: MA Experiment 20001559 PARAMETER Experiment Name: At_Drought_Soil_Dry_P Parameter: Plant Line Value: WS
  misc_feature: MA Experiment 20001559 PARAMETER Experiment Name: At_Drought_Soil_Dry_P Parameter: Post Timepoint (hr) Value: 29
  misc_feature: MA Experiment 20001559 PARAMETER Experiment Name: At_Drought_Soil_Dry_P Parameter: Post-Treatment Value: Re-Water vs. No Drought
  misc_feature: MA Experiment 20001559 PARAMETER Experiment Name: At_Drought_Soil_Dry_P Parameter: Timepoint (day) Value: 14
  misc_feature: MA Experiment 20001559 PARAMETER Experiment Name: At_Drought_Soil_Dry_P Parameter: Treatment Value: Drought vs. No Drought
  misc_feature: MA Experiment ID: 20001757 Result: Up-regulated in Transcription
  misc_feature: MA Experiment 20001757 PARAMETER Experiment Name: At_50mM_NH4NO3_L-to-H_P Parameter: Timepoint (hr) Value: 6
  misc_feature: MA Experiment 20001757 PARAMETER Experiment Name: At_50mM_NH4NO3_L-to-H_P Parameter: Tissue Value: Leaf
  misc_feature: MA Experiment 20001757 PARAMETER Experiment Name: At_50mM_NH4NO3_L-to-H_P Parameter: Treatment Value: 50mM NH4NO3 vs 100mM Mannitol
  misc_feature: MA Experiment ID: 20001904 Result: Down-regulated in Transcription
  misc_feature: MA Experiment 20001904 PARAMETER Experiment Name: At_Drought_Reproduction_P Parameter: Age (day) Value: 37
  misc_feature: MA Experiment 20001904 PARAMETER Experiment Name: At_Drought_Reproduction_P Parameter: Organism Value: A. thaliana
  misc_feature: MA Experiment 20001904 PARAMETER Experiment Name: At_Drought_Reproduction_P Parameter: Plant Line Value: WS
  misc_feature: MA Experiment 20001904 PARAMETER Experiment Name: At_Drought_Reproduction_P Parameter: Timepoint (day) Value: 7
  misc_feature: MA Experiment 20001904 PARAMETER Experiment Name: At_Drought_Reproduction_P Parameter: Tissue Value: Rosettes
  misc_feature: MA Experiment 20001904 PARAMETER Experiment Name: At_Drought_Reproduction_P Parameter: Treatment Value: Drought vs. No Drought
  misc_feature: MA Experiment ID: 20001906 Result: Down-regulated in Transcription
  misc_feature: MA Experiment 20001906 PARAMETER Experiment Name: At_Drought_Reproduction_P Parameter: Age (day) Value: 35
  misc_feature: MA Experiment 20001906 PARAMETER Experiment Name: At_Drought_Reproduction_P Parameter: Organism Value: A. thaliana
  misc_feature: MA Experiment 20001906 PARAMETER Experiment Name: At_Drought_Reproduction_P Parameter: Plant Line Value: WS
  misc_feature: MA Experiment 20001906 PARAMETER Experiment Name: At_Drought_Reproduction_P Parameter: Timepoint (day) Value: 5
  misc_feature: MA Experiment 20001906 PARAMETER Experiment Name: At_Drought_Reproduction_P Parameter: Tissue Value: Siliques
  misc_feature: MA Experiment 20001906 PARAMETER Experiment Name: At_Drought_Reproduction_P Parameter: Treatment Value: Drought vs. No Drought
aaaaaatcgaatcaaaatctctaaagtttcaatttttttgttctgttctttttttttttttaaagaatggcttcaatttctgcaactttgccttcgccattgttactcacacagagaaaatccaatctcacatcgattcaaaaactcccattttctctaactcgaggtacgaatgatctttctccattatctcttactcgaaaccctagcagcatcagtctgatggtgaaagctagtggagaaagctcagattcatcgactgatctcgacgttgttagtacgattcagaatgtttgggataagtctgaaaataggttaggtcttattggtttgggttttgctggtattgtagctctttgggcatcattgaatctcatcacggcaattgacaaattgcccgttatctcgagcggattcgaactagttggtatcttgttctccacgtggttcacatatcgatatctcttgttcaaaccggacagacaggagctttcgaaaattgtcaagaaatcagtagcggatatacttggcacagtgaaccttgtgtgtgtgataatacttcatctttggaagatgatttgtttgcaagtttgtaaaattacatgacagggtggttgttgtttctagtccaataatgtcatgcatttgaaacctgtaaatactttattgttggtttttggttgtgagcaaaatcaatcttttct

SEQ ID NO: 21741 - protein, 179 aa, Arabidopsis thaliana
  peptide (1)..(179): Ceres Seq. ID no. 12337878
  misc_feature (68)..(154): Homolog of NCBI NO: 37536446 NR Description: hypothetical protein [Oryza sativa (japonica
  misc_feature (3)..(156): Homolog of NCBI NO: 18411555 NR Description: expressed protein
  misc_feature (3)..(156): Homolog of NCBI NO: 687677 NR Description: unknown
  misc_feature (46)..(143): Homolog of NCBI NO: 38175474 NR Description: unknown protein [Oryza sativa (japonica
  misc_feature (48)..(156): Homolog of NCBI NO: 34393236 NR Description: unknown protein [Oryza sativa (japonica
  misc_feature (1)..(156): Homolog of NCBI NO: 21555057 NR Description: unknown [Arabidopsis thaliana]
  misc_feature (1)..(155): Homolog of NCBI NO: 34909746 NR Description: contains ESTs
  misc_feature (1)..(156): Homolog of NCBI NO: 18407178 NR Description: expressed protein
  misc_feature (1)..(155): Homolog of NCBI NO: 21554231 NR Description: unknown [Arabidopsis thaliana]
  misc_feature (1)..(155): Homolog of NCBI NO: 18403896 NR Description: expressed protein
MASISATLPSPLLLTQRKSNLTSIQKLPFSLTRGTNDLSPLSLTRNPSSISLMVKASGESSDSSTDLDVVSTIQNVWDKSENRLGLIGLGFAGIVALWASLNLITAIDKLPVISSGFELVGILFSTWFTYRYLLFKPDRQELSKIVKKSVADILGTVNLVCVIILHLWKMICLQVCKIT

SEQ ID NO: 21742 - protein, 127 aa, Arabidopsis thaliana
  peptide (1)..(127): Ceres Seq. ID no. 12337879
  misc_feature (16)..(102): Homolog of NCBI NO: 37536446 NR Description: hypothetical protein [Oryza sativa (japonica
  misc_feature (1)..(104): Homolog of NCBI NO: 18411555 NR Description: expressed protein
  misc_feature (1)..(104): Homolog of NCBI NO: 687677 NR Description: unknown
  misc_feature (1)..(91): Homolog of NCBI NO: 38175474 NR Description: unknown protein [Oryza sativa (japonica
  misc_feature (1)..(104): Homolog of NCBI NO: 34393236 NR Description: unknown protein [Oryza sativa (japonica
  misc_feature (1)..(104): Homolog of NCBI NO: 21555057 NR Description: unknown [Arabidopsis thaliana]
  misc_feature (1)..(103): Homolog of NCBI NO: 34909746 NR Description: contains ESTs
  misc_feature (1)..(104): Homolog of NCBI NO: 18407178 NR Description: expressed protein
  misc_feature (1)..(103): Homolog of NCBI NO: 21554231 NR Description: unknown [Arabidopsis thaliana]
  misc_feature (1)..(103): Homolog of NCBI NO: 18403896 NR Description: expressed protein
MVKASGESSDSSTDLDVVSTIQNVWDKSENRLGLIGLGFAGIVALWASLNLITAIDKLPVISSGFELVGILFSTWFTYRYLLFKPDRQELSKIVKKSVADILGTVNLVCVIILHLWKMICLQVCKIT

SEQ ID NO: 21743 - DNA, 845 bp, Arabidopsis thaliana
  misc_feature (1)..(845): Ceres Seq. ID no. 12396872
  misc_feature: MA Experiment ID: 108434 Result: Up-regulated in Transcription
  misc_feature: MA Experiment 108434 PARAMETER Experiment Name: At_Root_Tips_cDNA_P Parameter: Tissue Value: Root Tips
  misc_feature: MA Experiment ID: 108595 Result: Down-regulated in Transcription
  misc_feature: MA Experiment 108595 PARAMETER Experiment Name: At_Ler-pi_Ovule_cDNA_P Parameter: Plant Line Value: null
  misc_feature: MA Experiment ID: 20000111 Result: Up-regulated in Transcription
  misc_feature: MA Experiment 20000111 PARAMETER Experiment Name: At_42deg_Heat_cDNA_P Parameter: Temperature (deg C) Value: 42 vs. 22
  misc_feature: MA Experiment 20000111 PARAMETER Experiment Name: At_42deg_Heat_cDNA_P Parameter: Timepoint (hr) Value: 6
  misc_feature: MA Experiment 20000111 PARAMETER Experiment Name: At_42deg_Heat_cDNA_P Parameter: Tissue Value: Aerial
cgtataatttccccaatttctcagagagactcaaaatcaccaccaccaccaaatcgccgccatgtttaaacaagcttctcgtctcctctcccgatctgtcgccgccgcatcttccaaatcggtgacgactcgtgccttttcaacggaacttccatcgacgctcgattccactttcgtcgaggcatggaagaaagtcgcaccgaatatggacccaccgcagactccttctgctttcatgaaacctcgtccttccactccttcttctatcccgacgaagctcaccgtcaattttgtcctcccttacacatctgagcttaccgggaaagaggtcgacatggtcatcattcccgcatcaacaggacaaatgggtgtcttgcccggacacgttccaacaattgctgagctaaaacctggcatcatgtccgtccatgaaggcactgacgtgaagaaatacttcttgagcagtggttttgcattcctccacgcaaattccgtcgctgacataatcgcggtggaagctgtgccgcttgaccacattgaccctagccaagtccaaaagggtttagctgagttccaacagaaacttgcttctgccacaacagatcttgagaaagcagaggcacagattggtgttgaagttcacagtgccatcaacgcagctctctcgggctaaaagaaggtttctttctttatttcttcgaagaaacaaaaaaaaaactaaatcatttggcttttcaagtgattagtgaagtccctttttactactgcaaaggatggaataaactagaatttgattcttcttgtttaatcgtgttggacttttgtttgaataaatgattttgttt

SEQ ID NO: 21744 - protein, 203 aa, Arabidopsis thaliana
  peptide (1)..(203): Ceres Seq. ID no. 12396873
  misc_feature (72)..(155): Pfam Name: ATP synthase, Delta/Epsilon chain, beta-sandwich domain Pfam Description: ATP synthase, Delta/Epsilon chain,
  misc_feature (55)..(192): Homolog of NCBI NO: 40746994 NR Description: hypothetical protein AN0277.2 [Aspergillus
  misc_feature (73)..(201): Homolog of NCBI NO: 6320200 NR Description: ATP synthase delta subunit; Atp16p [Saccharomyces
  misc_feature (67)..(202): Homolog of NCBI NO: 2493049 NR Description: ATP synthase delta chain, mitochondrial precursor
  misc_feature (1)..(98): Homolog of NCBI NO: 34901784 NR Description: ATP synthase delta' chain, mitochondrial
  misc_feature (73)..(201): Homolog of NCBI NO: 2493050 NR Description: ATP synthase delta chain, mitochondrial precursor
  misc_feature (128)..(203): Homolog of NCBI NO: 8272402 NR Description: F1-ATPase [Pyrus pyrifolia]
  misc_feature (8)..(203): Homolog of NCBI NO: 2493047 NR Description: ATP synthase delta' chain, mitochondrial
  misc_feature (1)..(203): Homolog of NCBI NO: 34901780 NR Description: putative ATP synthase delta' chain, mitochondrial
  misc_feature (1)..(203): Homolog of NCBI NO: 2493046 NR Description: ATP synthase delta' chain, mitochondrial
  misc_feature (1)..(203): Homolog of NCBI NO: 15237998 NR Description: ATP synthase delta chain, mitochondrial precursor
MFKQASRLLSRSVAAASSKSVTTRAFSTELPSTLDSTFVEAWKKVAPNMDPPQTPSAFMKPRPSTPSSIPTKLTVNFVLPYTSELTGKEVDMVIIPASTGQMGVLPGHVPTIAELKPGIMSVHEGTDVKKYFLSSGFAFLHANSVADIIAVEAVPLDHIDPSQVQKGLAEFQQKLASATTDLEKAEAQIGVEVHSAINAALSG

SEQ ID NO: 21745 - protein, 155 aa, Arabidopsis thaliana
  peptide (1)..(155): Ceres Seq. ID no. 12396874
  misc_feature (24)..(107): Pfam Name: ATP synthase, Delta/Epsilon chain, beta-sandwich domain Pfam Description: ATP synthase, Delta/Epsilon chain,
  misc_feature (7)..(144): Homolog of NCBI NO: 40746994 NR Description: hypothetical protein AN0277.2 [Aspergillus
  misc_feature (25)..(153): Homolog of NCBI NO: 6320200 NR Description: ATP synthase delta subunit; Atp16p [Saccharomyces
  misc_feature (19)..(154): Homolog of NCBI NO: 2493049 NR Description: ATP synthase delta chain, mitochondrial precursor
  misc_feature (1)..(50): Homolog of NCBI NO: 34901784 NR Description: ATP synthase delta' chain, mitochondrial
  misc_feature (25)..(153): Homolog of NCBI NO: 2493050 NR Description: ATP synthase delta chain, mitochondrial precursor
  misc_feature (80)..(155): Homolog of NCBI NO: 8272402 NR Description: F1-ATPase [Pyrus pyrifolia]
  misc_feature (1)..(155): Homolog of NCBI NO: 2493047 NR Description: ATP synthase delta' chain, mitochondrial
  misc_feature (1)..(155): Homolog of NCBI NO: 34901780 NR Description: putative ATP synthase delta' chain, mitochondrial
  misc_feature (1)..(155): Homolog of NCBI NO: 2493046 NR Description: ATP synthase delta' chain, mitochondrial
  misc_feature (1)..(155): Homolog of NCBI NO: 15237998 NR Description: ATP synthase delta chain, mitochondrial precursor
MDPPQTPSAFMKPRPSTPSSIPTKLTVNFVLPYTSELTGKEVDMVIIPASTGQMGVLPGHVPTIAELKPGIMSVHEGTDVKKYFLSSGFAFLHANSVADIIAVEAVPLDHIDPSQVQKGLAEFQQKLASATTDLEKAEAQIGVEVHSAINAALSG

SEQ ID NO: 21746 - protein, 145 aa, Arabidopsis thaliana
  peptide (1)..(145): Ceres Seq. ID no. 12396875
  misc_feature (14)..(97): Pfam Name: ATP synthase, Delta/Epsilon chain, beta-sandwich domain Pfam Description: ATP synthase, Delta/Epsilon chain,
  misc_feature (1)..(134): Homolog of NCBI NO: 40746994 NR Description: hypothetical protein AN0277.2 [Aspergillus
  misc_feature (15)..(143): Homolog of NCBI NO: 6320200 NR Description: ATP synthase delta subunit; Atp16p [Saccharomyces
  misc_feature (9)..(144): Homolog of NCBI NO: 2493049 NR Description: ATP synthase delta chain, mitochondrial precursor
  misc_feature (1)..(40): Homolog of NCBI NO: 34901784 NR Description: ATP synthase delta' chain, mitochondrial
  misc_feature (15)..(143): Homolog of NCBI NO: 2493050 NR Description: ATP synthase delta chain, mitochondrial precursor
  misc_feature (70)..(145): Homolog of NCBI NO: 8272402 NR Description: F1-ATPase [Pyrus pyrifolia]
  misc_feature (1)..(145): Homolog of NCBI NO: 2493047 NR Description: ATP synthase delta' chain, mitochondrial
  misc_feature (1)..(145): Homolog of NCBI NO: 34901780 NR Description: putative ATP synthase delta' chain, mitochondrial
  misc_feature (1)..(145): Homolog of NCBI NO: 2493046 NR Description: ATP synthase delta' chain, mitochondrial
  misc_feature (1)..(145): Homolog of NCBI NO: 15237998 NR Description: ATP synthase delta chain, mitochondrial precursor
MKPRPSTPSSIPTKLTVNFVLPYTSELTGKEVDMVIIPASTGQMGVLPGHVPTIAELKPGIMSVHEGTDVKKYFLSSGFAFLHANSVADIIAVEAVPLDHIDPSQVQKGLAEFQQKLASATTDLEKAEAQIGVEVHSAINAALSG

SEQ ID NO: 21747 - DNA, 1777 bp, Arabidopsis thaliana
  misc_feature (1)..(1777): Ceres Seq. ID no. 12377345
  misc_feature: MA Experiment ID: 108433 Result: Down-regulated in Transcription
  misc_feature: MA Experiment 108433 PARAMETER Experiment Name: At_rhl_Mutant2_cDNA_P Parameter: Age (day) Value: 7
  misc_feature: MA Experiment 108433 PARAMETER Experiment Name: At_rhl_Mutant2_cDNA_P Parameter: Organism Value: A. thaliana
  misc_feature: MA Experiment 108433 PARAMETER Experiment Name: At_rhl_Mutant2_cDNA_P Parameter: Plant Line Value: rhl Mutant vs. wt landsburg
  misc_feature: MA Experiment 108433 PARAMETER Experiment Name: At_rhl_Mutant2_cDNA_P Parameter: Tissue Value: Roots
  misc_feature: MA Experiment ID: 108434 Result: Up-regulated in Transcription
  misc_feature: MA Experiment 108434 PARAMETER Experiment Name: At_Root_Tips_cDNA_P Parameter: Tissue Value: Root Tips
  misc_feature: MA Experiment ID: 108435 Result: Up-regulated in Transcription
  misc_feature: MA Experiment 108435 PARAMETER Experiment Name: At_stm_Mutants_cDNA_P Parameter: Plant Line Value: wt Landsburg vs stm
  misc_feature: MA Experiment 108435 PARAMETER Experiment Name: At_stm_Mutants_cDNA_P Parameter: Tissue Value: Shoot Apical Meristem Region
  misc_feature: MA Experiment ID: 108462 Result: Down-regulated in Transcription
  misc_feature: MA Experiment 108462 PARAMETER Experiment Name: At_Germinating_Seeds_cDNA_P Parameter: Age (day) Value: 2 vs. 0
  misc_feature: MA Experiment 108462 PARAMETER Experiment Name: At_Germinating_Seeds_cDNA_P Parameter: Tissue Value: Germinating Seeds
  misc_feature: MA Experiment ID: 108463 Result: Down-regulated in Transcription
  misc_feature: MA Experiment 108463 PARAMETER Experiment Name: At_Germinating_Seeds_cDNA_P Parameter: Age (day) Value: 3 vs. 0
  misc_feature: MA Experiment 108463 PARAMETER Experiment Name: At_Germinating_Seeds_cDNA_P Parameter: Tissue Value: Germinating Seeds
  misc_feature: MA Experiment ID: 108464 Result: Down-regulated in Transcription
  misc_feature: MA Experiment 108464 PARAMETER Experiment Name: At_Germinating_Seeds_cDNA_P Parameter: Age (day) Value: 4 vs. 0
  misc_feature: MA Experiment 108464 PARAMETER Experiment Name: At_Germinating_Seeds_cDNA_P Parameter: Tissue Value: Germinating Seeds
  misc_feature: MA Experiment ID: 108489 Result: Up-regulated in Transcription
  misc_feature: MA Experiment ID: 108572 Result: Down-regulated in Transcription
  misc_feature: MA Experiment 108572 PARAMETER Experiment Name: At_Drought_cDNA_P Parameter: Timepoint (hr) Value: 1
  misc_feature: MA Experiment 108572 PARAMETER Experiment Name: At_Drought_cDNA_P Parameter: Tissue Value: Aerial
  misc_feature: MA Experiment 108572 PARAMETER Experiment Name: At_Drought_cDNA_P Parameter: Treatment Value: Drought vs. No Drought
  misc_feature: MA Experiment ID: 108573 Result: Down-regulated in Transcription
  misc_feature: MA Experiment 108573 PARAMETER Experiment Name: At_Drought_cDNA_P Parameter: Timepoint (hr) Value: 6
  misc_feature: MA Experiment 108573 PARAMETER Experiment Name: At_Drought_cDNA_P Parameter: Tissue Value: Aerial
  misc_feature: MA Experiment 108573 PARAMETER Experiment Name: At_Drought_cDNA_P Parameter: Treatment Value: Drought vs. No Drought
  misc_feature: MA Experiment ID: 108576 Result: Down-regulated in Transcription
  misc_feature: MA Experiment 108576 PARAMETER Experiment Name: At_42deg_Heat_cDNA_P Parameter: Temperature (deg C) Value: 42 vs. 22
  misc_feature: MA Experiment 108576 PARAMETER Experiment Name: At_42deg_Heat_cDNA_P Parameter: Timepoint (hr) Value: 1
  misc_feature: MA Experiment 108576 PARAMETER Experiment Name: At_42deg_Heat_cDNA_P Parameter: Tissue Value: Aerial
  misc_feature: MA Experiment ID: 108577 Result: Down-regulated in Transcription
  misc_feature: MA Experiment 108577 PARAMETER Experiment Name: At_42deg_Heat_cDNA_P Parameter: Temperature (deg C) Value: 42 vs. 22
  misc_feature: MA Experiment 108577 PARAMETER Experiment Name: At_42deg_Heat_cDNA_P Parameter: Timepoint (hr) Value: 6
  misc_feature: MA Experiment 108577 PARAMETER Experiment Name: At_42deg_Heat_cDNA_P Parameter: Tissue Value: Aerial
  misc_feature: MA Experiment ID: 108579 Result: Up-regulated in Transcription
  misc_feature: MA Experiment 108579 PARAMETER Experiment Name: At_4deg_Cold_cDNA_P Parameter: Temperature (deg C) Value: 4 vs. 22
  misc_feature: MA Experiment 108579 PARAMETER Experiment Name: At_4deg_Cold_cDNA_P Parameter: Timepoint (hr) Value: 6
  misc_feature: MA Experiment 108579 PARAMETER Experiment Name: At_4deg_Cold_cDNA_P Parameter: Tissue Value: Aerial
  misc_feature: MA Experiment ID: 108595 Result: Up-regulated in Transcription
  misc_feature: MA Experiment 108595 PARAMETER Experiment Name: At_Ler-pi_Ovule_cDNA_P Parameter: Plant Line Value: null
  misc_feature: MA Experiment ID: 108609 Result: Down-regulated in Transcription
  misc_feature: MA Experiment 108609 PARAMETER Experiment Name: At_100uM_ABA_cDNA_P Parameter: Timepoint (hr) Value: 24
  misc_feature: MA Experiment 108609 PARAMETER Experiment Name: At_100uM_ABA_cDNA_P Parameter: Tissue Value: Aerial
  misc_feature: MA Experiment 108609 PARAMETER Experiment Name: At_100uM_ABA_cDNA_P Parameter: Treatment Value: 100uM ABA vs. No Treatment
  misc_feature: MA Experiment ID: 20000180 Result: Down-regulated in Transcription
  misc_feature: MA Experiment 20000180 PARAMETER Experiment Name: At_Germinating_Seeds_P Parameter: Age (hr) Value: 24 vs. 0
  misc_feature: MA Experiment 20000180 PARAMETER Experiment Name: At_Germinating_Seeds_P Parameter: Tissue Value: Germinating Seeds
  misc_feature: MA Experiment ID: 20000184 Result: Down-regulated in Transcription
  misc_feature: MA Experiment 20000184 PARAMETER Experiment Name: At_Shoots__P Parameter: Age (day) Value: 7
  misc_feature: MA Experiment 20000184 PARAMETER Experiment Name: At_Shoots__P Parameter: Tissue Value: Shoots vs. Whole Plant
  misc_feature: MA Experiment ID: 20000224 Result: Up-regulated in Transcription
  misc_feature: MA Experiment ID: 20000227 Result: Up-regulated in Transcription
  misc_feature: MA Experiment 20000227 PARAMETER Experiment Name: At_Root-Tips-vs-Tops_P Parameter: Tissue Value: Root Tips vs. Root Tops
  misc_feature: MA Experiment ID: 20000234 Result: Up-regulated in Transcription
  misc_feature: MA Experiment 20000234 PARAMETER Experiment Name: At_Siliques_P Parameter: Age (day) Value: 21
  misc_feature: MA Experiment 20000234 PARAMETER Experiment Name: At_Siliques_P Parameter: Organism Value: A. thaliana
  misc_feature: MA Experiment 20000234 PARAMETER Experiment Name: At_Siliques_P Parameter: Plant Line Value: WS
  misc_feature: MA Experiment 20000234 PARAMETER Experiment Name: At_Siliques_P Parameter: Tissue Value: Less Than 5mm Siliques vs. Whole Plant
  misc_feature: MA Experiment ID: 20000264 Result: Up-regulated in Transcription
  misc_feature: MA Experiment 20000264 PARAMETER Experiment Name: At_Open_Flower_P Parameter: Age (day) Value: 21
  misc_feature: MA Experiment 20000264 PARAMETER Experiment Name: At_Open_Flower_P Parameter: Plant Line Value: WS
  misc_feature: MA Experiment 20000264 PARAMETER Experiment Name: At_Open_Flower_P Parameter: Tissue Value: Open Flower vs. Whole Plant
  misc_feature: MA Experiment ID: 20000265 Result: Up-regulated in Transcription
  misc_feature: MA Experiment 20000265 PARAMETER Experiment Name: At_Open_Flower_P Parameter: Age (day) Value: 21
  misc_feature: MA Experiment 20000265 PARAMETER Experiment Name: At_Open_Flower_P Parameter: Plant Line Value: WS
  misc_feature: MA Experiment 20000265 PARAMETER Experiment Name: At_Open_Flower_P Parameter: Tissue Value: Closed Flower vs. Whole Plant
  misc_feature: MA Experiment ID: 20000436 Result: Down-regulated in Transcription
  misc_feature: MA Experiment 20000436 PARAMETER Experiment Name: At_Drought_P Parameter: Age (day) Value: 7
  misc_feature: MA Experiment 20000436 PARAMETER Experiment Name: At_Drought_P Parameter: Organism Value: A. thaliana
  misc_feature: MA Experiment 20000436 PARAMETER Experiment Name: At_Drought_P Parameter: Plant Line Value: WS
  misc_feature: MA Experiment 20000436 PARAMETER Experiment Name: At_Drought_P Parameter: Timepoint (hr) Value: 12
  misc_feature: MA Experiment 20000436 PARAMETER Experiment Name: At_Drought_P Parameter: Tissue Value: Whole Plant
  misc_feature: MA Experiment 20000436 PARAMETER Experiment Name: At_Drought_P Parameter: Treatment Value: Drought vs. No Drought
  misc_feature: MA Experiment ID: 20000437 Result: Down-regulated in Transcription
  misc_feature: MA Experiment 20000437 PARAMETER Experiment Name: At_Drought_P Parameter: Age (day) Value: 8
  misc_feature: MA Experiment 20000437 PARAMETER Experiment Name: At_Drought_P Parameter: Organism Value: A. thaliana
  misc_feature: MA Experiment 20000437 PARAMETER Experiment Name: At_Drought_P Parameter: Plant Line Value: WS
  misc_feature: MA Experiment 20000437 PARAMETER Experiment Name: At_Drought_P Parameter: Timepoint (hr) Value: 24
  misc_feature: MA Experiment 20000437 PARAMETER Experiment Name: At_Drought_P Parameter: Tissue Value: Whole Plant
  misc_feature: MA Experiment 20000437 PARAMETER Experiment Name: At_Drought_P Parameter: Treatment Value: Drought vs. No Drought
  misc_feature: MA Experiment ID: 20000453 Result: Down-regulated in Transcription
  misc_feature: MA Experiment 20000453 PARAMETER Experiment Name: At_100uM_ABA_P Parameter: Age (day) Value: 15
  misc_feature: MA Experiment 20000453 PARAMETER Experiment Name: At_100uM_ABA_P Parameter: Organism Value: A. thaliana
  misc_feature: MA Experiment 20000453 PARAMETER Experiment Name: At_100uM_ABA_P Parameter: Plant Line Value: WS
  misc_feature: MA Experiment 20000453 PARAMETER Experiment Name: At_100uM_ABA_P Parameter: Timepoint (hr) Value: 24
  misc_feature: MA Experiment 20000453 PARAMETER Experiment Name: At_100uM_ABA_P Parameter: Tissue Value: Aerial
  misc_feature: MA Experiment 20000453 PARAMETER Experiment Name: At_100uM_ABA_P Parameter: Treatment Value: 100uM ABA vs. No Treatment
  misc_feature: MA Experiment ID: 20000456 Result: Up-regulated in Transcription
  misc_feature: MA Experiment 20000456 PARAMETER Experiment Name: At_100uM_BA_P Parameter: Age (day) Value: 14
  misc_feature: MA Experiment 20000456 PARAMETER Experiment Name: At_100uM_BA_P Parameter: Organism Value: A. thaliana
  misc_feature: MA Experiment 20000456 PARAMETER Experiment Name: At_100uM_BA_P Parameter: Plant Line Value: WS
  misc_feature: MA Experiment 20000456 PARAMETER Experiment Name: At_100uM_BA_P Parameter: Timepoint (hr) Value: 6
  misc_feature: MA Experiment 20000456 PARAMETER Experiment Name: At_100uM_BA_P Parameter: Tissue Value: Aerial
  misc_feature: MA Experiment 20000456 PARAMETER Experiment Name: At_100uM_BA_P Parameter: Treatment Value: 100uM BA vs. No Treatment
  misc_feature: MA Experiment ID: 20000495 Result: Up-regulated in Transcription
  misc_feature: MA Experiment 20000495 PARAMETER Experiment Name: At_Guard_Cells_P Parameter: Harvest Date Value: 8/2/2002
  misc_feature: MA Experiment 20000495 PARAMETER Experiment Name: At_Guard_Cells_P Parameter: Organism Value: A. thaliana
  misc_feature: MA Experiment 20000495 PARAMETER Experiment Name: At_Guard_Cells_P Parameter: Tissue Value: Guard Cells vs. Leaves
  misc_feature: MA Experiment ID: 20001247 Result: Down-regulated in Transcription
  misc_feature: MA Experiment 20001247 PARAMETER Experiment Name: At_Far-red-induction_P Parameter: Age (day) Value: 7
  misc_feature: MA Experiment 20001247 PARAMETER Experiment Name: At_Far-red-induction_P Parameter: Light Value: Far-red vs. White
  misc_feature: MA Experiment 20001247 PARAMETER Experiment Name: At_Far-red-induction_P Parameter: Organism Value: A. thaliana
  misc_feature: MA Experiment 20001247 PARAMETER Experiment Name: At_Far-red-induction_P Parameter: Plant Line Value: Columbia
  misc_feature: MA Experiment 20001247 PARAMETER Experiment Name: At_Far-red-induction_P Parameter: Timepoint (hr) Value: 1
  misc_feature: MA Experiment 20001247 PARAMETER Experiment Name: At_Far-red-induction_P Parameter: Tissue Value: Whole Plant
  misc_feature: MA Experiment ID: 20001450 Result: Down-regulated in Transcription
  misc_feature: MA Experiment 20001450 PARAMETER Experiment Name: At_Far-red-induction_P Parameter: Age (day) Value: 7
  misc_feature: MA Experiment 20001450 PARAMETER Experiment Name: At_Far-red-induction_P Parameter: Light Value: Far-red vs. White
  misc_feature: MA Experiment 20001450 PARAMETER Experiment Name: At_Far-red-induction_P Parameter: Organism Value: A. thaliana
  misc_feature: MA Experiment 20001450 PARAMETER Experiment Name: At_Far-red-induction_P Parameter: Plant Line Value: Columbia
  misc_feature: MA Experiment 20001450 PARAMETER Experiment Name: At_Far-red-induction_P Parameter: Timepoint (hr) Value: 8
  misc_feature: MA Experiment 20001450 PARAMETER Experiment Name: At_Far-red-induction_P Parameter: Tissue Value: Whole Plant
  misc_feature: MA Experiment ID: 20001458 Result: Up-regulated in Transcription
  misc_feature: MA Experiment 20001458 PARAMETER Experiment Name: At_50mM_NH4NO3_L-to-H_P Parameter: Age (day) Value: Undefined
  misc_feature: MA Experiment 20001458 PARAMETER Experiment Name: At_50mM_NH4NO3_L-to-H_P Parameter: Organism Value: Undefined
  misc_feature: MA Experiment 20001458 PARAMETER Experiment Name: At_50mM_NH4NO3_L-to-H_P Parameter: Plant Line Value: Undefined
  misc_feature: MA Experiment 20001458 PARAMETER Experiment Name: At_50mM_NH4NO3_L-to-H_P Parameter: Timepoint (hr) Value: 2
  misc_feature: MA Experiment 20001458 PARAMETER Experiment Name: At_50mM_NH4NO3_L-to-H_P Parameter: Tissue Value: Siliques
  misc_feature: MA Experiment 20001458 PARAMETER Experiment Name: At_50mM_NH4NO3_L-to-H_P Parameter: Treatment Value: 50mM NH4NO3 vs. 100mM Manitol
  misc_feature: MA Experiment ID: 20001557 Result: Up-regulated in Transcription
  misc_feature: MA Experiment 20001557 PARAMETER Experiment Name: At_Drought_Soil_Dry_P Parameter: Age (day) Value: 27
  misc_feature: MA Experiment 20001557 PARAMETER Experiment Name: At_Drought_Soil_Dry_P Parameter: Organism Value: A. thaliana
  misc_feature: MA Experiment 20001557 PARAMETER Experiment Name: At_Drought_Soil_Dry_P Parameter: Plant Line Value: WS
  misc_feature: MA Experiment 20001557 PARAMETER Experiment Name: At_Drought_Soil_Dry_P Parameter: Post Timepoint (hr) Value: 3
  misc_feature: MA Experiment 20001557 PARAMETER Experiment Name: At_Drought_Soil_Dry_P Parameter: Post-Treatment Value: Re-Water vs. No Drought
  misc_feature: MA Experiment 20001557 PARAMETER Experiment Name: At_Drought_Soil_Dry_P Parameter: Timepoint (day) Value: 13
  misc_feature: MA Experiment 20001557 PARAMETER Experiment Name: At_Drought_Soil_Dry_P Parameter: Treatment Value: Drought vs. No Drought
  misc_feature: MA Experiment ID: 20001558 Result: Up-regulated in Transcription
  misc_feature: MA Experiment 20001558 PARAMETER Experiment Name: At_Drought_Soil_Dry_P Parameter: Age (day) Value: 27
  misc_feature: MA Experiment 20001558 PARAMETER Experiment Name: At_Drought_Soil_Dry_P Parameter: Organism Value: A. thaliana
  misc_feature: MA Experiment 20001558 PARAMETER Experiment Name: At_Drought_Soil_Dry_P Parameter: Plant Line Value: WS
  misc_feature: MA Experiment 20001558 PARAMETER Experiment Name: At_Drought_Soil_Dry_P Parameter: Post Timepoint (hr) Value: 6
  misc_feature: MA Experiment 20001558 PARAMETER Experiment Name: At_Drought_Soil_Dry_P Parameter: Post-Treatment Value: Re-Water vs. No Drought
  misc_feature: MA Experiment 20001558 PARAMETER Experiment Name: At_Drought_Soil_Dry_P Parameter: Timepoint (day) Value: 13
  misc_feature: MA Experiment 20001558 PARAMETER Experiment Name: At_Drought_Soil_Dry_P Parameter: Treatment Value: Drought vs. No Drought
  misc_feature: MA Experiment ID: 20001560 Result: Up-regulated in Transcription
  misc_feature: MA Experiment 20001560 PARAMETER Experiment Name: At_Drought_Soil_Dry_P Parameter: Age (day) Value: 28
  misc_feature: MA Experiment 20001560 PARAMETER Experiment Name: At_Drought_Soil_Dry_P Parameter: Organism Value: A. thaliana
  misc_feature: MA Experiment 20001560 PARAMETER Experiment Name: At_Drought_Soil_Dry_P Parameter: Plant Line Value: WS
  misc_feature: MA Experiment 20001560 PARAMETER Experiment Name: At_Drought_Soil_Dry_P Parameter: Post Timepoint (hr) Value: None
  misc_feature: MA Experiment 20001560 PARAMETER Experiment Name: At_Drought_Soil_Dry_P Parameter: Post-Treatment Value: None
  misc_feature: MA Experiment 20001560 PARAMETER Experiment Name: At_Drought_Soil_Dry_P Parameter: Timepoint (day) Value: 14
  misc_feature: MA Experiment 20001560 PARAMETER Experiment Name: At_Drought_Soil_Dry_P Parameter: Treatment Value: Drought vs. No Drought
  misc_feature: MA Experiment ID: 20001757 Result: Up-regulated in Transcription
  misc_feature: MA Experiment 20001757 PARAMETER Experiment Name: At_50mM_NH4NO3_L-to-H_P Parameter: Timepoint (hr) Value: 6
  misc_feature: MA Experiment 20001757 PARAMETER Experiment Name: At_50mM_NH4NO3_L-to-H_P Parameter: Tissue Value: Leaf
  misc_feature: MA Experiment 20001757 PARAMETER Experiment Name: At_50mM_NH4NO3_L-to-H_P Parameter: Treatment Value: 50mM NH4NO3 vs 100mM Mannitol
atatttcttctcgctcagtaggtctttagggttttagtttcttctcctcaaaaaatggcgatgtatgttatctacgagtcttcttccggctatggtctcttcgaggttcacggactagatgagatcggacagaacactgaggcggttcggacttctgtctccgacctcagtcgctttggccgtgttgttcagctcacagcgtttcatccctttgagtctgctctcgatgctctcaaccaagtcaacgccgtctctgaaggtgttatgactgatgagcttagaagttttctggagttgaatcttcctaaggtcaaggagggaaagaaacccaagttcagtttaggattggctgagcctaaactcggttcacatatatttgaagctactaaaatcccatgccagagcaatgagtttgttcttgagcttctcagaggtgttcgccagcattttgataggtttatcaaggacttaaagcctggtgatcttgaaaaatctcagcttggattagctcacagctacagcagagccaaggtgaagttcaatgttaaccgagtggataacatggttattcaagctatcttcatgcttgacacgcttgataaggatatcaattcctttgccatgagagtcagggaatggtattcgtggcacttccccgaactagtgaagatagtcaatgacaactatctttacgcccgtgtttcaaagatgattgatgacaagtcaaagttgactgaagatcacatccccatgcttactgaagtcttaggggatgaagataaggcaaaggaggtcatcgaagctggaaaagcatccatgggctcggatttatcaccgcttgacttaatcaacgtacagacctttgctcagaaagttatggaccttgctgactacaggaagaagctctatgattatcttgtcactaagatgagcgacattgcccctaatttggctgctttgattggagaaatggtcggtgcccgtttgatttcacatgctggaagtctgactaaccttgctaaatgcccatcttccaccctccagattcttggagccgagaaggctcttttcagggcacttaaaacacgtggaaacactcccaagtatggattgattttccattcttccttcattggccgagcatctgctaagaacaagggccgtatcgctcgttatcttgcaaacaagtgctctatagcatcccggattgattgttttgctgatggtgcaactactgcttttggtgagaagcttcgcgaacaagttgaggaaaggctagaattttatgacaaaggtgttgccccacgcaagaacgtggatgtaatgaaggaggtgatagagaatctaaagcaagaagaggaagggaaggagccagttgatgcctcggtgaagaaaagcaagaagaagaaggcaaagggtgaagaagaagaagaggtggtggcaatggaggaggacaagtcagagaaaaagaagaagaaagagaagaggaagatggagactgcagaggagaacgagaaatcagagaagaagaagacaaagaagagtaaagctggaggagaagaggagactgatgatggtcacagcaccaagaagaagaagaagaagtctaagagcgctgaatagaaagggatgcaacattaacaaaccctgtattgtattttttttttgagctaaattaatgtcgtctgtttttcgtagtgaacatcggagaatttttgttttggtctggaaacgattcaaggtttggcaatatcttaagtttgtttaggttttccct

SEQ ID NO: 21748 - protein, 522 aa, Arabidopsis thaliana
  peptide (1)..(522): Ceres Seq. ID no. 12377346
  misc_feature (266)..(414): Pfam Name: Putative snoRNA binding domain Pfam Description: Putative snoRNA binding domain
  misc_feature (3)..(519): Homolog of NCBI NO: 23956150 NR Description: RIKEN cDNA 2310044F10 [Mus musculus]
  misc_feature (3)..(522): Homolog of NCBI NO: 20141472 NR Description: Nucleolar protein Nop56 (Nucleolar protein 5A)
  misc_feature (3)..(519): Homolog of NCBI NO: 30923357 NR Description: Nucleolar protein Nop56 (Nucleolar protein 5A)
  misc_feature (3)..(522): Homolog of NCBI NO: 14799394 NR Description: XNop56 protein [Xenopus laevis]
  misc_feature (1)..(496): Homolog of NCBI NO: 19112160 NR Description: putative U3 snoRNP component
  misc_feature (72)..(519): Homolog of NCBI NO: 3860319 NR Description: nucleolar protein [Cicer arietinum]
  misc_feature (1)..(522): Homolog of NCBI NO: 34899158 NR Description: putative nucleolar protein
  misc_feature (1)..(481): Homolog of NCBI NO: 15230621 NR Description: nucleolar protein, putative; protein id:
  misc_feature (1)..(498): Homolog of NCBI NO: 11994428 NR Description: nucleolar protein [Arabidopsis thaliana]
  misc_feature (1)..(522): Homolog of NCBI NO: 15223458 NR Description: SAR DNA binding protein, putative
MAMYVIYESSSGYGLFEVHGLDEIGQNTEAVRTSVSDLSRFGRVVQLTAFHPFESALDALNQVNAVSEGVMTDELRSFLELNLPKVKEGKKPKFSLGLAEPKLGSHIFEATKIPCQSNEFVLELLRGVRQHFDRFIKDLKPGDLEKSQLGLAHSYSRAKVKFNVNRVDNMVIQAIFMLDTLDKDINSFAMRVREWYSWHFPELVKIVNDNYLYARVSKMIDDKSKLTEDHIPMLTEVLGDEDKAKEVIEAGKASMGSDLSPLDLINVQTFAQKVMDLADYRKKLYDYLVTKMSDIAPNLAALIGEMVGARLISHAGSLTNLAKCPSSTLQILGAEKALFRALKTRGNTPKYGLIFHSSFIGRASAKNKGRIARYLANKCSIASRIDCFADGATTAFGEKLREQVEERLEFYDKGVAPRKNVDVMKEVIENLKQEEEGKEPVDASVKKSKKKKAKGEEEEEVVAMEEDKSEKKKKKEKRKMETAEENEKSEKKKTKKSKAGGEEETDDGHSTKKKKKKSKSAE

SEQ ID NO: 21749 - protein, 520 aa, Arabidopsis thaliana
  peptide (1)..(520): Ceres Seq. ID no. 12377347
  misc_feature (264)..(412): Pfam Name: Putative snoRNA binding domain Pfam Description: Putative snoRNA binding domain
  misc_feature (1)..(517): Homolog of NCBI NO: 23956150 NR Description: RIKEN cDNA 2310044F10 [Mus musculus]
  misc_feature (1)..(520): Homolog of NCBI NO: 20141472 NR Description: Nucleolar protein Nop56 (Nucleolar protein 5A)
  misc_feature (1)..(517): Homolog of NCBI NO: 30923357 NR Description: Nucleolar protein Nop56 (Nucleolar protein 5A)
  misc_feature (1)..(520): Homolog of NCBI NO: 14799394 NR Description: XNop56 protein [Xenopus laevis]
  misc_feature (1)..(494): Homolog of NCBI NO: 19112160 NR Description: putative U3 snoRNP component
  misc_feature (70)..(517): Homolog of NCBI NO: 3860319 NR Description: nucleolar protein [Cicer arietinum]
  misc_feature (1)..(520): Homolog of NCBI NO: 34899158 NR Description: putative nucleolar protein
  misc_feature (1)..(479): Homolog of NCBI NO: 15230621 NR Description: nucleolar protein, putative; protein id:
  misc_feature (1)..(496): Homolog of NCBI NO: 11994428 NR Description: nucleolar protein [Arabidopsis thaliana]
  misc_feature (1)..(520): Homolog of NCBI NO: 15223458 NR Description: SAR DNA binding protein, putative
MYVIYESSSGYGLFEVHGLDEIGQNTEAVRTSVSDLSRFGRVVQLTAFHPFESALDALNQVNAVSEGVMTDELRSFLELNLPKVKEGKKPKFSLGLAEPKLGSHIFEATKIPCQSNEFVLELLRGVRQHFDRFIKDLKPGDLEKSQLGLAHSYSRAKVKFNVNRVDNMVIQAIFMLDTLDKDINSFAMRVREWYSWHFPELVKIVNDNYLYARVSKMIDDKSKLTEDHIPMLTEVLGDEDKAKEVIEAGKASMGSDLSPLDLINVQTFAQKVMDLADYRKKLYDYLVTKMSDIAPNLAALIGEMVGARLISHAGSLTNLAKCPSSTLQILGAEKALFRALKTRGNTPKYGLIFHSSFIGRASAKNKGRIARYLANKCSIASRIDCFADGATTAFGEKLREQVEERLEFYDKGVAPRKNVDVMKEVIENLKQEEEGKEPVDASVKKSKKKKAKGEEEEEVVAMEEDKSEKKKKKEKRKMETAEENEKSEKKKTKKSKAGGEEETDDGHSTKKKKKKSKSAE

SEQ ID NO: 21750 - protein, 452 aa, Arabidopsis thaliana
  peptide (1)..(452): Ceres Seq. ID no. 12377348
  misc_feature (196)..(344): Pfam Name: Putative snoRNA binding domain Pfam Description: Putative snoRNA binding domain
  misc_feature (1)..(411): Homolog of NCBI NO: 15230621 NR Description: nucleolar protein, putative; protein id:
  misc_feature (1)..(428): Homolog of NCBI NO: 11994428 NR Description: nucleolar protein [Arabidopsis thaliana]
  misc_feature (1)..(452): Homolog of NCBI NO: 20141472 NR Description: Nucleolar protein Nop56 (Nucleolar protein 5A)
  misc_feature (1)..(452): Homolog of NCBI NO: 14799394 NR Description: XNop56 protein [Xenopus laevis]
  misc_feature (2)..(449): Homolog of NCBI NO: 3860319 NR Description: nucleolar protein [Cicer arietinum]
  misc_feature (1)..(452): Homolog of NCBI NO: 34899158 NR Description: putative nucleolar protein
  misc_feature (1)..(426): Homolog of NCBI NO: 19112160 NR Description: putative U3 snoRNP component
  misc_feature (1)..(449): Homolog of NCBI NO: 30923357 NR Description: Nucleolar protein Nop56 (Nucleolar protein 5A)
  misc_feature (1)..(449): Homolog of NCBI NO: 23956150 NR Description: RIKEN cDNA 2310044F10 [Mus musculus]
  misc_feature (1)..(452): Homolog of NCBI NO: 15223458 NR Description: SAR DNA binding protein, putative
MTDELRSFLELNLPKVKEGKKPKFSLGLAEPKLGSHIFEATKIPCQSNEFVLELLRGVRQHFDRFIKDLKPGDLEKSQLGLAHSYSRAKVKFNVNRVDNMVIQAIFMLDTLDKDINSFAMRVREWYSWHFPELVKIVNDNYLYARVSKMIDDKSKLTEDHIPMLTEVLGDEDKAKEVIEAGKASMGSDLSPLDLINVQTFAQKVMDLADYRKKLYDYLVTKMSDIAPNLAALIGEMVGARLISHAGSLTNLAKCPSSTLQILGAEKALFRALKTRGNTPKYGLIFHSSFIGRASAKNKGRIARYLANKCSIASRIDCFADGATTAFGEKLREQVEERLEFYDKGVAPRKNVDVMKEVIENLKQEEEGKEPVDASVKKSKKKKAKGEEEEEVVAMEEDKSEKKKKKEKRKMETAEENEKSEKKKTKKSKAGGEEETDDGHSTKKKKKKSKSAE

SEQ ID NO: 21751 - DNA, 675 bp, Arabidopsis thaliana
  misc_feature (1)..(675): Ceres Seq. ID no. 12423260
  misc_feature: MA Experiment ID: 20000070 Result: Up-regulated in Transcription
  misc_feature: MA Experiment 20000070 PARAMETER Experiment Name: At_100uM_ABA_Mutants_cDNA_P Parameter: Plant Line Value: CS24
  misc_feature: MA Experiment 20000070 PARAMETER Experiment Name: At_100uM_ABA_Mutants_cDNA_P Parameter: Timepoint (hr) Value: 6
  misc_feature: MA Experiment 20000070 PARAMETER Experiment Name: At_100uM_ABA_Mutants_cDNA_P Parameter: Tissue Value: Aerial
  misc_feature: MA Experiment 20000070 PARAMETER Experiment Name: At_100uM_ABA_Mutants_cDNA_P Parameter: Treatment Value: 100uM ABA vs. No Treatment
  misc_feature: MA Experiment ID: 20000071 Result: Up-regulated in Transcription
  misc_feature: MA Experiment 20000071 PARAMETER Experiment Name: At_100uM_ABA_Mutants_cDNA_P Parameter: Plant Line Value: CS8104
  misc_feature: MA Experiment 20000071 PARAMETER Experiment Name: At_100uM_ABA_Mutants_cDNA_P Parameter: Timepoint (hr) Value: 6
  misc_feature: MA Experiment 20000071 PARAMETER Experiment Name: At_100uM_ABA_Mutants_cDNA_P Parameter: Tissue Value: Aerial
  misc_feature: MA Experiment 20000071 PARAMETER Experiment Name: At_100uM_ABA_Mutants_cDNA_P Parameter: Treatment Value: 100uM ABA vs. No Treatment
  misc_feature: MA Experiment ID: 20000113 Result: Up-regulated in Transcription
  misc_feature: MA Experiment 20000113 PARAMETER Experiment Name: At_42deg_Heat_cDNA_P Parameter: Temperature (deg C) Value: 42 vs. 22
  misc_feature: MA Experiment 20000113 PARAMETER Experiment Name: At_42deg_Heat_cDNA_P Parameter: Timepoint (hr) Value: 8
  misc_feature: MA Experiment 20000113 PARAMETER Experiment Name: At_42deg_Heat_cDNA_P Parameter: Tissue Value: Aerial
  misc_feature: MA Experiment ID: 20000264 Result: Up-regulated in Transcription
  misc_feature: MA Experiment 20000264 PARAMETER Experiment Name: At_Open_Flower_P Parameter: Age (day) Value: 21
  misc_feature: MA Experiment 20000264 PARAMETER Experiment Name: At_Open_Flower_P Parameter: Plant Line Value: WS
  misc_feature: MA Experiment 20000264 PARAMETER Experiment Name: At_Open_Flower_P Parameter: Tissue Value: Open Flower vs. Whole Plant
  misc_feature: MA Experiment ID: 20000286 Result: Up-regulated in Transcription
  misc_feature: MA Experiment 20000286 PARAMETER Experiment Name: At_Open_Flower_P Parameter: Age (day) Value: 21
  misc_feature: MA Experiment 20000286 PARAMETER Experiment Name: At_Open_Flower_P Parameter: Plant Line Value: WS
  misc_feature: MA Experiment 20000286 PARAMETER Experiment Name: At_Open_Flower_P Parameter: Tissue Value: Half Open vs. Whole Plant
  misc_feature: MA Experiment ID: 20000794 Result: Up-regulated in Transcription
  misc_feature: MA Experiment 20000794 PARAMETER Experiment Name: At_Petals_P Parameter: Age (day) Value: 23-25 days
  misc_feature: MA Experiment 20000794 PARAMETER Experiment Name: At_Petals_P Parameter: Plant Line Value: WS
  misc_feature: MA Experiment 20000794 PARAMETER Experiment Name: At_Petals_P Parameter: Tissue Value: Petals vs. Whole plant
  misc_feature: MA Experiment ID: 20001910 Result: Up-regulated in Transcription
  misc_feature: MA Experiment 20001910 PARAMETER Experiment Name: At_Drought_Reproduction_P Parameter: Age (day) Value: 37
  misc_feature: MA Experiment 20001910 PARAMETER Experiment Name: At_Drought_Reproduction_P Parameter: Organism Value: A. thaliana
  misc_feature: MA Experiment 20001910 PARAMETER Experiment Name: At_Drought_Reproduction_P Parameter: Plant Line Value: WS
  misc_feature: MA Experiment 20001910 PARAMETER Experiment Name: At_Drought_Reproduction_P Parameter: Timepoint (day) Value: 7
  misc_feature: MA Experiment 20001910 PARAMETER Experiment Name: At_Drought_Reproduction_P Parameter: Tissue Value: Flowers
  misc_feature: MA Experiment 20001910 PARAMETER Experiment Name: At_Drought_Reproduction_P Parameter: Treatment Value: Drought vs. No Drought
aaaataaacatcgtttcttaaaagttcaaacagatcacaccatgaacctttcctctaacgaccaaccaagccaaggccgtatcaaggccaaggattggtcgactgatttgtgtgaatgttggatggacataaactcatgctgcttgacttgttggtgcccttgtgttgcctttggacgcatcgcggaggttgtagacagaggttccacatcgtgtggtgtgagcggagcgatgtacatgatcatattcatgttgaccgggtatggaggaagcagtctctactcttgcttttaccgaaccaaacttagagcccaatacaatctcaaggagagaccttgttgtgactgttgtgtccacttttgttgcgagccatgcgctctttgtcaagagtataggcaacttcaacacaaccgcgatttggacttggtcatcgggtggcatgggaatatggaacgacatgcacgacttgctgcctctacaccttcggctcctccacttcaagcacccatgtctagattggtttaacaatgagttacatatatctcgataaactatgcatatctattttagttgttttgatatcgtacgtgatgtaatttgtattcctttacatttgtcactcatctggtgtattgaatatttcggattaattattaatattctcttcgtgtgtgtc

SEQ ID NO: 21752 - protein, 173 aa, Arabidopsis thaliana
  peptide (1)..(173): Ceres Seq. ID no. 12423261
  misc_feature (28)..(134): Pfam Name: Protein of unknown function, DUF614 Pfam Description: Protein of unknown function, DUF614
  misc_feature (32)..(171): Homolog of NCBI NO: 8272628 NR Description: ORFX [Lycopersicon pennellii]
  misc_feature (32)..(171): Homolog of NCBI NO: 27414005 NR Description: fw2.2 [Lycopersicon pimpinellifolium]
  misc_feature (32)..(171): Homolog of NCBI NO: 27414017 NR Description: fw2.2 [Lycopersicon pennellii]
  misc_feature (32)..(171): Homolog of NCBI NO: 8272626 NR Description: ORFX [Lycopersicon esculentum]
  misc_feature (31)..(171): Homolog of NCBI NO: 15223921 NR Description: unknown protein; protein id: At1g14880.1
  misc_feature (32)..(156): Homolog of NCBI NO: 34897270 NR Description: hypothetical protein [Oryza sativa (japonica
  misc_feature (32)..(166): Homolog of NCBI NO: 34897274 NR Description: hypothetical protein [Oryza sativa (japonica
  misc_feature (31)..(171): Homolog of NCBI NO: 15223920 NR Description: unknown protein
  misc_feature (32)..(171): Homolog of NCBI NO: 4105794 NR Description: PGPS/D12 [Petunia x hybrida]
  misc_feature (14)..(173): Homolog of NCBI NO: 15221456 NR Description: hypothetical protein; protein id: At1g68610.1
NKHRFLKVQTDHTMNLSSNDQPSQGRIKAKDWSTDLCECWMDINSCCLTCWCPCVAFGRIAEVVDRGSTSCGVSGAMYMIIFMLTGYGGSSLYSCFYRTKLRAQYNLKERPCCDCCVHFCCEPCALCQEYRQLQHNRDLDLVIGWHGNMERHARLAASTPSAPPLQAPMSRLV

SEQ ID NO: 21753 - protein, 160 aa, Arabidopsis thaliana
  peptide (1)..(160): Ceres Seq. ID no. 12423262
  misc_feature (15)..(121): Pfam Name: Protein of unknown function, DUF614 Pfam Description: Protein of unknown function, DUF614
  misc_feature (19)..(158): Homolog of NCBI NO: 27414017 NR Description: fw2.2 [Lycopersicon pennellii]
  misc_feature (19)..(158): Homolog of NCBI NO: 27414005 NR Description: fw2.2 [Lycopersicon pimpinellifolium]
  misc_feature (19)..(158): Homolog of NCBI NO: 8272628 NR Description: ORFX [Lycopersicon pennellii]
  misc_feature (19)..(158): Homolog of NCBI NO: 8272626 NR Description: ORFX [Lycopersicon esculentum]
  misc_feature (18)..(158): Homolog of NCBI NO: 15223921 NR Description: unknown protein; protein id: At1g14880.1
  misc_feature (19)..(143): Homolog of NCBI NO: 34897270 NR Description: hypothetical protein [Oryza sativa (japonica
  misc_feature (19)..(153): Homolog of NCBI NO: 34897274 NR Description: hypothetical protein [Oryza sativa (japonica
  misc_feature (18)..(158): Homolog of NCBI NO: 15223920 NR Description: unknown protein
  misc_feature (19)..(158): Homolog of NCBI NO: 4105794 NR Description: PGPS/D12 [Petunia x hybrida]
  misc_feature (1)..(160): Homolog of NCBI NO: 15221456 NR Description: hypothetical protein; protein id: At1g68610.1
MNLSSNDQPSQGRIKAKDWSTDLCECWMDINSCCLTCWCPCVAFGRIAEVVDRGSTSCGVSGAMYMIIFMLTGYGGSSLYSCFYRTKLRAQYNLKERPCCDCCVHFCCEPCALCQEYRQLQHNRDLDLVIGWHGNMERHARLAASTPSAPPLQAPMSRLV

SEQ ID NO: 21754 - protein, 133 aa, Arabidopsis thaliana
  peptide (1)..(133): Ceres Seq. ID no. 12423263
  misc_feature (1)..(94): Pfam Name: Protein of unknown function, DUF614 Pfam Description: Protein of unknown function, DUF614
  misc_feature (1)..(131): Homolog of NCBI NO: 27414005 NR Description: fw2.2 [Lycopersicon pimpinellifolium]
  misc_feature (1)..(131): Homolog of NCBI NO: 8272628 NR Description: ORFX [Lycopersicon pennellii]
  misc_feature (1)..(131): Homolog of NCBI NO: 27414017 NR Description: fw2.2 [Lycopersicon pennellii]
  misc_feature (1)..(131): Homolog of NCBI NO: 8272626 NR Description: ORFX [Lycopersicon esculentum]
  misc_feature (1)..(131): Homolog of NCBI NO: 15223921 NR Description: unknown protein; protein id: At1g14880.1
  misc_feature (1)..(116): Homolog of NCBI NO: 34897270 NR Description: hypothetical protein [Oryza sativa (japonica
  misc_feature (1)..(126): Homolog of NCBI NO: 34897274 NR Description: hypothetical protein [Oryza sativa (japonica
  misc_feature (1)..(131): Homolog of NCBI NO: 15223920 NR Description: unknown protein
  misc_feature (1)..(131): Homolog of NCBI NO: 4105794 NR Description: PGPS/D12 [Petunia x hybrida]
  misc_feature (1)..(133): Homolog of NCBI NO: 15221456 NR Description: hypothetical protein; protein id: At1g68610.1
MDINSCCLTCWCPCVAFGRIAEVVDRGSTSCGVSGAMYMIIFMLTGYGGSSLYSCFYRTKLRAQYNLKERPCCDCCVHFCCEPCALCQEYRQLQHNRDLDLVIGWHGNMERHARLAASTPSAPPLQAPMSRLV

SEQ ID NO: 21755 - DNA, 873 bp, Arabidopsis thaliana
  misc_feature (1)..(873): Ceres Seq. ID no. 13497760
  misc_feature: MA Experiment ID: 108488 Result: Down-regulated in Transcription
  misc_feature: MA Experiment ID: 20000069 Result: Up-regulated in Transcription
  misc_feature: MA Experiment 20000069 PARAMETER Experiment Name: At_100uM_ABA_Mutants_cDNA_P Parameter: Plant Line Value: CS23
  misc_feature: MA Experiment 20000069 PARAMETER Experiment Name: At_100uM_ABA_Mutants_cDNA_P Parameter: Timepoint (hr) Value: 6
  misc_feature: MA Experiment 20000069 PARAMETER Experiment Name: At_100uM_ABA_Mutants_cDNA_P Parameter: Tissue Value: Aerial
  misc_feature: MA Experiment 20000069 PARAMETER Experiment Name: At_100uM_ABA_Mutants_cDNA_P Parameter: Treatment Value: 100uM ABA vs. No Treatment
  misc_feature: MA Experiment ID: 20000070 Result: Up-regulated in Transcription
  misc_feature: MA Experiment 20000070 PARAMETER Experiment Name: At_100uM_ABA_Mutants_cDNA_P Parameter: Plant Line Value: CS24
  misc_feature: MA Experiment 20000070 PARAMETER Experiment Name: At_100uM_ABA_Mutants_cDNA_P Parameter: Timepoint (hr) Value: 6
  misc_feature: MA Experiment 20000070 PARAMETER Experiment Name: At_100uM_ABA_Mutants_cDNA_P Parameter: Tissue Value: Aerial
  misc_feature: MA Experiment 20000070 PARAMETER Experiment Name: At_100uM_ABA_Mutants_cDNA_P Parameter: Treatment Value: 100uM ABA vs. No Treatment
  misc_feature: MA Experiment ID: 20000071 Result: Up-regulated in Transcription
  misc_feature: MA Experiment 20000071 PARAMETER Experiment Name: At_100uM_ABA_Mutants_cDNA_P Parameter: Plant Line Value: CS8104
  misc_feature: MA Experiment 20000071 PARAMETER Experiment Name: At_100uM_ABA_Mutants_cDNA_P Parameter: Timepoint (hr) Value: 6
  misc_feature: MA Experiment 20000071 PARAMETER Experiment Name: At_100uM_ABA_Mutants_cDNA_P Parameter: Tissue Value: Aerial
  misc_feature: MA Experiment 20000071 PARAMETER Experiment Name: At_100uM_ABA_Mutants_cDNA_P Parameter: Treatment Value: 100uM ABA vs. No Treatment
  misc_feature: MA Experiment ID: 20000072 Result: Up-regulated in Transcription
  misc_feature: MA Experiment 20000072 PARAMETER Experiment Name: At_100uM_ABA_Mutants_cDNA_P Parameter: Plant Line Value: CS8105
  misc_feature: MA Experiment 20000072 PARAMETER Experiment Name: At_100uM_ABA_Mutants_cDNA_P Parameter: Timepoint (hr) Value: 6
  misc_feature: MA Experiment 20000072 PARAMETER Experiment Name: At_100uM_ABA_Mutants_cDNA_P Parameter: Tissue Value: Aerial
  misc_feature: MA Experiment 20000072 PARAMETER Experiment Name: At_100uM_ABA_Mutants_cDNA_P Parameter: Treatment Value: 100uM ABA vs. No Treatment
  misc_feature: MA Experiment ID: 20000086 Result: Up-regulated in Transcription
  misc_feature: MA Experiment 20000086 PARAMETER Experiment Name: At_100uM_ABA_Mutants_cDNA_P Parameter: Plant Line Value: CS22
  misc_feature: MA Experiment 20000086 PARAMETER Experiment Name: At_100uM_ABA_Mutants_cDNA_P Parameter: Timepoint (hr) Value: 6
  misc_feature: MA Experiment 20000086 PARAMETER Experiment Name: At_100uM_ABA_Mutants_cDNA_P Parameter: Tissue Value: Aerial
  misc_feature: MA Experiment 20000086 PARAMETER Experiment Name: At_100uM_ABA_Mutants_cDNA_P Parameter: Treatment Value: 100uM ABA vs. No Treatment
  misc_feature: MA Experiment ID: 20000087 Result: Up-regulated in Transcription
  misc_feature: MA Experiment 20000087 PARAMETER Experiment Name: At_100uM_ABA_Mutants_cDNA_P Parameter: Plant Line Value: WS
  misc_feature: MA Experiment 20000087 PARAMETER Experiment Name: At_100uM_ABA_Mutants_cDNA_P Parameter: Timepoint (hr) Value: 6
  misc_feature: MA Experiment 20000087 PARAMETER Experiment Name: At_100uM_ABA_Mutants_cDNA_P Parameter: Tissue Value: Aerial
  misc_feature: MA Experiment 20000087 PARAMETER Experiment Name: At_100uM_ABA_Mutants_cDNA_P Parameter: Treatment Value: 100uM ABA vs. No Treatment
  misc_feature: MA Experiment ID: 20000089 Result: Up-regulated in Transcription
  misc_feature: MA Experiment ID: 20000090 Result: Up-regulated in Transcription
  misc_feature: MA Experiment ID: 20000117 Result: Up-regulated in Transcription
  misc_feature: MA Experiment 20000117 PARAMETER Experiment Name: At_100uM_ABA_Mutants_cDNA_P Parameter: Plant Line Value: Columbia
  misc_feature: MA Experiment 20000117 PARAMETER Experiment Name: At_100uM_ABA_Mutants_cDNA_P Parameter: Timepoint (hr) Value: 6
  misc_feature: MA Experiment 20000117 PARAMETER Experiment Name: At_100uM_ABA_Mutants_cDNA_P Parameter: Tissue Value: Aerial
  misc_feature: MA Experiment 20000117 PARAMETER Experiment Name: At_100uM_ABA_Mutants_cDNA_P Parameter: Treatment Value: 100uM ABA vs. No Treatment
  misc_feature: MA Experiment ID: 20000171 Result: Down-regulated in Transcription
  misc_feature: MA Experiment 20000171 PARAMETER Experiment Name: At_42deg_Heat_P Parameter: Age (day) Value: 14
  misc_feature: MA Experiment 20000171 PARAMETER Experiment Name: At_42deg_Heat_P Parameter: Organism Value: A. thaliana
  misc_feature: MA Experiment 20000171 PARAMETER Experiment Name: At_42deg_Heat_P Parameter: Plant Line Value: WS
  misc_feature: MA Experiment 20000171 PARAMETER Experiment Name: At_42deg_Heat_P Parameter: Temperature (deg C) Value: 42 vs. 22
  misc_feature: MA Experiment 20000171 PARAMETER Experiment Name: At_42deg_Heat_P Parameter: Timepoint (hr) Value: 1
  misc_feature: MA Experiment 20000171 PARAMETER Experiment Name: At_42deg_Heat_P Parameter: Tissue Value: Aerial
  misc_feature: MA Experiment ID: 20000173 Result: Down-regulated in Transcription
  misc_feature: MA Experiment 20000173 PARAMETER Experiment Name: At_42deg_Heat_P Parameter: Age (day) Value: 14
  misc_feature: MA Experiment 20000173 PARAMETER Experiment Name: At_42deg_Heat_P Parameter: Organism Value: A. thaliana
  misc_feature: MA Experiment 20000173 PARAMETER Experiment Name: At_42deg_Heat_P Parameter: Plant Line Value: WS
  misc_feature: MA Experiment 20000173 PARAMETER Experiment Name: At_42deg_Heat_P Parameter: Temperature (deg C) Value: 42 vs. 22
  misc_feature: MA Experiment 20000173 PARAMETER Experiment Name: At_42deg_Heat_P Parameter: Timepoint (hr) Value: 6
  misc_feature: MA Experiment 20000173 PARAMETER Experiment Name: At_42deg_Heat_P Parameter: Tissue Value: Aerial
  misc_feature: MA Experiment ID: 20000184 Result: Down-regulated in Transcription
  misc_feature: MA Experiment 20000184 PARAMETER Experiment Name: At_Shoots__P Parameter: Age (day) Value: 7
  misc_feature: MA Experiment 20000184 PARAMETER Experiment Name: At_Shoots__P Parameter: Tissue Value: Shoots vs. Whole Plant
  misc_feature: MA Experiment ID: 20000234 Result: Down-regulated in Transcription
  misc_feature: MA Experiment 20000234 PARAMETER Experiment Name: At_Siliques_P Parameter: Age (day) Value: 21
  misc_feature: MA Experiment 20000234 PARAMETER Experiment Name: At_Siliques_P Parameter: Organism Value: A. thaliana
  misc_feature: MA Experiment 20000234 PARAMETER Experiment Name: At_Siliques_P Parameter: Plant Line Value: WS
  misc_feature: MA Experiment 20000234 PARAMETER Experiment Name: At_Siliques_P Parameter: Tissue Value: Less Than 5mm Siliques vs. Whole Plant
  misc_feature: MA Experiment ID: 20000235 Result: Down-regulated in Transcription
  misc_feature: MA Experiment 20000235 PARAMETER Experiment Name: At_Siliques_P Parameter: Age (day) Value: 21
  misc_feature: MA Experiment 20000235 PARAMETER Experiment Name: At_Siliques_P Parameter: Organism Value: A. thaliana
  misc_feature: MA Experiment 20000235 PARAMETER Experiment Name: At_Siliques_P Parameter: Plant Line Value: WS
  misc_feature: MA Experiment 20000235 PARAMETER Experiment Name: At_Siliques_P Parameter: Tissue Value: 5-10mm Siliques vs. Whole Plant
  misc_feature: MA Experiment ID: 20000436 Result: Up-regulated in Transcription
  misc_feature: MA Experiment 20000436 PARAMETER Experiment Name: At_Drought_P Parameter: Age (day) Value: 7
  misc_feature: MA Experiment 20000436 PARAMETER Experiment Name: At_Drought_P Parameter: Organism Value: A. thaliana
  misc_feature: MA Experiment 20000436 PARAMETER Experiment Name: At_Drought_P Parameter: Plant Line Value: WS
  misc_feature: MA Experiment 20000436 PARAMETER Experiment Name: At_Drought_P Parameter: Timepoint (hr) Value: 12
  misc_feature: MA Experiment 20000436 PARAMETER Experiment Name: At_Drought_P Parameter: Tissue Value: Whole Plant
  misc_feature: MA Experiment 20000436 PARAMETER Experiment Name: At_Drought_P Parameter: Treatment Value: Drought vs. No Drought
  misc_feature: MA Experiment ID: 20000437 Result: Up-regulated in Transcription
  misc_feature: MA Experiment 20000437 PARAMETER Experiment Name: At_Drought_P Parameter: Age (day) Value: 8
  misc_feature: MA Experiment 20000437 PARAMETER Experiment Name: At_Drought_P Parameter: Organism Value: A. thaliana
  misc_feature: MA Experiment 20000437 PARAMETER Experiment Name: At_Drought_P Parameter: Plant Line Value: WS
  misc_feature: MA Experiment 20000437 PARAMETER Experiment Name: At_Drought_P Parameter: Timepoint (hr) Value: 24
  misc_feature: MA Experiment 20000437 PARAMETER Experiment Name: At_Drought_P Parameter: Tissue Value: Whole Plant
  misc_feature: MA Experiment 20000437 PARAMETER Experiment Name: At_Drought_P Parameter: Treatment Value: Drought vs. No Drought
  misc_feature: MA Experiment ID: 20000438 Result: Down-regulated in Transcription
  misc_feature: MA Experiment 20000438 PARAMETER Experiment Name: At_Shoots__P Parameter: Age (day) Value: 14
  misc_feature: MA Experiment 20000438 PARAMETER Experiment Name: At_Shoots__P Parameter: Tissue Value: Shoots vs. Whole Plant
  misc_feature: MA Experiment ID: 20000439 Result: Down-regulated in Transcription
  misc_feature: MA Experiment 20000439 PARAMETER Experiment Name: At_Roots__P Parameter: Age (day) Value: 14 vs. 21
  misc_feature: MA Experiment 20000439 PARAMETER Experiment Name: At_Roots__P Parameter: Organism Value: A. thaliana
  misc_feature: MA Experiment 20000439 PARAMETER Experiment Name: At_Roots__P Parameter: Tissue Value: Roots vs. Whole Plant
  misc_feature: MA Experiment ID: 20000495 Result: Down-regulated in Transcription
  misc_feature: MA Experiment 20000495 PARAMETER Experiment Name: At_Guard_Cells_P Parameter: Harvest Date Value: 8/2/2002
  misc_feature: MA Experiment 20000495 PARAMETER Experiment Name: At_Guard_Cells_P Parameter: Organism Value: A. thaliana
  misc_feature: MA Experiment 20000495 PARAMETER Experiment Name: At_Guard_Cells_P Parameter: Tissue Value: Guard Cells vs. Leaves
  misc_feature: MA Experiment ID: 20001451 Result: Down-regulated in Transcription
  misc_feature: MA Experiment 20001451 PARAMETER Experiment Name: At_Far-red-induction_P Parameter: Age (day) Value: 7
  misc_feature: MA Experiment 20001451 PARAMETER Experiment Name: At_Far-red-induction_P Parameter: Light Value: Far-red vs. White
  misc_feature: MA Experiment 20001451 PARAMETER Experiment Name: At_Far-red-induction_P Parameter: Organism Value: A. thaliana
  misc_feature: MA Experiment 20001451 PARAMETER Experiment Name: At_Far-red-induction_P Parameter: Plant Line Value: Columbia
  misc_feature: MA Experiment 20001451 PARAMETER Experiment Name: At_Far-red-induction_P Parameter: Timepoint (hr) Value: 24
  misc_feature: MA Experiment 20001451 PARAMETER Experiment Name: At_Far-red-induction_P Parameter: Tissue Value: Whole Plant
  misc_feature: MA Experiment ID: 20001558 Result: Down-regulated in Transcription
  misc_feature: MA Experiment 20001558 PARAMETER Experiment Name: At_Drought_Soil_Dry_P Parameter: Age (day) Value: 27
  misc_feature: MA Experiment 20001558 PARAMETER Experiment Name: At_Drought_Soil_Dry_P Parameter: Organism Value: A. thaliana
  misc_feature: MA Experiment 20001558 PARAMETER Experiment Name: At_Drought_Soil_Dry_P Parameter: Plant Line Value: WS
  misc_feature: MA Experiment 20001558 PARAMETER Experiment Name: At_Drought_Soil_Dry_P Parameter: Post Timepoint (hr) Value: 6
  misc_feature: MA Experiment 20001558 PARAMETER Experiment Name: At_Drought_Soil_Dry_P Parameter: Post-Treatment Value: Re-Water vs. No Drought
  misc_feature: MA Experiment 20001558 PARAMETER Experiment Name: At_Drought_Soil_Dry_P Parameter: Timepoint (day) Value: 13
  misc_feature: MA Experiment 20001558 PARAMETER Experiment Name: At_Drought_Soil_Dry_P Parameter: Treatment Value: Drought vs. No Drought
  misc_feature: MA Experiment ID: 20001560 Result: Down-regulated in Transcription
  misc_feature: MA Experiment 20001560 PARAMETER Experiment Name: At_Drought_Soil_Dry_P Parameter: Age (day) Value: 28
  misc_feature: MA Experiment 20001560 PARAMETER Experiment Name: At_Drought_Soil_Dry_P Parameter: Organism Value: A. thaliana
  misc_feature: MA Experiment 20001560 PARAMETER Experiment Name: At_Drought_Soil_Dry_P Parameter: Plant Line Value: WS
  misc_feature: MA Experiment 20001560 PARAMETER Experiment Name: At_Drought_Soil_Dry_P Parameter: Post Timepoint (hr) Value: None
  misc_feature: MA Experiment 20001560 PARAMETER Experiment Name: At_Drought_Soil_Dry_P Parameter: Post-Treatment Value: None
  misc_feature: MA Experiment 20001560 PARAMETER Experiment Name: At_Drought_Soil_Dry_P Parameter: Timepoint (day) Value: 14
  misc_feature: MA Experiment 20001560 PARAMETER Experiment Name: At_Drought_Soil_Dry_P Parameter: Treatment Value: Drought vs. No Drought
attataacttggatcagattcttcttctcctctaaacaacaacaaagtctctcttccttctgtctttcacatttcctcttcccctaaaaacagaactcaaaaccaaaacaaaatgactcgctcctctagattccttggtacggcgtcgcctccaccaccggaagaaatcctcgccgccgaaaccgacatggttgtgattctctcagcacttctctgcgctctcgtatgcgtagccggtttagccgccgtagctcgctgcgcttggctccgccgtctcaccggagttaatcccgccgccgtcggagaagctccaccgcctaacaaaggcctcaagaaaaaagcacttcaagctctccctaaatcaacttacaccgcctctgcctctaccgccgccgccgctgacgatctaccgtgctcttcagtcggagacggagattcatccaccgagtgtgcaatatgcataacggaattttcggagggcgaagaaatcagaatcttaccgctgtgtagtcacgccttccacgtggcgtgtatagacaagtggttgacttcacggtcgtcgtgtccgtcttgtcgtcggatattggtgccggtgaagtgtgataggtgtgggcaccatgcttcgacggcggagactcaggtcaaagatcaacctcctcatcaccaacatccttcacagttcacttccgccattattcctgcttttcttccttgaaatgttttcactttattaaatttttataatttgctaaaaatatcggcatgattaaaagtaaagtattaattaattaggaattagtaatctttagttaagtacttttatatttctcctctgtaatcctctgttctgaattaatcagatgaaatttcgat

SEQ ID NO: 21756 - protein, 200 aa, Arabidopsis thaliana
  peptide (1)..(200): Ceres Seq. ID no. 13497761
  misc_feature (113)..(154): Pfam Name: Zinc finger, C3HC4 type (RING finger) Pfam Description: Zinc finger, C3HC4 type (RING finger)
  misc_feature (113)..(154): Pfam Name: Zinc finger, C3HC4 type (RING finger) Pfam Description: Zinc finger, C3HC4 type (RING finger)
  misc_feature (113)..(154): Pfam Name: Zinc finger, C3HC4 type (RING finger) Pfam Description: Zinc finger, C3HC4 type (RING finger)
  misc_feature (10)..(182): Homolog of NCBI NO: 15222073 NR Description: RING-H2 finger protein RHA3a -related
  misc_feature (20)..(188): Homolog of NCBI NO: 9293902 NR Description: contains similarity to RING zinc finger
  misc_feature (6)..(167): Homolog of NCBI NO: 21555237 NR Description: putative RING zinc finger protein [Arabidopsis
  misc_feature (6)..(167): Homolog of NCBI NO: 15223041 NR Description: RING zinc finger protein -related [Arabidopsis
  misc_feature (1)..(164): Homolog of NCBI NO: 7489432 NR Description: probable ring finger protein - barley
  misc_feature (10)..(182): Homolog of NCBI NO: 15222073 NR Description: RING-H2 finger protein RHA3a -related
  misc_feature (6)..(167): Homolog of NCBI NO: 21555237 NR Description: putative RING zinc finger protein [Arabidopsis
  misc_feature (1)..(164): Homolog of NCBI NO: 7489432 NR Description: probable ring finger protein - barley
  misc_feature (6)..(167): Homolog of NCBI NO: 15223041 NR Description: RING zinc finger protein -related [Arabidopsis
  misc_feature (6)..(167): Homolog of NCBI NO: 21555237 NR Description: putative RING zinc finger protein [Arabidopsis
  misc_feature (20)..(188): Homolog of NCBI NO: 9293902 NR Description: contains similarity to RING zinc finger
  misc_feature (10)..(182): Homolog of NCBI NO: 15222073 NR Description: RING-H2 finger protein RHA3a -related
  misc_feature (1)..(200): Homolog of NCBI NO: 15237013 NR Description: RING-H2 finger protein RHA3b [Arabidopsis
  misc_feature (1)..(200): Homolog of NCBI NO: 15227839 NR Description: RING zinc finger protein -related [Arabidopsis
  misc_feature (10)..(181): Homolog of NCBI NO: 15218042 NR Description: RING zinc finger protein -related [Arabidopsis
  misc_feature (71)..(166): Homolog of NCBI NO: 37536508 NR Description: putative ring finger protein
  misc_feature (1)..(68): Homolog of NCBI NO: 37536508 NR Description: putative ring finger protein
  misc_feature (1)..(200): Homolog of NCBI NO: 15237013 NR Description: RING-H2 finger protein RHA3b [Arabidopsis
  misc_feature (1)..(200): Homolog of NCBI NO: 15227839 NR Description: RING zinc finger protein -related [Arabidopsis
  misc_feature (10)..(181): Homolog of NCBI NO: 15218042 NR Description: RING zinc finger protein -related [Arabidopsis
  misc_feature (71)..(166): Homolog of NCBI NO: 37536508 NR Description: putative ring finger protein
  misc_feature (1)..(68): Homolog of NCBI NO: 37536508 NR Description: putative ring finger protein
  misc_feature (1)..(164): Homolog of NCBI NO: 7489432 NR Description: probable ring finger protein - barley
  misc_feature (6)..(167): Homolog of NCBI NO: 15223041 NR Description: RING zinc finger protein -related [Arabidopsis
  misc_feature (20)..(188): Homolog of NCBI NO: 9293902 NR Description: contains similarity to RING zinc finger
  misc_feature (1)..(68): Homolog of NCBI NO: 37536508 NR Description: putative ring finger protein
  misc_feature (71)..(166): Homolog of NCBI NO: 37536508 NR Description: putative ring finger protein
  misc_feature (10)..(181): Homolog of NCBI NO: 15218042 NR Description: RING zinc finger protein -related [Arabidopsis
  misc_feature (1)..(200): Homolog of NCBI NO: 15227839 NR Description: RING zinc finger protein -related [Arabidopsis
  misc_feature (1)..(200): Homolog of NCBI NO: 15237013 NR Description: RING-H2 finger protein RHA3b [Arabidopsis
MTRSSRFLGTASPPPPEEILAAETDMVVILSALLCALVCVAGLAAVARCAWLRRLTGVNPAAVGEAPPPNKGLKKKALQALPKSTYTASASTAAAADDLPCSSVGDGDSSTECAICITEFSEGEEIRILPLCSHAFHVACIDKWLTSRSSCPSCRRILVPVKCDRCGHHASTAETQVKDQPPHHQHPSQFTSAIIPAFLP

SEQ ID NO: 21757 - protein, 175 aa, Arabidopsis thaliana
  peptide (1)..(175): Ceres Seq. ID no. 13497762
  misc_feature (88)..(129): Pfam Name: Zinc finger, C3HC4 type (RING finger) Pfam Description: Zinc finger, C3HC4 type (RING finger)
  misc_feature (88)..(129): Pfam Name: Zinc finger, C3HC4 type (RING finger) Pfam Description: Zinc finger, C3HC4 type (RING finger)
  misc_feature (88)..(129): Pfam Name: Zinc finger, C3HC4 type (RING finger) Pfam Description: Zinc finger, C3HC4 type (RING finger)
  misc_feature (1)..(157): Homolog of NCBI NO: 15222073 NR Description: RING-H2 finger protein RHA3a -related
  misc_feature (1)..(163): Homolog of NCBI NO: 9293902 NR Description: contains similarity to RING zinc finger
  misc_feature (1)..(142): Homolog of NCBI NO: 21555237 NR Description: putative RING zinc finger protein [Arabidopsis
  misc_feature (1)..(142): Homolog of NCBI NO: 15223041 NR Description: RING zinc finger protein -related [Arabidopsis
  misc_feature (1)..(139): Homolog of NCBI NO: 7489432 NR Description: probable ring finger protein - barley
  misc_feature (1)..(157): Homolog of NCBI NO: 15222073 NR Description: RING-H2 finger protein RHA3a -related
  misc_feature (1)..(142): Homolog of NCBI NO: 21555237 NR Description: putative RING zinc finger protein [Arabidopsis
  misc_feature (1)..(139): Homolog of NCBI NO: 7489432 NR Description: probable ring finger protein - barley
  misc_feature (1)..(142): Homolog of NCBI NO: 15223041 NR Description: RING zinc finger protein -related [Arabidopsis
  misc_feature (1)..(142): Homolog of NCBI NO: 21555237 NR Description: putative RING zinc finger protein [Arabidopsis
  misc_feature (1)..(163): Homolog of NCBI NO: 9293902 NR Description: contains similarity to RING zinc finger
  misc_feature (1)..(157): Homolog of NCBI NO: 15222073 NR Description: RING-H2 finger protein RHA3a -related
  misc_feature (1)..(175): Homolog of NCBI NO: 15237013 NR Description: RING-H2 finger protein RHA3b [Arabidopsis
  misc_feature (1)..(175): Homolog of NCBI NO: 15227839 NR Description: RING zinc finger protein -related [Arabidopsis
  misc_feature (1)..(156): Homolog of NCBI NO: 15218042 NR Description: RING zinc finger protein -related [Arabidopsis
  misc_feature (46)..(141): Homolog of NCBI NO: 37536508 NR Description: putative ring finger protein
  misc_feature (1)..(43): Homolog of NCBI NO: 37536508 NR Description: putative ring finger protein
  misc_feature (1)..(175): Homolog of NCBI NO: 15237013 NR Description: RING-H2 finger protein RHA3b [Arabidopsis
  misc_feature (1)..(175): Homolog of NCBI NO: 15227839 NR Description: RING zinc finger protein -related [Arabidopsis
  misc_feature (1)..(156): Homolog of NCBI NO: 15218042 NR Description: RING zinc finger protein -related [Arabidopsis
  misc_feature (46)..(141): Homolog of NCBI NO: 37536508 NR Description: putative ring finger protein
  misc_feature (1)..(43): Homolog of NCBI NO: 37536508 NR Description: putative ring finger protein
  misc_feature (1)..(139): Homolog of NCBI NO: 7489432 NR Description: probable ring finger protein - barley
  misc_feature (1)..(142): Homolog of NCBI NO: 15223041 NR Description: RING zinc finger protein -related [Arabidopsis
  misc_feature (1)..(163): Homolog of NCBI NO: 9293902 NR Description: contains similarity to RING zinc finger
  misc_feature (1)..(43): Homolog of NCBI NO: 37536508 NR Description: putative ring finger protein
  misc_feature (46)..(141): Homolog of NCBI NO: 37536508 NR Description: putative ring finger protein
  misc_feature (1)..(156): Homolog of NCBI NO: 15218042 NR Description: RING zinc finger protein -related [Arabidopsis
  misc_feature (1)..(175): Homolog of NCBI NO: 15227839 NR Description: RING zinc finger protein -related [Arabidopsis
  misc_feature (1)..(175): Homolog of NCBI NO: 15237013 NR Description: RING-H2 finger protein RHA3b [Arabidopsis
MVVILSALLCALVCVAGLAAVARCAWLRRLTGVNPAAVGEAPPPNKGLKKKALQALPKSTYTASASTAAAADDLPCSSVGDGDSSTECAICITEFSEGEEIRILPLCSHAFHVACIDKWLTSRSSCPSCRRILVPVKCDRCGHHASTAETQVKDQPPHHQHPSQFTSAIIPAFLP

SEQ ID NO: 21758 - DNA, 945 bp, Arabidopsis thaliana
  misc_feature (1)..(945): Ceres Seq. ID no. 12348709
  misc_feature: MA Experiment ID: 108434 Result: Up-regulated in Transcription
  misc_feature: MA Experiment 108434 PARAMETER Experiment Name: At_Root_Tips_cDNA_P Parameter: Tissue Value: Root Tips
  misc_feature: MA Experiment ID: 108462 Result: Down-regulated in Transcription
  misc_feature: MA Experiment 108462 PARAMETER Experiment Name: At_Germinating_Seeds_cDNA_P Parameter: Age (day) Value: 2 vs. 0
  misc_feature: MA Experiment 108462 PARAMETER Experiment Name: At_Germinating_Seeds_cDNA_P Parameter: Tissue Value: Germinating Seeds
  misc_feature: MA Experiment ID: 108463 Result: Down-regulated in Transcription
  misc_feature: MA Experiment 108463 PARAMETER Experiment Name: At_Germinating_Seeds_cDNA_P Parameter: Age (day) Value: 3 vs. 0
  misc_feature: MA Experiment 108463 PARAMETER Experiment Name: At_Germinating_Seeds_cDNA_P Parameter: Tissue Value: Germinating Seeds
  misc_feature: MA Experiment ID: 108464 Result: Down-regulated in Transcription
  misc_feature: MA Experiment 108464 PARAMETER Experiment Name: At_Germinating_Seeds_cDNA_P Parameter: Age (day) Value: 4 vs. 0
  misc_feature: MA Experiment 108464 PARAMETER Experiment Name: At_Germinating_Seeds_cDNA_P Parameter: Tissue Value: Germinating Seeds
  misc_feature: MA Experiment ID: 20000184 Result: Up-regulated in Transcription
  misc_feature: MA Experiment 20000184 PARAMETER Experiment Name: At_Shoots__P Parameter: Age (day) Value: 7
  misc_feature: MA Experiment 20000184 PARAMETER Experiment Name: At_Shoots__P Parameter: Tissue Value: Shoots vs. Whole Plant
aatcttgaccacagcaaagagaaacaaacaatggcggcttctctgcaatcagcaaaccctacattgtcacgaaccctagcttctccgaacaaaccttcctccttcgccaccttccgatctccatttctcagattcaattcaacatccgtcgcttccaatttcaaacccctagtttctcgagaagcatcctcatcgttcgtcactcgctccgccgccgagccacaagaaagaaaaaccttccatggactgtgctatgtcgtcggcgacaacatcgacactgaccaaatcattcccgcggagtttctcactctcgtcccttcgaatccagaggaatacgagaaactcggttcttacgctttagttggtcttccagcttcttacaaggaacgattcgttcagccaggtgagatgaagacgaagtactcaatcatcattggcggtgaaaactttggatgtggatcgtcacgtgaacatgctccggtttgtttaggagcagcgggagctaaagcagtggtggctcagtcttatgctagaatctttttcaggaactctgttgctactggtgaggtttatcctttggattctgaagttagggtttgtgatgagtgtacaactggtgatgttgcgactgttgagttgagggaaggagatagtattttgatcaatcatacgactgggaaagagtacaagcttaagccgattggtgatgctggaccagtgattgatgctggtggtatatttgcttatgctaggaaagctggaatgattccatctgctgctgcttgattttgacttcaggtgtcaatggaagtgcatgagagtcacttcaaggatcttgatccaataataagaatatgtaatgtttccaaaagcttatgaacctaatctatgttttatgaatatatatgactatcggctttagtcttcagtatcagtttcttgttt

SEQ ID NO: 21759 - protein, 261 aa, Arabidopsis thaliana
  peptide (1)..(261): Ceres Seq. ID no. 12348710
  misc_feature (77)..(254): Homolog of NCBI NO: 20094218 NR Description: 3-isopropylmalate dehydratase small subunit
  misc_feature (88)..(236): Homolog of NCBI NO: 15896420 NR Description: 3-isopropylmalate dehydratase, small subunit
  misc_feature (82)..(252): Homolog of NCBI NO: 14521550 NR Description: 3-isopropylmalate dehydratase, small subunit
  misc_feature (82)..(252): Homolog of NCBI NO: 15643321 NR Description: 3-isopropylmalate dehydratase, small subunit
  misc_feature (82)..(261): Homolog of NCBI NO: 21673448 NR Description: 3-isopropylmalate dehydratase, small subunit,
  misc_feature (78)..(256): Homolog of NCBI NO: 23041579 NR Description: hypothetical protein [Trichodesmium erythraeum
  misc_feature (11)..(261): Homolog of NCBI NO: 14140144 NR Description: putative protein [Oryza sativa]
  misc_feature (20)..(260): Homolog of NCBI NO: 15224222 NR Description: 3-isopropylmalate dehydratase, small subunit
  misc_feature (11)..(259): Homolog of NCBI NO: 15231608 NR Description: 3-isopropylmalate dehydratase-like protein (small
  misc_feature (11)..(261): Homolog of NCBI NO: 15224221 NR Description: 3-isopropylmalate dehydratase, small subunit
NLDHSKEKQTMAASLQSANPTLSRTLASPNKPSSFATFRSPFLRFNSTSVASNFKPLVSREASSSFVTRSAAEPQERKTFHGLCYVVGDNIDTDQIIPAEFLTLVPSNPEEYEKLGSYALVGLPASYKERFVQPGEMKTKYSIIIGGENFGCGSSREHAPVCLGAAGAKAVVAQSYARIFFRNSVATGEVYPLDSEVRVCDECTTGDVATVELREGDSILINHTTGKEYKLKPIGDAGPVIDAGGIFAYARKAGMIPSAAA

SEQ ID NO: 21760 - protein, 251 aa, Arabidopsis thaliana
  peptide (1)..(251): Ceres Seq. ID no. 12348711
  misc_feature (1)..(249): Homolog of NCBI NO: 15231608 NR Description: 3-isopropylmalate dehydratase-like protein (small
  misc_feature (1)..(251): Homolog of NCBI NO: 15224221 NR Description: 3-isopropylmalate dehydratase, small subunit
  misc_feature (67)..(244): Homolog of NCBI NO: 20094218 NR Description: 3-isopropylmalate dehydratase small subunit
  misc_feature (78)..(226): Homolog of NCBI NO: 15896420 NR Description: 3-isopropylmalate dehydratase, small subunit
  misc_feature (72)..(242): Homolog of NCBI NO: 14521550 NR Description: 3-isopropylmalate dehydratase, small subunit
  misc_feature (72)..(242): Homolog of NCBI NO: 15643321 NR Description: 3-isopropylmalate dehydratase, small subunit
  misc_feature (72)..(251): Homolog of NCBI NO: 21673448 NR Description: 3-isopropylmalate dehydratase, small subunit,
  misc_feature (68)..(246): Homolog of NCBI NO: 23041579 NR Description: hypothetical protein [Trichodesmium erythraeum
  misc_feature (1)..(251): Homolog of NCBI NO: 14140144 NR Description: putative protein [Oryza sativa]
  misc_feature (10)..(250): Homolog of NCBI NO: 15224222 NR Description: 3-isopropylmalate dehydratase, small subunit
MAASLQSANPTLSRTLASPNKPSSFATFRSPFLRFNSTSVASNFKPLVSREASSSFVTRSAAEPQERKTFHGLCYVVGDNIDTDQIIPAEFLTLVPSNPEEYEKLGSYALVGLPASYKERFVQPGEMKTKYSIIIGGENFGCGSSREHAPVCLGAAGAKAVVAQSYARIFFRNSVATGEVYPLDSEVRVCDECTTGDVATVELREGDSILINHTTGKEYKLKPIGDAGPVIDAGGIFAYARKAGMIPSAAA

SEQ ID NO: 21761 - DNA, 995 bp, Arabidopsis thaliana
  misc_feature (1)..(995): Ceres Seq. ID no. 12332006
  misc_feature: MA Experiment ID: 108434 Result: Down-regulated in Transcription
  misc_feature: MA Experiment 108434 PARAMETER Experiment Name: At_Root_Tips_cDNA_P Parameter: Tissue Value: Root Tips
  misc_feature: MA Experiment ID: 108463 Result: Up-regulated in Transcription
  misc_feature: MA Experiment 108463 PARAMETER Experiment Name: At_Germinating_Seeds_cDNA_P Parameter: Age (day) Value: 3 vs. 0
  misc_feature: MA Experiment 108463 PARAMETER Experiment Name: At_Germinating_Seeds_cDNA_P Parameter: Tissue Value: Germinating Seeds
  misc_feature: MA Experiment ID: 108464 Result: Up-regulated in Transcription
  misc_feature: MA Experiment 108464 PARAMETER Experiment Name: At_Germinating_Seeds_cDNA_P Parameter: Age (day) Value: 4 vs. 0
  misc_feature: MA Experiment 108464 PARAMETER Experiment Name: At_Germinating_Seeds_cDNA_P Parameter: Tissue Value: Germinating Seeds
  misc_feature: MA Experiment ID: 108579 Result: Up-regulated in Transcription
  misc_feature: MA Experiment 108579 PARAMETER Experiment Name: At_4deg_Cold_cDNA_P Parameter: Temperature (deg C) Value: 4 vs. 22
  misc_feature: MA Experiment 108579 PARAMETER Experiment Name: At_4deg_Cold_cDNA_P Parameter: Timepoint (hr) Value: 6
  misc_feature: MA Experiment 108579 PARAMETER Experiment Name: At_4deg_Cold_cDNA_P Parameter: Tissue Value: Aerial
  misc_feature: MA Experiment ID: 108594 Result: Down-regulated in Transcription
  misc_feature: MA Experiment 108594 PARAMETER Experiment Name: At_Ler-rhl_Root_cDNA_P Parameter: Plant Line Value: null
  misc_feature: MA Experiment ID: 108595 Result: Up-regulated in Transcription
  misc_feature: MA Experiment 108595 PARAMETER Experiment Name: At_Ler-pi_Ovule_cDNA_P Parameter: Plant Line Value: null
  misc_feature: MA Experiment ID: 108608 Result: Up-regulated in Transcription
  misc_feature: MA Experiment 108608 PARAMETER Experiment Name: At_100uM_ABA_cDNA_P Parameter: Timepoint (hr) Value: 1
  misc_feature: MA Experiment 108608 PARAMETER Experiment Name: At_100uM_ABA_cDNA_P Parameter: Tissue Value: Aerial
  misc_feature: MA Experiment 108608 PARAMETER Experiment Name: At_100uM_ABA_cDNA_P Parameter: Treatment Value: 100uM ABA vs. No Treatment
  misc_feature: MA Experiment ID: 20000089 Result: Down-regulated in Transcription
  misc_feature: MA Experiment ID: 20000171 Result: Down-regulated in Transcription
  misc_feature: MA Experiment 20000171 PARAMETER Experiment Name: At_42deg_Heat_P Parameter: Age (day) Value: 14
  misc_feature: MA Experiment 20000171 PARAMETER Experiment Name: At_42deg_Heat_P Parameter: Organism Value: A. thaliana
  misc_feature: MA Experiment 20000171 PARAMETER Experiment Name: At_42deg_Heat_P Parameter: Plant Line Value: WS
  misc_feature: MA Experiment 20000171 PARAMETER Experiment Name: At_42deg_Heat_P Parameter: Temperature (deg C) Value: 42 vs. 22
  misc_feature: MA Experiment 20000171 PARAMETER Experiment Name: At_42deg_Heat_P Parameter: Timepoint (hr) Value: 1
  misc_feature: MA Experiment 20000171 PARAMETER Experiment Name: At_42deg_Heat_P Parameter: Tissue Value: Aerial
  misc_feature: MA Experiment ID: 20000173 Result: Down-regulated in Transcription
  misc_feature: MA Experiment 20000173 PARAMETER Experiment Name: At_42deg_Heat_P Parameter: Age (day) Value: 14
  misc_feature: MA Experiment 20000173 PARAMETER Experiment Name: At_42deg_Heat_P Parameter: Organism Value: A. thaliana
  misc_feature: MA Experiment 20000173 PARAMETER Experiment Name: At_42deg_Heat_P Parameter: Plant Line Value: WS
  misc_feature: MA Experiment 20000173 PARAMETER Experiment Name: At_42deg_Heat_P Parameter: Temperature (deg C) Value: 42 vs. 22
  misc_feature: MA Experiment 20000173 PARAMETER Experiment Name: At_42deg_Heat_P Parameter: Timepoint (hr) Value: 6
  misc_feature: MA Experiment 20000173 PARAMETER Experiment Name: At_42deg_Heat_P Parameter: Tissue Value: Aerial
  misc_feature: MA Experiment ID: 20000185 Result: Down-regulated in Transcription
  misc_feature: MA Experiment 20000185 PARAMETER Experiment Name: At_Roots__P Parameter: Age (day) Value: 7 vs. 21
  misc_feature: MA Experiment 20000185 PARAMETER Experiment Name: At_Roots__P Parameter: Organism Value: A. thaliana
  misc_feature: MA Experiment 20000185 PARAMETER Experiment Name: At_Roots__P Parameter: Tissue Value: Roots vs. Whole Plant
  misc_feature: MA Experiment ID: 20000234 Result: Down-regulated in Transcription
  misc_feature: MA Experiment 20000234 PARAMETER Experiment Name: At_Siliques_P Parameter: Age (day) Value: 21
  misc_feature: MA Experiment 20000234 PARAMETER Experiment Name: At_Siliques_P Parameter: Organism Value: A. thaliana
  misc_feature: MA Experiment 20000234 PARAMETER Experiment Name: At_Siliques_P Parameter: Plant Line Value: WS
  misc_feature: MA Experiment 20000234 PARAMETER Experiment Name: At_Siliques_P Parameter: Tissue Value: Less Than 5mm Siliques vs. Whole Plant
  misc_feature: MA Experiment ID: 20000235 Result: Down-regulated in Transcription
  misc_feature: MA Experiment 20000235 PARAMETER Experiment Name: At_Siliques_P Parameter: Age (day) Value: 21
  misc_feature: MA Experiment 20000235 PARAMETER Experiment Name: At_Siliques_P Parameter: Organism Value: A. thaliana
  misc_feature: MA Experiment 20000235 PARAMETER Experiment Name: At_Siliques_P Parameter: Plant Line Value: WS
  misc_feature: MA Experiment 20000235 PARAMETER Experiment Name: At_Siliques_P Parameter: Tissue Value: 5-10mm Siliques vs. Whole Plant
  misc_feature: MA Experiment ID: 20000264 Result: Down-regulated in Transcription
  misc_feature: MA Experiment 20000264 PARAMETER Experiment Name: At_Open_Flower_P Parameter: Age (day) Value: 21
  misc_feature: MA Experiment 20000264 PARAMETER Experiment Name: At_Open_Flower_P Parameter: Plant Line Value: WS
  misc_feature: MA Experiment 20000264 PARAMETER Experiment Name: At_Open_Flower_P Parameter: Tissue Value: Open Flower vs. Whole Plant
  misc_feature: MA Experiment ID: 20000265 Result: Down-regulated in Transcription
  misc_feature: MA Experiment 20000265 PARAMETER Experiment Name: At_Open_Flower_P Parameter: Age (day) Value: 21
  misc_feature: MA Experiment 20000265 PARAMETER Experiment Name: At_Open_Flower_P Parameter: Plant Line Value: WS
  misc_feature: MA Experiment 20000265 PARAMETER Experiment Name: At_Open_Flower_P Parameter: Tissue Value: Closed Flower vs. Whole Plant
  misc_feature: MA Experiment ID: 20000267 Result: Up-regulated in Transcription
  misc_feature: MA Experiment 20000267 PARAMETER Experiment Name: At_Drought_P Parameter: Age (day) Value: 7
  misc_feature: MA Experiment 20000267 PARAMETER Experiment Name: At_Drought_P Parameter: Organism Value: A. thaliana
  misc_feature: MA Experiment 20000267 PARAMETER Experiment Name: At_Drought_P Parameter: Plant Line Value: WS
  misc_feature: MA Experiment 20000267 PARAMETER Experiment Name: At_Drought_P Parameter: Timepoint (hr) Value: 6
  misc_feature: MA Experiment 20000267 PARAMETER Experiment Name: At_Drought_P Parameter: Tissue Value: Whole Plant
  misc_feature: MA Experiment 20000267 PARAMETER Experiment Name: At_Drought_P Parameter: Treatment Value: Drought vs. No Drought
  misc_feature: MA Experiment ID: 20000286 Result: Down-regulated in Transcription
  misc_feature: MA Experiment 20000286 PARAMETER Experiment Name: At_Open_Flower_P Parameter: Age (day) Value: 21
  misc_feature: MA Experiment 20000286 PARAMETER Experiment Name: At_Open_Flower_P Parameter: Plant Line Value: WS
  misc_feature: MA Experiment 20000286 PARAMETER Experiment Name: At_Open_Flower_P Parameter: Tissue Value: Half Open vs. Whole Plant
  misc_feature: MA Experiment ID: 20000438 Result: Down-regulated in Transcription
  misc_feature: MA Experiment 20000438 PARAMETER Experiment Name: At_Shoots__P Parameter: Age (day) Value: 14
  misc_feature: MA Experiment 20000438 PARAMETER Experiment Name: At_Shoots__P Parameter: Tissue Value: Shoots vs. Whole Plant
  misc_feature: MA Experiment ID: 20000439 Result: Down-regulated in Transcription
  misc_feature: MA Experiment 20000439 PARAMETER Experiment Name: At_Roots__P Parameter: Age (day) Value: 14 vs. 21
  misc_feature: MA Experiment 20000439 PARAMETER Experiment Name: At_Roots__P Parameter: Organism Value: A. thaliana
  misc_feature: MA Experiment 20000439 PARAMETER Experiment Name: At_Roots__P Parameter: Tissue Value: Roots vs. Whole Plant
  misc_feature: MA Experiment ID: 20000573 Result: Down-regulated in Transcription
  misc_feature: MA Experiment 20000573 PARAMETER Experiment Name: At_100uM_ABA_Mutants__P Parameter: Organism Value: A. thaliana
  misc_feature: MA Experiment 20000573 PARAMETER Experiment Name: At_100uM_ABA_Mutants__P Parameter: Plant Line Value: CS22 vs. Ler wt
  misc_feature: MA Experiment 20000573 PARAMETER Experiment Name: At_100uM_ABA_Mutants__P Parameter: Timepoint (hr) Value: N/A
  misc_feature: MA Experiment 20000573 PARAMETER Experiment Name: At_100uM_ABA_Mutants__P Parameter: Tissue Value: Whole Plant
  misc_feature: MA Experiment 20000573 PARAMETER Experiment Name: At_100uM_ABA_Mutants__P Parameter: Treatment Value: None
  misc_feature: MA Experiment ID: 20000574 Result: Down-regulated in Transcription
  misc_feature: MA Experiment 20000574 PARAMETER Experiment Name: At_100uM_ABA_Mutants__P Parameter: Organism Value: A. thaliana
  misc_feature: MA Experiment 20000574 PARAMETER Experiment Name: At_100uM_ABA_Mutants__P Parameter: Plant Line Value: CS23 vs. Ler wt
  misc_feature: MA Experiment 20000574 PARAMETER Experiment Name: At_100uM_ABA_Mutants__P Parameter: Timepoint (hr) Value: N/A
  misc_feature: MA Experiment 20000574 PARAMETER Experiment Name: At_100uM_ABA_Mutants__P Parameter: Tissue Value: Whole Plant
  misc_feature: MA Experiment 20000574 PARAMETER Experiment Name: At_100uM_ABA_Mutants__P Parameter: Treatment Value: None
  misc_feature: MA Experiment ID: 20001247 Result: Up-regulated in Transcription
  misc_feature: MA Experiment 20001247 PARAMETER Experiment Name: At_Far-red-induction_P Parameter: Age (day) Value: 7
  misc_feature: MA Experiment 20001247 PARAMETER Experiment Name: At_Far-red-induction_P Parameter: Light Value: Far-red vs. White
  misc_feature: MA Experiment 20001247 PARAMETER Experiment Name: At_Far-red-induction_P Parameter: Organism Value: A. thaliana
  misc_feature: MA Experiment 20001247 PARAMETER Experiment Name: At_Far-red-induction_P Parameter: Plant Line Value: Columbia
  misc_feature: MA Experiment 20001247 PARAMETER Experiment Name: At_Far-red-induction_P Parameter: Timepoint (hr) Value: 1
  misc_feature: MA Experiment 20001247 PARAMETER Experiment Name: At_Far-red-induction_P Parameter: Tissue Value: Whole Plant
  misc_feature: MA Experiment ID: 20001757 Result: Down-regulated in Transcription
  misc_feature: MA Experiment 20001757 PARAMETER Experiment Name: At_50mM_NH4NO3_L-to-H_P Parameter: Timepoint (hr) Value: 6
  misc_feature: MA Experiment 20001757 PARAMETER Experiment Name: At_50mM_NH4NO3_L-to-H_P Parameter: Tissue Value: Leaf
  misc_feature: MA Experiment 20001757 PARAMETER Experiment Name: At_50mM_NH4NO3_L-to-H_P Parameter: Treatment Value: 50mM NH4NO3 vs 100mM Mannitol
  misc_feature: MA Experiment ID: 20001905 Result: Up-regulated in Transcription
  misc_feature: MA Experiment 20001905 PARAMETER Experiment Name: At_Drought_Reproduction_P Parameter: Age (day) Value: 40
  misc_feature: MA Experiment 20001905 PARAMETER Experiment Name: At_Drought_Reproduction_P Parameter: Organism Value: A. thaliana
  misc_feature: MA Experiment 20001905 PARAMETER Experiment Name: At_Drought_Reproduction_P Parameter: Plant Line Value: WS
  misc_feature: MA Experiment 20001905 PARAMETER Experiment Name: At_Drought_Reproduction_P Parameter: Timepoint (day) Value: 10
  misc_feature: MA Experiment 20001905 PARAMETER Experiment Name: At_Drought_Reproduction_P Parameter: Tissue Value: Rosettes
  misc_feature: MA Experiment 20001905 PARAMETER Experiment Name: At_Drought_Reproduction_P Parameter: Treatment Value: Drought vs. No Drought
  misc_feature: MA Experiment ID: 20001911 Result: Down-regulated in Transcription
  misc_feature: MA Experiment 20001911 PARAMETER Experiment Name: At_Drought_Reproduction_P Parameter: Age (day) Value: 40
  misc_feature: MA Experiment 20001911 PARAMETER Experiment Name: At_Drought_Reproduction_P Parameter: Organism Value: A. thaliana
  misc_feature: MA Experiment 20001911 PARAMETER Experiment Name: At_Drought_Reproduction_P Parameter: Plant Line Value: WS
  misc_feature: MA Experiment 20001911 PARAMETER Experiment Name: At_Drought_Reproduction_P Parameter: Timepoint (day) Value: 10
  misc_feature: MA Experiment 20001911 PARAMETER Experiment Name: At_Drought_Reproduction_P Parameter: Tissue Value: Flowers
  misc_feature: MA Experiment 20001911 PARAMETER Experiment Name: At_Drought_Reproduction_P Parameter: Treatment Value: Drought vs. No Drought
gtatcaacaaagctctgtttcaagctctctgtttctcagatcttctctctgtttttttcttctcataaaataagagttgtgattcaacagttatggtgagaatattccttctctacaatatactaaattcgtttcttctctctttagtaccaaagaagctacgaactcttttccctctttcttggttcgacaaaactctccacaagaactcaccaccgtctccgtcaacgatgttaccttctccatcatcttcttcagcgccgacgaaaagaatagatccgtccgagctcaaacgcgttttccagatgttcgacaagaacggtgacggtcgaatcacaaaggaagagctcaacgactcgcttgagaatcttggaatctacataccagacaaagatctgactcaaatgatccacaagatcgatgctaacggtgatggatgcgtcgacatagacgagtttgagtcgctgtacagctcgattgtggatgagcatcacaacgatggcgaaacagaggaagaggatatgaaagatgcgtttaacgtgtttgaccaagacggagatgggtttatcactgtggaggagttgaaatctgtgatggcttccttgggactcaagcaagggaagaccctagatggttgtaagaagatgattatgcaagttgatgcagatggtgatggtagagtcaattacaaagagtttcttcagatgatgaaaggtggtggctttagcagcagtaattgatctttaactagggtttgatttgacagaagagaagtgtgtttattcgattgattggtttgtttttcttgtttttcctctgtaaataaattttctgatgacaaatcaaaacatcgtgtaatcgaggaaggtgtgtaatctttgttttttagggtatctctgagcttatgtaagattcaccttctcatctattctgattgttaagtgttcttaagtagattgttaactgtttcctatcaatatagtatattgcagaac

SEQ ID NO: 21762 - protein, 215 aa, Arabidopsis thaliana
  peptide (1)..(215): Ceres Seq. ID no. 12332007
  misc_feature (181)..(209): Pfam Name: EF hand Pfam Description: EF hand
  misc_feature (1)..(141): Homolog of NCBI NO: 15231685 NR Description: calmodulin-like protein; protein id: At3g59440.1
  misc_feature (40)..(213): Homolog of NCBI NO: 21740787 NR Description: OSJNBb0091E11.1 [Oryza sativa (japonica
  misc_feature (61)..(215): Homolog of NCBI NO: 15235516 NR Description: putative calmodulin; protein id: At4g12860.1
  misc_feature (61)..(214): Homolog of NCBI NO: 15236276 NR Description: putative calmodulin; protein id: At4g03290.1
  misc_feature (61)..(213): Homolog of NCBI NO: 15231470 NR Description: putative calmodulin; protein id: At3g07490.1
  misc_feature (61)..(213): Homolog of NCBI NO: 15221358 NR Description: calcium-binding protein, putative
  misc_feature (27)..(213): Homolog of NCBI NO: 15231685 NR Description: calmodulin-like protein; protein id: At3g59440.1
  misc_feature (1)..(213): Homolog of NCBI NO: 28301674 NR Description: calcium-binding protein [Lotus japonicus]
  misc_feature (47)..(215): Homolog of NCBI NO: 25295758 NR Description: probable calcium binding protein [imported] -
  misc_feature (1)..(215): Homolog of NCBI NO: 18406202 NR Description: putative calcium binding protein
MVRIFLLYNILNSFLLSLVPKKLRTLFPLSWFDKTLHKNSPPSPSTMLPSPSSSSAPTKRIDPSELKRVFQMFDKNGDGRITKEELNDSLENLGIYIPDKDLTQMIHKIDANGDGCVDIDEFESLYSSIVDEHHNDGETEEEDMKDAFNVFDQDGDGFITVEELKSVMASLGLKQGKTLDGCKKMIMQVDADGDGRVNYKEFLQMMKGGGFSSSN

SEQ ID NO: 21763 - protein, 169 aa, Arabidopsis thaliana
  peptide (1)..(169): Ceres Seq. ID no. 12332008
  misc_feature (135)..(163): Pfam Name: EF hand Pfam Description: EF hand
  misc_feature (1)..(95): Homolog of NCBI NO: 15231685 NR Description: calmodulin-like protein; protein id: At3g59440.1
  misc_feature (1)..(167): Homolog of NCBI NO: 21740787 NR Description: OSJNBb0091E11.1 [Oryza sativa (japonica
  misc_feature (15)..(169): Homolog of NCBI NO: 15235516 NR Description: putative calmodulin; protein id: At4g12860.1
  misc_feature (15)..(168): Homolog of NCBI NO: 15236276 NR Description: putative calmodulin; protein id: At4g03290.1
  misc_feature (15)..(167): Homolog of NCBI NO: 15231470 NR Description: putative calmodulin; protein id: At3g07490.1
  misc_feature (15)..(167): Homolog of NCBI NO: 15221358 NR Description: calcium-binding protein, putative
  misc_feature (1)..(167): Homolog of NCBI NO: 15231685 NR Description: calmodulin-like protein; protein id: At3g59440.1
  misc_feature (1)..(167): Homolog of NCBI NO: 28301674 NR Description: calcium-binding protein [Lotus japonicus]
  misc_feature (1)..(169): Homolog of NCBI NO: 25295758 NR Description: probable calcium binding protein [imported] -
  misc_feature (1)..(169): Homolog of NCBI NO: 18406202 NR Description: putative calcium binding protein
MLPSPSSSSAPTKRIDPSELKRVFQMFDKNGDGRITKEELNDSLENLGIYIPDKDLTQMIHKIDANGDGCVDIDEFESLYSSIVDEHHNDGETEEEDMKDAFNVFDQDGDGFITVEELKSVMASLGLKQGKTLDGCKKMIMQVDADGDGRVNYKEFLQMMKGGGFSSSN

SEQ ID NO: 21764 - protein, 144 aa, Arabidopsis thaliana
  peptide (1)..(144): Ceres Seq. ID no. 12332009
  misc_feature (110)..(138): Pfam Name: EF hand Pfam Description: EF hand
  misc_feature (1)..(70): Homolog of NCBI NO: 15231685 NR Description: calmodulin-like protein; protein id: At3g59440.1
  misc_feature (1)..(142): Homolog of NCBI NO: 21740787 NR Description: OSJNBb0091E11.1 [Oryza sativa (japonica
  misc_feature (1)..(144): Homolog of NCBI NO: 15235516 NR Description: putative calmodulin; protein id: At4g12860.1
  misc_feature (1)..(143): Homolog of NCBI NO: 15236276 NR Description: putative calmodulin; protein id: At4g03290.1
  misc_feature (1)..(142): Homolog of NCBI NO: 15231470 NR Description: putative calmodulin; protein id: At3g07490.1
  misc_feature (1)..(142): Homolog of NCBI NO: 15221358 NR Description: calcium-binding protein, putative
  misc_feature (1)..(142): Homolog of NCBI NO: 15231685 NR Description: calmodulin-like protein; protein id: At3g59440.1
  misc_feature (1)..(142): Homolog of NCBI NO: 28301674 NR Description: calcium-binding protein [Lotus japonicus]
  misc_feature (1)..(144): Homolog of NCBI NO: 25295758 NR Description: probable calcium binding protein [imported] -
  misc_feature (1)..(144): Homolog of NCBI NO: 18406202 NR Description: putative calcium binding protein
MFDKNGDGRITKEELNDSLENLGIYIPDKDLTQMIHKIDANGDGCVDIDEFESLYSSIVDEHHNDGETEEEDMKDAFNVFDQDGDGFITVEELKSVMASLGLKQGKTLDGCKKMIMQVDADGDGRVNYKEFLQMMKGGGFSSSN

SEQ ID NO: 21765 - DNA, 1172 bp, Arabidopsis thaliana
  misc_feature (1)..(1172): Ceres Seq. ID no. 12332002
  misc_feature: MA Experiment ID: 108573 Result: Up-regulated in Transcription
  misc_feature: MA Experiment 108573 PARAMETER Experiment Name: At_Drought_cDNA_P Parameter: Timepoint (hr) Value: 6
  misc_feature: MA Experiment 108573 PARAMETER Experiment Name: At_Drought_cDNA_P Parameter: Tissue Value: Aerial
  misc_feature: MA Experiment 108573 PARAMETER Experiment Name: At_Drought_cDNA_P Parameter: Treatment Value: Drought vs. No Drought
  misc_feature: MA Experiment ID: 108594 Result: Down-regulated in Transcription
  misc_feature: MA Experiment 108594 PARAMETER Experiment Name: At_Ler-rhl_Root_cDNA_P Parameter: Plant Line Value: null
  misc_feature: MA Experiment ID: 108595 Result: Down-regulated in Transcription
  misc_feature: MA Experiment 108595 PARAMETER Experiment Name: At_Ler-pi_Ovule_cDNA_P Parameter: Plant Line Value: null
  misc_feature: MA Experiment ID: 20000224 Result: Down-regulated in Transcription
  misc_feature: MA Experiment ID: 20000234 Result: Down-regulated in Transcription
  misc_feature: MA Experiment 20000234 PARAMETER Experiment Name: At_Siliques_P Parameter: Age (day) Value: 21
  misc_feature: MA Experiment 20000234 PARAMETER Experiment Name: At_Siliques_P Parameter: Organism Value: A. thaliana
  misc_feature: MA Experiment 20000234 PARAMETER Experiment Name: At_Siliques_P Parameter: Plant Line Value: WS
  misc_feature: MA Experiment 20000234 PARAMETER Experiment Name: At_Siliques_P Parameter: Tissue Value: Less Than 5mm Siliques vs. Whole Plant
  misc_feature: MA Experiment ID: 20000235 Result: Down-regulated in Transcription
  misc_feature: MA Experiment 20000235 PARAMETER Experiment Name: At_Siliques_P Parameter: Age (day) Value: 21
  misc_feature: MA Experiment 20000235 PARAMETER Experiment Name: At_Siliques_P Parameter: Organism Value: A. thaliana
  misc_feature: MA Experiment 20000235 PARAMETER Experiment Name: At_Siliques_P Parameter: Plant Line Value: WS
  misc_feature: MA Experiment 20000235 PARAMETER Experiment Name: At_Siliques_P Parameter: Tissue Value: 5-10mm Siliques vs. Whole Plant
  misc_feature: MA Experiment ID: 20000495 Result: Down-regulated in Transcription
  misc_feature: MA Experiment 20000495 PARAMETER Experiment Name: At_Guard_Cells_P Parameter: Harvest Date Value: 8/2/2002
  misc_feature: MA Experiment 20000495 PARAMETER Experiment Name: At_Guard_Cells_P Parameter: Organism Value: A. thaliana
  misc_feature: MA Experiment 20000495 PARAMETER Experiment Name: At_Guard_Cells_P Parameter: Tissue Value: Guard Cells vs. Leaves
  misc_feature: MA Experiment ID: 20000496 Result: Down-regulated in Transcription
  misc_feature: MA Experiment 20000496 PARAMETER Experiment Name: At_Guard_Cells_P Parameter: Harvest Date Value: 7/19/2002
  misc_feature: MA Experiment 20000496 PARAMETER Experiment Name: At_Guard_Cells_P Parameter: Organism Value: Canola
  misc_feature: MA Experiment 20000496 PARAMETER Experiment Name: At_Guard_Cells_P Parameter: Tissue Value: Guard Cells vs. Leaves
  misc_feature: MA Experiment ID: 20001451 Result: Down-regulated in Transcription
  misc_feature: MA Experiment 20001451 PARAMETER Experiment Name: At_Far-red-induction_P Parameter: Age (day) Value: 7
  misc_feature: MA Experiment 20001451 PARAMETER Experiment Name: At_Far-red-induction_P Parameter: Light Value: Far-red vs. White
  misc_feature: MA Experiment 20001451 PARAMETER Experiment Name: At_Far-red-induction_P Parameter: Organism Value: A. thaliana
  misc_feature: MA Experiment 20001451 PARAMETER Experiment Name: At_Far-red-induction_P Parameter: Plant Line Value: Columbia
  misc_feature: MA Experiment 20001451 PARAMETER Experiment Name: At_Far-red-induction_P Parameter: Timepoint (hr) Value: 24
  misc_feature: MA Experiment 20001451 PARAMETER Experiment Name: At_Far-red-induction_P Parameter: Tissue Value: Whole Plant
atacatttctccaaaatctccgagttctacaattgtgtgatcaatcaatcttctccgatttcaagcttctcgatcaaaagaatcatcatgggaggaggaagagctatggcgacggcggcgaaggttgctggaatcggagttggtaaaggaggattcaagggatttggatttcctccggcgactgagcagtttcgtgttaaaaccgcggcggctgcggcgtcgtctaaaccggtttcggcttcgattacatcggcggttcatccttctgttgaagaagatgggatgattatgcagagaccggtttgggatgattgggaatttgctgaagaagaaccgattcctagggttgtttttagcaaacctcctagtcttgaagaagctaaagaagctactgaagatcttaaagaagcaattaatttggtgtatatgtcatctccaaagtcgtctgctgctatggaaggatcaaatgatggtggctctgtttccaaaatgctctctggttttcaatcttctgagaacagagctgttgaatcagctgttccacaagttgctcttcaagcatttgcttttctaagtgagaacactgctgcgcagactgttgttgcttccattgcgagtgacccaaaagtatgggatgctgttatggagaataaggatctcatgaaatttcttcagaccaacaaaaccgctgtttcctctcaagttgaatctgacaatgacgaccaatctgaacgttcgagcacgactgagtgtgaagtcgtggaaactaagccaatggaactcttagagattctgcaggacatgaagctaaaagctgttcggttgatggaaaatgtatcttcctactttggtgacttgtttgggttaggatcagttacagaagatggaaaagacaagaagcagacgttgttcaatgaccctcgttctctgtttggattagctgtggttgttatcttcatggtagttttaaaacgtgcttaagatctcttgttcctgaattcgccgatatagcggaaaaacaactacgtactctgtgttatcgtttaaactctgtttcattcctttgctttgttatcgtttaaactctgttttttgtttgattggaatgatttggaaccgtcattggatcttttcataatttataaataaaaagatcctttggatgttttatt

SEQ ID NO: 21766 - protein, 326 aa, Arabidopsis thaliana
  peptide (1)..(326): Ceres Seq. ID no. 12332003
  misc_feature (30)..(326): Homolog of NCBI NO: 15239670 NR Description: putative protein
IHFSKISEFYNCVINQSSPISSFSIKRIIMGGGRAMATAAKVAGIGVGKGGFKGFGFPPATEQFRVKTAAAAASSKPVSASITSAVHPSVEEDGMIMQRPVWDDWEFAEEEPIPRVVFSKPPSLEEAKEATEDLKEAINLVYMSSPKSSAAMEGSNDGGSVSKMLSGFQSSENRAVESAVPQVALQAFAFLSENTAAQTVVASIASDPKVWDAVMENKDLMKFLQTNKTAVSSQVESDNDDQSERSSTTECEVVETKPMELLEILQDMKLKAVRLMENVSSYFGDLFGLGSVTEDGKDKKQTLFNDPRSLFGLAVVVIFMVVLKRA

SEQ ID NO: 21767 - protein, 297 aa, Arabidopsis thaliana
  peptide (1)..(297): Ceres Seq. ID no. 12332004
  misc_feature (1)..(297): Homolog of NCBI NO: 15239670 NR Description: putative protein
MGGGRAMATAAKVAGIGVGKGGFKGFGFPPATEQFRVKTAAAAASSKPVSASITSAVHPSVEEDGMIMQRPVWDDWEFAEEEPIPRVVFSKPPSLEEAKEATEDLKEAINLVYMSSPKSSAAMEGSNDGGSVSKMLSGFQSSENRAVESAVPQVALQAFAFLSENTAAQTVVASIASDPKVWDAVMENKDLMKFLQTNKTAVSSQVESDNDDQSERSSTTECEVVETKPMELLEILQDMKLKAVRLMENVSSYFGDLFGLGSVTEDGKDKKQTLFNDPRSLFGLAVVVIFMVVLKRA

SEQ ID NO: 21768 - protein, 291 aa, Arabidopsis thaliana
  peptide (1)..(291): Ceres Seq. ID no. 12332005
  misc_feature (1)..(291): Homolog of NCBI NO: 15239670 NR Description: putative protein
MATAAKVAGIGVGKGGFKGFGFPPATEQFRVKTAAAAASSKPVSASITSAVHPSVEEDGMIMQRPVWDDWEFAEEEPIPRVVFSKPPSLEEAKEATEDLKEAINLVYMSSPKSSAAMEGSNDGGSVSKMLSGFQSSENRAVESAVPQVALQAFAFLSENTAAQTVVASIASDPKVWDAVMENKDLMKFLQTNKTAVSSQVESDNDDQSERSSTTECEVVETKPMELLEILQDMKLKAVRLMENVSSYFGDLFGLGSVTEDGKDKKQTLFNDPRSLFGLAVVVIFMVVLKRA

SEQ ID NO: 21769 - DNA, 1367 bp, Arabidopsis thaliana
  misc_feature (1)..(1367): Ceres Seq. ID no. 13499495
  misc_feature: MA Experiment ID: 108569 Result: Up-regulated in Transcription
  misc_feature: MA Experiment 108569 PARAMETER Experiment Name: At_0.001%_MeJA__cDNA_P Parameter: Timepoint (hr) Value: 6
  misc_feature: MA Experiment 108569 PARAMETER Experiment Name: At_0.001%_MeJA__cDNA_P Parameter: Tissue Value: Aerial
  misc_feature: MA Experiment 108569 PARAMETER Experiment Name: At_0.001%_MeJA__cDNA_P Parameter: Treatment Value: 0.001% MeJA vs. No Treatment
  misc_feature: MA Experiment ID: 20000495 Result: Down-regulated in Transcription
  misc_feature: MA Experiment 20000495 PARAMETER Experiment Name: At_Guard_Cells_P Parameter: Harvest Date Value: 8/2/2002
  misc_feature: MA Experiment 20000495 PARAMETER Experiment Name: At_Guard_Cells_P Parameter: Organism Value: A. thaliana
  misc_feature: MA Experiment 20000495 PARAMETER Experiment Name: At_Guard_Cells_P Parameter: Tissue Value: Guard Cells vs. Leaves
  misc_feature: MA Experiment ID: 20000496 Result: Down-regulated in Transcription
  misc_feature: MA Experiment 20000496 PARAMETER Experiment Name: At_Guard_Cells_P Parameter: Harvest Date Value: 7/19/2002
  misc_feature: MA Experiment 20000496 PARAMETER Experiment Name: At_Guard_Cells_P Parameter: Organism Value: Canola
  misc_feature: MA Experiment 20000496 PARAMETER Experiment Name: At_Guard_Cells_P Parameter: Tissue Value: Guard Cells vs. Leaves
gacgggtcaattcacatacttgtttaacggcaacaaaaacctaccgataaatgctaaactaacgaaatcggatcatagctcgacgaagtctcgatcttttctattctctctttctgggtattcgtgggttttacccagatttcgaaattgaatggcggacgaactggaattgtcgccgttggttccaccgtcgccgatggtcgagccttccgagatcgatctcgaagctggaggacctggtgaacaaattcagtgccgaatctgccttgaaactgatggtagggatttcattgccccatgcaaatgcaaaggaacatcaaagtatgtacatcgtgattgcttggatcattggagagctataaaggaaggtttcgcgtttgcgcactgcacaacttgcaaggctccatattatctgagagttcacagtgctggagataggaaatggcggacattgaagtttcgcttctttgttactcgagacattttatccatatttcttgctgttcagcttgtgattgctgcattggcctacatggtctatttcatagatagttaccagcaatcatggcttcgtcatatatggggttttgacagtgaggtcacgttttattacatgtgtggagctttattattctttgctctgctgggtctatctggatgcgtcataacctgctatgatcgaagggttcgcaatgacttagcacagccttgccgtgaattgtgtctctgttgttgccagcctgggatatgcacagactgccatctaccaggaactatttgtatgtgggcagattgcaccgcatgtactgaaggctgtgcaagtgcagttagtgagtgtggaggttgccttggaggtgcaggggaagccggattgccattactcttcataacggcattagtaattctcggtctatttacagttatcggtatattctatagcgtattggttgcaaccatggttggacagcgcatttggcagcgccattaccacattctcgccaaaagaatgctaacaaaggagtatgtggtcgaggatgtagatggcgaaatgacggggtcagaatggtctcccccggctttaccaactgagcatgtccagcagctgaagacgcttggccttctgtgaaactatatggcttttgattaaaactatgggagatttttaactgcacgcagggaaatgcatttgacaagtggtgagagagagaactcacagaacgatgaaatctaatagatcttttgtatttgtaaagaaaagactccaacttattaaagagtccgtgatctctcccattgagtcagagacctctccaattcacgaactgagcttgtgttgaatgtttgtttctaatataggtaaatatccg

SEQ ID NO: 21770 - protein, 324 aa, Arabidopsis thaliana
  peptide (1)..(324): Ceres Seq. ID no. 13499496
  misc_feature (35)..(82): Pfam Name: Zinc finger, C3HC4 type (RING finger) Pfam Description: Zinc finger, C3HC4 type (RING finger)
  misc_feature (242)..(323): Homolog of NCBI NO: 26450547 NR Description: unknown protein [Arabidopsis thaliana]
  misc_feature (30)..(167): Homolog of NCBI NO: 26450547 NR Description: unknown protein [Arabidopsis thaliana]
  misc_feature (242)..(323): Homolog of NCBI NO: 18403075 NR Description: zinc finger (C3HC4-type RING finger) protein
  misc_feature (30)..(167): Homolog of NCBI NO: 18403075 NR Description: zinc finger (C3HC4-type RING finger) protein
  misc_feature (20)..(121): Homolog of NCBI NO: 25402638 NR Description: hypothetical protein [imported] - Arabidopsis
  misc_feature (205)..(324): Homolog of NCBI NO: 25402638 NR Description: hypothetical protein [imported] - Arabidopsis
  misc_feature (158)..(198): Homolog of NCBI NO: 15227153 NR Description: zinc finger (C3HC4-type RING finger) protein
  misc_feature (232)..(324): Homolog of NCBI NO: 15227153 NR Description: zinc finger (C3HC4-type RING finger) protein
  misc_feature (1)..(127): Homolog of NCBI NO: 15227153 NR Description: zinc finger (C3HC4-type RING finger) protein
  misc_feature (1)..(324): Homolog of NCBI NO: 28393273 NR Description: unknown protein [Arabidopsis thaliana]
MADELELSPLVPPSPMVEPSEIDLEAGGPGEQIQCRICLETDGRDFIAPCKCKGTSKYVHRDCLDHWRAIKEGFAFAHCTTCKAPYYLRVHSAGDRKWRTLKFRFFVTRDILSIFLAVQLVIAALAYMVYFIDSYQQSWLRHIWGFDSEVTFYYMCGALLFFALLGLSGCVITCYDRRVRNDLAQPCRELCLCCCQPGICTDCHLPGTICMWADCTACTEGCASAVSECGGCLGGAGEAGLPLLFITALVILGLFTVIGIFYSVLVATMVGQRIWQRHYHILAKRMLTKEYVVEDVDGEMTGSEWSPPALPTEHVQQLKTLGLL

SEQ ID NO: 21771 - protein, 309 aa, Arabidopsis thaliana
  peptide (1)..(309): Ceres Seq. ID no. 13499497
  misc_feature (20)..(67): Pfam Name: Zinc finger, C3HC4 type (RING finger) Pfam Description: Zinc finger, C3HC4 type (RING finger)
  misc_feature (227)..(308): Homolog of NCBI NO: 26450547 NR Description: unknown protein [Arabidopsis thaliana]
  misc_feature (15)..(152): Homolog of NCBI NO: 26450547 NR Description: unknown protein [Arabidopsis thaliana]
  misc_feature (227)..(308): Homolog of NCBI NO: 18403075 NR Description: zinc finger (C3HC4-type RING finger) protein
  misc_feature (15)..(152): Homolog of NCBI NO: 18403075 NR Description: zinc finger (C3HC4-type RING finger) protein
  misc_feature (5)..(106): Homolog of NCBI NO: 25402638 NR Description: hypothetical protein [imported] - Arabidopsis
  misc_feature (190)..(309): Homolog of NCBI NO: 25402638 NR Description: hypothetical protein [imported] - Arabidopsis
  misc_feature (143)..(183): Homolog of NCBI NO: 15227153 NR Description: zinc finger (C3HC4-type RING finger) protein
  misc_feature (217)..(309): Homolog of NCBI NO: 15227153 NR Description: zinc finger (C3HC4-type RING finger) protein
  misc_feature (1)..(112): Homolog of NCBI NO: 15227153 NR Description: zinc finger (C3HC4-type RING finger) protein
  misc_feature (1)..(309): Homolog of NCBI NO: 28393273 NR Description: unknown protein [Arabidopsis thaliana]
MVEPSEIDLEAGGPGEQIQCRICLETDGRDFIAPCKCKGTSKYVHRDCLDHWRAIKEGFAFAHCTTCKAPYYLRVHSAGDRKWRTLKFRFFVTRDILSIFLAVQLVIAALAYMVYFIDSYQQSWLRHIWGFDSEVTFYYMCGALLFFALLGLSGCVITCYDRRVRNDLAQPCRELCLCCCQPGICTDCHLPGTICMWADCTACTEGCASAVSECGGCLGGAGEAGLPLLFITALVILGLFTVIGIFYSVLVATMVGQRIWQRHYHILAKRMLTKEYVVEDVDGEMTGSEWSPPALPTEHVQQLKTLGLL

SEQ ID NO: 21772 - protein, 197 aa, Arabidopsis thaliana
  peptide (1)..(197): Ceres Seq. ID no. 13499498
  misc_feature (115)..(196): Homolog of NCBI NO: 18403075 NR Description: zinc finger (C3HC4-type RING finger) protein
  misc_feature (1)..(40): Homolog of NCBI NO: 18403075 NR Description: zinc finger (C3HC4-type RING finger) protein
  misc_feature (78)..(197): Homolog of NCBI NO: 25402638 NR Description: hypothetical protein [imported] - Arabidopsis
  misc_feature (31)..(71): Homolog of NCBI NO: 15227153 NR Description: zinc finger (C3HC4-type RING finger) protein
  misc_feature (105)..(197): Homolog of NCBI NO: 15227153 NR Description: zinc finger (C3HC4-type RING finger) protein
  misc_feature (1)..(197): Homolog of NCBI NO: 28393273 NR Description: unknown protein [Arabidopsis thaliana]
  misc_feature (1)..(82): Homolog of NCBI NO: 40253895 NR Description: zinc finger (C3HC4-type RING finger) protein
  misc_feature (88)..(197): Homolog of NCBI NO: 34912564 NR Description: P0410E03.20 [Oryza sativa (japonica
  misc_feature (115)..(196): Homolog of NCBI NO: 26450547 NR Description: unknown protein [Arabidopsis thaliana]
  misc_feature (1)..(40): Homolog of NCBI NO: 26450547 NR Description: unknown protein [Arabidopsis thaliana]
MVYFIDSYQQSWLRHIWGFDSEVTFYYMCGALLFFALLGLSGCVITCYDRRVRNDLAQPCRELCLCCCQPGICTDCHLPGTICMWADCTACTEGCASAVSECGGCLGGAGEAGLPLLFITALVILGLFTVIGIFYSVLVATMVGQRIWQRHYHILAKRMLTKEYVVEDVDGEMTGSEWSPPALPTEHVQQLKTLGLL

SEQ ID NO: 21773 - DNA, 1070 bp, Arabidopsis thaliana
  misc_feature (1)..(1070): Ceres Seq. ID no. 12421966
  misc_feature: MA Experiment ID: 108434 Result: Down-regulated in Transcription
  misc_feature: MA Experiment 108434 PARAMETER Experiment Name: At_Root_Tips_cDNA_P Parameter: Tissue Value: Root Tips
  misc_feature: MA Experiment ID: 108469 Result: Up-regulated in Transcription
  misc_feature: MA Experiment ID: 20000113 Result: Up-regulated in Transcription
  misc_feature: MA Experiment 20000113 PARAMETER Experiment Name: At_42deg_Heat_cDNA_P Parameter: Temperature (deg C) Value: 42 vs. 22
  misc_feature: MA Experiment 20000113 PARAMETER Experiment Name: At_42deg_Heat_cDNA_P Parameter: Timepoint (hr) Value: 8
  misc_feature: MA Experiment 20000113 PARAMETER Experiment Name: At_42deg_Heat_cDNA_P Parameter: Tissue Value: Aerial
  misc_feature: MA Experiment ID: 20000182 Result: Up-regulated in Transcription
  misc_feature: MA Experiment 20000182 PARAMETER Experiment Name: At_2mM_SA_P Parameter: Age (day) Value: 14
  misc_feature: MA Experiment 20000182 PARAMETER Experiment Name: At_2mM_SA_P Parameter: Organism Value: A. thaliana
  misc_feature: MA Experiment 20000182 PARAMETER Experiment Name: At_2mM_SA_P Parameter: Plant Line Value: WS
  misc_feature: MA Experiment 20000182 PARAMETER Experiment Name: At_2mM_SA_P Parameter: Timepoint (hr) Value: 6
  misc_feature: MA Experiment 20000182 PARAMETER Experiment Name: At_2mM_SA_P Parameter: Tissue Value: Aerial
  misc_feature: MA Experiment 20000182 PARAMETER Experiment Name: At_2mM_SA_P Parameter: Treatment Value: 2mM SA vs. No Treatment
  misc_feature: MA Experiment ID: 20001560 Result: Down-regulated in Transcription
  misc_feature: MA Experiment 20001560 PARAMETER Experiment Name: At_Drought_Soil_Dry_P Parameter: Age (day) Value: 28
  misc_feature: MA Experiment 20001560 PARAMETER Experiment Name: At_Drought_Soil_Dry_P Parameter: Organism Value: A. thaliana
  misc_feature: MA Experiment 20001560 PARAMETER Experiment Name: At_Drought_Soil_Dry_P Parameter: Plant Line Value: WS
  misc_feature: MA Experiment 20001560 PARAMETER Experiment Name: At_Drought_Soil_Dry_P Parameter: Post Timepoint (hr) Value: None
  misc_feature: MA Experiment 20001560 PARAMETER Experiment Name: At_Drought_Soil_Dry_P Parameter: Post-Treatment Value: None
  misc_feature: MA Experiment 20001560 PARAMETER Experiment Name: At_Drought_Soil_Dry_P Parameter: Timepoint (day) Value: 14
  misc_feature: MA Experiment 20001560 PARAMETER Experiment Name: At_Drought_Soil_Dry_P Parameter: Treatment Value: Drought vs. No Drought
aatttcccacaccaatcgcataatctatttcttccaacgaaaccctaattttgcttcctcatcttgttcagaaaattactcaaattcctattagattactctctcttcgacctccgatagctcacatggcgtctcgaaactatcggtgggagctcttcgcagcttcgttaaccctaaccttagctttgattcacctggtcgaagcaaactccgaaggagatgctctctacgctcttcgccggagtttgacagatccagaccatgtcctccagagctgggatccaactcttgttaatccttgtacctggttccatgtcacctgtaaccaagacaaccgcgtcactcgtgtggatttgggaaattcaaacctctctggacatcttgcgcctgagcttgggaagcttgaacatttacagtatctagagctctacaaaaacaacatccaaggaactataccttccgaacttggaaatctgaagaatctcatcagcttggatctgtacaacaacaatcttacagggatagttcccacttctttgggaaaattgaagtctctggtctttttacggcttaatgacaaccgattgaccggtccaatccctagagcactcacggcaatcccaagccttaaagttgttgacgtctcaagcaatgatttgtgtggaacaatcccaacaaacggaccctttgctcacattcctttacagaactttgagaacaacccgagattggagggaccggaattactcggtcttgcaagctacgacactaactgcacctgaaacaactggcaaaacctgaaaatgaagaattggggggtgaccttgtaagaacacttcaccactttatcaaatatcacatctattatgtaataagtatatatatgtagtaaaaacaaaaaaaatgaagaatcgaatcggtaatatcatctggtctcaattgagaacttcgaggtctgtatgtaaaatttctaaatgcgattttcgcttactgtaatgttcggttgtgggattctgagaagtaacatttgtattggtatggtatcaagttgttctgccttgtctgcattt

SEQ ID NO: 21774 - protein, 218 aa, Arabidopsis thaliana
  peptide (1)..(218): Ceres Seq. ID no. 12421967
  misc_feature (167)..(200): Pfam Name: Leucine Rich Repeat Pfam Description: Leucine Rich Repeat
  misc_feature (6)..(205): Homolog of NCBI NO: 38679443 NR Description: benzothiadiazole-induced somatic embryogenesis
  misc_feature (6)..(205): Homolog of NCBI NO: 40253600 NR Description: putative somatic embryogenesis receptor kinase 1
  misc_feature (12)..(217): Homolog of NCBI NO: 34896972 NR Description: putative leucine-rich repeat protein
  misc_feature (10)..(217): Homolog of NCBI NO: 27497122 NR Description: floral organ regulator 1 [Oryza sativa (japonica
  misc_feature (8)..(217): Homolog of NCBI NO: 34903344 NR Description: unnamed protein product [Oryza sativa (japonica
  misc_feature (10)..(217): Homolog of NCBI NO: 29468120 NR Description: leucine-rich repeat protein [Oryza sativa]
  misc_feature (8)..(218): Homolog of NCBI NO: 7489030 NR Description: leucine-rich repeat protein LRP - tomato
  misc_feature (11)..(218): Homolog of NCBI NO: 30385250 NR Description: leucine-rich repeat protein [x Citrofortunella
  misc_feature (1)..(218): Homolog of NCBI NO: 34146800 NR Description: At3g43740 [Arabidopsis thaliana]
  misc_feature (1)..(218): Homolog of NCBI NO: 15242153 NR Description: leucine-rich repeat protein
MASRNYRWELFAASLTLTLALIHLVEANSEGDALYALRRSLTDPDHVLQSWDPTLVNPCTWFHVTCNQDNRVTRVDLGNSNLSGHLAPELGKLEHLQYLELYKNNIQGTIPSELGNLKNLISLDLYNNNLTGIVPTSLGKLKSLVFLRLNDNRLTGPIPRALTAIPSLKVVDVSSNDLCGTIPTNGPFAHIPLQNFENNPRLEGPELLGLASYDTNCT

SEQ ID NO: 21775 - DNA, 1468 bp, Arabidopsis thaliana
  misc_feature (1)..(1468): Ceres Seq. ID no. 12396245
  misc_feature: MA Experiment ID: 108488 Result: Up-regulated in Transcription
  misc_feature: MA Experiment ID: 108577 Result: Down-regulated in Transcription
  misc_feature: MA Experiment 108577 PARAMETER Experiment Name: At_42deg_Heat_cDNA_P Parameter: Temperature (deg C) Value: 42 vs. 22
  misc_feature: MA Experiment 108577 PARAMETER Experiment Name: At_42deg_Heat_cDNA_P Parameter: Timepoint (hr) Value: 6
  misc_feature: MA Experiment 108577 PARAMETER Experiment Name: At_42deg_Heat_cDNA_P Parameter: Tissue Value: Aerial
  misc_feature: MA Experiment ID: 108595 Result: Down-regulated in Transcription
  misc_feature: MA Experiment 108595 PARAMETER Experiment Name: At_Ler-pi_Ovule_cDNA_P Parameter: Plant Line Value: null
  misc_feature: MA Experiment ID: 20000445 Result: Up-regulated in Transcription
  misc_feature: MA Experiment 20000445 PARAMETER Experiment Name: At_100uM_NAA__P Parameter: Age (day) Value: 14
  misc_feature: MA Experiment 20000445 PARAMETER Experiment Name: At_100uM_NAA__P Parameter: Organism Value: A. thaliana
  misc_feature: MA Experiment 20000445 PARAMETER Experiment Name: At_100uM_NAA__P Parameter: Plant Line Value: WS
  misc_feature: MA Experiment 20000445 PARAMETER Experiment Name: At_100uM_NAA__P Parameter: Timepoint (hr) Value: 6
  misc_feature: MA Experiment 20000445 PARAMETER Experiment Name: At_100uM_NAA__P Parameter: Tissue Value: Aerial
  misc_feature: MA Experiment 20000445 PARAMETER Experiment Name: At_100uM_NAA__P Parameter: Treatment Value: 100uM NAA vs. No Treatment
  misc_feature: MA Experiment ID: 20001911 Result: Down-regulated in Transcription
  misc_feature: MA Experiment 20001911 PARAMETER Experiment Name: At_Drought_Reproduction_P Parameter: Age (day) Value: 40
  misc_feature: MA Experiment 20001911 PARAMETER Experiment Name: At_Drought_Reproduction_P Parameter: Organism Value: A. thaliana
  misc_feature: MA Experiment 20001911 PARAMETER Experiment Name: At_Drought_Reproduction_P Parameter: Plant Line Value: WS
  misc_feature: MA Experiment 20001911 PARAMETER Experiment Name: At_Drought_Reproduction_P Parameter: Timepoint (day) Value: 10
  misc_feature: MA Experiment 20001911 PARAMETER Experiment Name: At_Drought_Reproduction_P Parameter: Tissue Value: Flowers
  misc_feature: MA Experiment 20001911 PARAMETER Experiment Name: At_Drought_Reproduction_P Parameter: Treatment Value: Drought vs. No Drought
aaattttaatctcggctacgagtttctgggtgatgataattaagctttttttttctgctttaatggaaggaccttgacacttctctctctctttctctttgctattcatcttctacagtttcttaaaaattatactcttcttctccaaaatatctcagactctcttatttttgatcgtcttcttcttcttcgttgtgagcttccatttttcatccaggatttgttttttccgtttgaggtaaagcagctttgcagttaaagaaaccttgagtatccaatgtccccggaagaggagctacagagcaatgtatcggtggctagttcttcacctactagcaattgcatctccaggaacactctaggaggacttaaagagcataactacttgggtctctctgattgttcttctgttggaagctctactctctctccccttgctgaagatgacaaagctactatcagcctcaaggctacggagctgacacttggtcttcctggatcacaatctcctgcgagagacacagagcttaaccttttgagcccagcaaagctagatgagaagccattctttcctttgcttccttctaaagatgagatatgctcctcctcgcaaaagaacaatgcatcgggaaacaaaagaggcttttctgacacaatggatcagtttgctgaagctaaaagttcagtgtatactgagaaaaactggatgttccctgaagcagcagccacccagtctgtaacaaagaaagatgtgccacaaaacatacccaaaggacagtctagcactacaaacaatagctctagtccacctgcagccaaggcacaaattgtcggttggcctccagtgagatcctacaggaagaacacattggccactacttgtaagaacagtgacgaagttgatgggaggccaggttctggggctctcttcgtgaaggtcagtatggatggtgctccttatctgaggaaagttgacctgaggagctacactaactacggggagctttcttcagccttggagaaaatgttcaccactttcactcttggtcaatgtggatctaatggagctgctgggaaggatatgcttagtgagaccaagctcaaggatcttttgaatggaaaagactatgtgctcacttatgaggataaggatggtgactggatgcttgttggagatgttccgtgggagatgtttattgatgtctgcaagaagctgaagataatgaaagggtgtgatgctattgggttagctgcagctccgagagcaatggagaaatcgaagatgagagcttaaaagatggaacatgacaaagctttctaactatacaaaatatgtgcgatcttttggtggtgtttttaaatttcaaaacatcaatatctttagtttctgaatttttaaaatgaagtaagtaagactacgaatgtaaggaaatgaagaagaattaaaaatgatctatttttgttgttt

SEQ ID NO: 21776 - protein, 338 aa, Arabidopsis thaliana
  peptide (1)..(338): Ceres Seq. ID no. 12396246
  misc_feature (61)..(328): Pfam Name: AUX/IAA family Pfam Description: AUX/IAA family
  misc_feature (1)..(324): Homolog of NCBI NO: 10177324 NR Description: auxin-induced protein IAA9 [Arabidopsis thaliana]
  misc_feature (1)..(338): Homolog of NCBI NO: 30698145 NR Description: auxin-responsive protein IAA9 (Indoleacetic
  misc_feature (1)..(338): Homolog of NCBI NO: 21592701 NR Description: auxin-induced protein IAA9 [Arabidopsis thaliana]
  misc_feature (1)..(338): Homolog of NCBI NO: 30698143 NR Description: auxin-responsive protein IAA9 (Indoleacetic
MSPEEELQSNVSVASSSPTSNCISRNTLGGLKEHNYLGLSDCSSVGSSTLSPLAEDDKATISLKATELTLGLPGSQSPARDTELNLLSPAKLDEKPFFPLLPSKDEICSSSQKNNASGNKRGFSDTMDQFAEAKSSVYTEKNWMFPEAAATQSVTKKDVPQNIPKGQSSTTNNSSSPPAAKAQIVGWPPVRSYRKNTLATTCKNSDEVDGRPGSGALFVKVSMDGAPYLRKVDLRSYTNYGELSSALEKMFTTFTLGQCGSNGAAGKDMLSETKLKDLLNGKDYVLTYEDKDGDWMLVGDVPWEMFIDVCKKLKIMKGCDAIGLAAAPRAMEKSKMRA

SEQ ID NO: 21777 - protein, 212 aa, Arabidopsis thaliana
  peptide (1)..(212): Ceres Seq. ID no. 12396247
  misc_feature (1)..(202): Pfam Name: AUX/IAA family Pfam Description: AUX/IAA family
  misc_feature (1)..(198): Homolog of NCBI NO: 10177324 NR Description: auxin-induced protein IAA9 [Arabidopsis thaliana]
  misc_feature (1)..(212): Homolog of NCBI NO: 30698145 NR Description: auxin-responsive protein IAA9 (Indoleacetic
  misc_feature (1)..(212): Homolog of NCBI NO: 21592701 NR Description: auxin-induced protein IAA9 [Arabidopsis thaliana]
  misc_feature (1)..(212): Homolog of NCBI NO: 30698143 NR Description: auxin-responsive protein IAA9 (Indoleacetic
MDQFAEAKSSVYTEKNWMFPEAAATQSVTKKDVPQNIPKGQSSTTNNSSSPPAAKAQIVGWPPVRSYRKNTLATTCKNSDEVDGRPGSGALFVKVSMDGAPYLRKVDLRSYTNYGELSSALEKMFTTFTLGQCGSNGAAGKDMLSETKLKDLLNGKDYVLTYEDKDGDWMLVGDVPWEMFIDVCKKLKIMKGCDAIGLAAAPRAMEKSKMRA

SEQ ID NO: 21778 - protein, 195 aa, Arabidopsis thaliana
  peptide (1)..(195): Ceres Seq. ID no. 12396248
  misc_feature (1)..(185): Pfam Name: AUX/IAA family Pfam Description: AUX/IAA family
  misc_feature (1)..(181): Homolog of NCBI NO: 10177324 NR Description: auxin-induced protein IAA9 [Arabidopsis thaliana]
  misc_feature (1)..(195): Homolog of NCBI NO: 30698145 NR Description: auxin-responsive protein IAA9 (Indoleacetic
  misc_feature (1)..(195): Homolog of NCBI NO: 21592701 NR Description: auxin-induced protein IAA9 [Arabidopsis thaliana]
  misc_feature (1)..(195): Homolog of NCBI NO: 30698143 NR Description: auxin-responsive protein IAA9 (Indoleacetic
MFPEAAATQSVTKKDVPQNIPKGQSSTTNNSSSPPAAKAQIVGWPPVRSYRKNTLATTCKNSDEVDGRPGSGALFVKVSMDGAPYLRKVDLRSYTNYGELSSALEKMFTTFTLGQCGSNGAAGKDMLSETKLKDLLNGKDYVLTYEDKDGDWMLVGDVPWEMFIDVCKKLKIMKGCDAIGLAAAPRAMEKSKMRA

SEQ ID NO: 21779 - DNA, 1293 bp, Arabidopsis thaliana
  misc_feature (1)..(1293): Ceres Seq. ID no. 12370578
  misc_feature: MA Experiment ID: 108434 Result: Down-regulated in Transcription
  misc_feature: MA Experiment 108434 PARAMETER Experiment Name: At_Root_Tips_cDNA_P Parameter: Tissue Value: Root Tips
  misc_feature: MA Experiment ID: 108469 Result: Up-regulated in Transcription
  misc_feature: MA Experiment ID: 108574 Result: Up-regulated in Transcription
  misc_feature: MA Experiment 108574 PARAMETER Experiment Name: At_Wounding__cDNA_P Parameter: Timepoint (hr) Value: 1
  misc_feature: MA Experiment 108574 PARAMETER Experiment Name: At_Wounding__cDNA_P Parameter: Tissue Value: Aerial
  misc_feature: MA Experiment 108574 PARAMETER Experiment Name: At_Wounding__cDNA_P Parameter: Treatment Value: Wounding vs. No Wounding
  misc_feature: MA Experiment ID: 108577 Result: Down-regulated in Transcription
  misc_feature: MA Experiment 108577 PARAMETER Experiment Name: At_42deg_Heat_cDNA_P Parameter: Temperature (deg C) Value: 42 vs. 22
  misc_feature: MA Experiment 108577 PARAMETER Experiment Name: At_42deg_Heat_cDNA_P Parameter: Timepoint (hr) Value: 6
  misc_feature: MA Experiment 108577 PARAMETER Experiment Name: At_42deg_Heat_cDNA_P Parameter: Tissue Value: Aerial
  misc_feature: MA Experiment ID: 108585 Result: Up-regulated in Transcription
  misc_feature: MA Experiment 108585 PARAMETER Experiment Name: At_5mM_NaNP_cDNA_P Parameter: Timepoint (hr) Value: 6
  misc_feature: MA Experiment 108585 PARAMETER Experiment Name: At_5mM_NaNP_cDNA_P Parameter: Tissue Value: Aerial
  misc_feature: MA Experiment 108585 PARAMETER Experiment Name: At_5mM_NaNP_cDNA_P Parameter: Treatment Value: null
  misc_feature: MA Experiment ID: 108594 Result: Up-regulated in Transcription
  misc_feature: MA Experiment 108594 PARAMETER Experiment Name: At_Ler-rhl_Root_cDNA_P Parameter: Plant Line Value: null
  misc_feature: MA Experiment ID: 108595 Result: Up-regulated in Transcription
  misc_feature: MA Experiment 108595 PARAMETER Experiment Name: At_Ler-pi_Ovule_cDNA_P Parameter: Plant Line Value: null
  misc_feature: MA Experiment ID: 108667 Result: Up-regulated in Transcription
  misc_feature: MA Experiment 108667 PARAMETER Experiment Name: At_2mM_SA_cDNA_P Parameter: Plant Line Value: WS
  misc_feature: MA Experiment 108667 PARAMETER Experiment Name: At_2mM_SA_cDNA_P Parameter: Timepoint (hr) Value: 1
  misc_feature: MA Experiment 108667 PARAMETER Experiment Name: At_2mM_SA_cDNA_P Parameter: Treatment Value: 2mM SA vs. No Treatment
  misc_feature: MA Experiment ID: 108668 Result: Up-regulated in Transcription
  misc_feature: MA Experiment 108668 PARAMETER Experiment Name: At_2mM_SA_cDNA_P Parameter: Plant Line Value: WS
  misc_feature: MA Experiment 108668 PARAMETER Experiment Name: At_2mM_SA_cDNA_P Parameter: Timepoint (hr) Value: 6
  misc_feature: MA Experiment 108668 PARAMETER Experiment Name: At_2mM_SA_cDNA_P Parameter: Treatment Value: 2mM SA vs. No Treatment
  misc_feature: MA Experiment ID: 20000111 Result: Down-regulated in Transcription
  misc_feature: MA Experiment 20000111 PARAMETER Experiment Name: At_42deg_Heat_cDNA_P Parameter: Temperature (deg C) Value: 42 vs. 22
  misc_feature: MA Experiment 20000111 PARAMETER Experiment Name: At_42deg_Heat_cDNA_P Parameter: Timepoint (hr) Value: 6
  misc_feature: MA Experiment 20000111 PARAMETER Experiment Name: At_42deg_Heat_cDNA_P Parameter: Tissue Value: Aerial
  misc_feature: MA Experiment ID: 20000113 Result: Down-regulated in Transcription
  misc_feature: MA Experiment 20000113 PARAMETER Experiment Name: At_42deg_Heat_cDNA_P Parameter: Temperature (deg C) Value: 42 vs. 22
  misc_feature: MA Experiment 20000113 PARAMETER Experiment Name: At_42deg_Heat_cDNA_P Parameter: Timepoint (hr) Value: 8
  misc_feature: MA Experiment 20000113 PARAMETER Experiment Name: At_42deg_Heat_cDNA_P Parameter: Tissue Value: Aerial
  misc_feature: MA Experiment ID: 20000173 Result: Down-regulated in Transcription
  misc_feature: MA Experiment 20000173 PARAMETER Experiment Name: At_42deg_Heat_P Parameter: Age (day) Value: 14
  misc_feature: MA Experiment 20000173 PARAMETER Experiment Name: At_42deg_Heat_P Parameter: Organism Value: A. thaliana
  misc_feature: MA Experiment 20000173 PARAMETER Experiment Name: At_42deg_Heat_P Parameter: Plant Line Value: WS
  misc_feature: MA Experiment 20000173 PARAMETER Experiment Name: At_42deg_Heat_P Parameter: Temperature (deg C) Value: 42 vs. 22
  misc_feature: MA Experiment 20000173 PARAMETER Experiment Name: At_42deg_Heat_P Parameter: Timepoint (hr) Value: 6
  misc_feature: MA Experiment 20000173 PARAMETER Experiment Name: At_42deg_Heat_P Parameter: Tissue Value: Aerial
  misc_feature: MA Experiment ID: 20000182 Result: Up-regulated in Transcription
  misc_feature: MA Experiment 20000182 PARAMETER Experiment Name: At_2mM_SA_P Parameter: Age (day) Value: 14
  misc_feature: MA Experiment 20000182 PARAMETER Experiment Name: At_2mM_SA_P Parameter: Organism Value: A. thaliana
  misc_feature: MA Experiment 20000182 PARAMETER Experiment Name: At_2mM_SA_P Parameter: Plant Line Value: WS
  misc_feature: MA Experiment 20000182 PARAMETER Experiment Name: At_2mM_SA_P Parameter: Timepoint (hr) Value: 6
  misc_feature: MA Experiment 20000182 PARAMETER Experiment Name: At_2mM_SA_P Parameter: Tissue Value: Aerial
  misc_feature: MA Experiment 20000182 PARAMETER Experiment Name: At_2mM_SA_P Parameter: Treatment Value: 2mM SA vs. No Treatment
  misc_feature: MA Experiment ID: 20000184 Result: Down-regulated in Transcription
  misc_feature: MA Experiment 20000184 PARAMETER Experiment Name: At_Shoots__P Parameter: Age (day) Value: 7
  misc_feature: MA Experiment 20000184 PARAMETER Experiment Name: At_Shoots__P Parameter: Tissue Value: Shoots vs. Whole Plant
  misc_feature: MA Experiment ID: 20000185 Result: Down-regulated in Transcription
  misc_feature: MA Experiment 20000185 PARAMETER Experiment Name: At_Roots__P Parameter: Age (day) Value: 7 vs. 21
  misc_feature: MA Experiment 20000185 PARAMETER Experiment Name: At_Roots__P Parameter: Organism Value: A. thaliana
  misc_feature: MA Experiment 20000185 PARAMETER Experiment Name: At_Roots__P Parameter: Tissue Value: Roots vs. Whole Plant
  misc_feature: MA Experiment ID: 20000213 Result: Up-regulated in Transcription
  misc_feature: MA Experiment 20000213 PARAMETER Experiment Name: At_4deg_Cold_P Parameter: Timepoint (hr) Value: 2
  misc_feature: MA Experiment ID: 20000234 Result: Down-regulated in Transcription
  misc_feature: MA Experiment 20000234 PARAMETER Experiment Name: At_Siliques_P Parameter: Age (day) Value: 21
  misc_feature: MA Experiment 20000234 PARAMETER Experiment Name: At_Siliques_P Parameter: Organism Value: A. thaliana
  misc_feature: MA Experiment 20000234 PARAMETER Experiment Name: At_Siliques_P Parameter: Plant Line Value: WS
  misc_feature: MA Experiment 20000234 PARAMETER Experiment Name: At_Siliques_P Parameter: Tissue Value: Less Than 5mm Siliques vs. Whole Plant
  misc_feature: MA Experiment ID: 20000235 Result: Down-regulated in Transcription
  misc_feature: MA Experiment 20000235 PARAMETER Experiment Name: At_Siliques_P Parameter: Age (day) Value: 21
  misc_feature: MA Experiment 20000235 PARAMETER Experiment Name: At_Siliques_P Parameter: Organism Value: A. thaliana
  misc_feature: MA Experiment 20000235 PARAMETER Experiment Name: At_Siliques_P Parameter: Plant Line Value: WS
  misc_feature: MA Experiment 20000235 PARAMETER Experiment Name: At_Siliques_P Parameter: Tissue Value: 5-10mm Siliques vs. Whole Plant
  misc_feature: MA Experiment ID: 20000264 Result: Down-regulated in Transcription
  misc_feature: MA Experiment 20000264 PARAMETER Experiment Name: At_Open_Flower_P Parameter: Age (day) Value: 21
  misc_feature: MA Experiment 20000264 PARAMETER Experiment Name: At_Open_Flower_P Parameter: Plant Line Value: WS
  misc_feature: MA Experiment 20000264 PARAMETER Experiment Name: At_Open_Flower_P Parameter: Tissue Value: Open Flower vs. Whole Plant
  misc_feature: MA Experiment ID: 20000265 Result: Down-regulated in Transcription
  misc_feature: MA Experiment 20000265 PARAMETER Experiment Name: At_Open_Flower_P Parameter: Age (day) Value: 21
  misc_feature: MA Experiment 20000265 PARAMETER Experiment Name: At_Open_Flower_P Parameter: Plant Line Value: WS
  misc_feature: MA Experiment 20000265 PARAMETER Experiment Name: At_Open_Flower_P Parameter: Tissue Value: Closed Flower vs. Whole Plant
  misc_feature: MA Experiment ID: 20000268 Result: Down-regulated in Transcription
  misc_feature: MA Experiment 20000268 PARAMETER Experiment Name: At_100mM_NaCl__P Parameter: Age (day) Value: 14
  misc_feature: MA Experiment 20000268 PARAMETER Experiment Name: At_100mM_NaCl__P Parameter: Organism Value: A. thaliana
  misc_feature: MA Experiment 20000268 PARAMETER Experiment Name: At_100mM_NaCl__P Parameter: Plant Line Value: WS
  misc_feature: MA Experiment 20000268 PARAMETER Experiment Name: At_100mM_NaCl__P Parameter: Timepoint (hr) Value: 6
  misc_feature: MA Experiment 20000268 PARAMETER Experiment Name: At_100mM_NaCl__P Parameter: Tissue Value: Whole Plant
  misc_feature: MA Experiment 20000268 PARAMETER Experiment Name: At_100mM_NaCl__P Parameter: Treatment Value: 100mM NaCl vs. No Treatment
  misc_feature: MA Experiment ID: 20000286 Result: Down-regulated in Transcription
  misc_feature: MA Experiment 20000286 PARAMETER Experiment Name: At_Open_Flower_P Parameter: Age (day) Value: 21
  misc_feature: MA Experiment 20000286 PARAMETER Experiment Name: At_Open_Flower_P Parameter: Plant Line Value: WS
  misc_feature: MA Experiment 20000286 PARAMETER Experiment Name: At_Open_Flower_P Parameter: Tissue Value: Half Open vs. Whole Plant
  misc_feature: MA Experiment ID: 20000438 Result: Down-regulated in Transcription
  misc_feature: MA Experiment 20000438 PARAMETER Experiment Name: At_Shoots__P Parameter: Age (day) Value: 14
  misc_feature: MA Experiment 20000438 PARAMETER Experiment Name: At_Shoots__P Parameter: Tissue Value: Shoots vs. Whole Plant
  misc_feature: MA Experiment ID: 20000439 Result: Down-regulated in Transcription
  misc_feature: MA Experiment 20000439 PARAMETER Experiment Name: At_Roots__P Parameter: Age (day) Value: 14 vs. 21
  misc_feature: MA Experiment 20000439 PARAMETER Experiment Name: At_Roots__P Parameter: Organism Value: A. thaliana
  misc_feature: MA Experiment 20000439 PARAMETER Experiment Name: At_Roots__P Parameter: Tissue Value: Roots vs. Whole Plant
  misc_feature: MA Experiment ID: 20000441 Result: Up-regulated in Transcription
  misc_feature: MA Experiment 20000441 PARAMETER Experiment Name: At_1uM_BR-BRZ__P Parameter: Tissue Value: Shoot Apices
  misc_feature: MA Experiment 20000441 PARAMETER Experiment Name: At_1uM_BR-BRZ__P Parameter: Treatment Value: 1uM BR vs. No Treatment
  misc_feature: MA Experiment ID: 20000460 Result: Up-regulated in Transcription
  misc_feature: MA Experiment 20000460 PARAMETER Experiment Name: At_10percent_PEG_P Parameter: Age (day) Value: 12
  misc_feature: MA Experiment 20000460 PARAMETER Experiment Name: At_10percent_PEG_P Parameter: Organism Value: A. thaliana
  misc_feature: MA Experiment 20000460 PARAMETER Experiment Name: At_10percent_PEG_P Parameter: Plant Line Value: WS
  misc_feature: MA Experiment 20000460 PARAMETER Experiment Name: At_10percent_PEG_P Parameter: Timepoint (day) Value: 12
  misc_feature: MA Experiment 20000460 PARAMETER Experiment Name: At_10percent_PEG_P Parameter: Tissue Value: Whole Plant
  misc_feature: MA Experiment 20000460 PARAMETER Experiment Name: At_10percent_PEG_P Parameter: Treatment Value: 10percent PEG vs. No Treatment
  misc_feature: MA Experiment ID: 20000573 Result: Down-regulated in Transcription
  misc_feature: MA Experiment 20000573 PARAMETER Experiment Name: At_100uM_ABA_Mutants__P Parameter: Organism Value: A. thaliana
  misc_feature: MA Experiment 20000573 PARAMETER Experiment Name: At_100uM_ABA_Mutants__P Parameter: Plant Line Value: CS22 vs. Ler wt
  misc_feature: MA Experiment 20000573 PARAMETER Experiment Name: At_100uM_ABA_Mutants__P Parameter: Timepoint (hr) Value: N/A
  misc_feature: MA Experiment 20000573 PARAMETER Experiment Name: At_100uM_ABA_Mutants__P Parameter: Tissue Value: Whole Plant
  misc_feature: MA Experiment 20000573 PARAMETER Experiment Name: At_100uM_ABA_Mutants__P Parameter: Treatment Value: None
  misc_feature: MA Experiment ID: 20000794 Result: Down-regulated in Transcription
  misc_feature: MA Experiment 20000794 PARAMETER Experiment Name: At_Petals_P Parameter: Age (day) Value: 23-25 days
  misc_feature: MA Experiment 20000794 PARAMETER Experiment Name: At_Petals_P Parameter: Plant Line Value: WS
  misc_feature: MA Experiment 20000794 PARAMETER Experiment Name: At_Petals_P Parameter: Tissue Value: Petals vs. Whole plant
  misc_feature: MA Experiment ID: 20001247 Result: Up-regulated in Transcription
  misc_feature: MA Experiment 20001247 PARAMETER Experiment Name: At_Far-red-induction_P Parameter: Age (day) Value: 7
  misc_feature: MA Experiment 20001247 PARAMETER Experiment Name: At_Far-red-induction_P Parameter: Light Value: Far-red vs. White
  misc_feature: MA Experiment 20001247 PARAMETER Experiment Name: At_Far-red-induction_P Parameter: Organism Value: A. thaliana
  misc_feature: MA Experiment 20001247 PARAMETER Experiment Name: At_Far-red-induction_P Parameter: Plant Line Value: Columbia
  misc_feature: MA Experiment 20001247 PARAMETER Experiment Name: At_Far-red-induction_P Parameter: Timepoint (hr) Value: 1
  misc_feature: MA Experiment 20001247 PARAMETER Experiment Name: At_Far-red-induction_P Parameter: Tissue Value: Whole Plant
  misc_feature: MA Experiment ID: 20001451 Result: Down-regulated in Transcription
  misc_feature: MA Experiment 20001451 PARAMETER Experiment Name: At_Far-red-induction_P Parameter: Age (day) Value: 7
  misc_feature: MA Experiment 20001451 PARAMETER Experiment Name: At_Far-red-induction_P Parameter: Light Value: Far-red vs. White
  misc_feature: MA Experiment 20001451 PARAMETER Experiment Name: At_Far-red-induction_P Parameter: Organism Value: A. thaliana
  misc_feature: MA Experiment 20001451 PARAMETER Experiment Name: At_Far-red-induction_P Parameter: Plant Line Value: Columbia
  misc_feature: MA Experiment 20001451 PARAMETER Experiment Name: At_Far-red-induction_P Parameter: Timepoint (hr) Value: 24
  misc_feature: MA Experiment 20001451 PARAMETER Experiment Name: At_Far-red-induction_P Parameter: Tissue Value: Whole Plant
  misc_feature: MA Experiment ID: 20001555 Result: Down-regulated in Transcription
  misc_feature: MA Experiment 20001555 PARAMETER Experiment Name: At_Drought_Soil_Dry_P Parameter: Age (day) Value: 24
  misc_feature: MA Experiment 20001555 PARAMETER Experiment Name: At_Drought_Soil_Dry_P Parameter: Organism Value: A. thaliana
  misc_feature: MA Experiment 20001555 PARAMETER Experiment Name: At_Drought_Soil_Dry_P Parameter: Plant Line Value: WS
  misc_feature: MA Experiment 20001555 PARAMETER Experiment Name: At_Drought_Soil_Dry_P Parameter: Post Timepoint (hr) Value: None
  misc_feature: MA Experiment 20001555 PARAMETER Experiment Name: At_Drought_Soil_Dry_P Parameter: Post-Treatment Value: None
  misc_feature: MA Experiment 20001555 PARAMETER Experiment Name: At_Drought_Soil_Dry_P Parameter: Timepoint (day) Value: 10
  misc_feature: MA Experiment 20001555 PARAMETER Experiment Name: At_Drought_Soil_Dry_P Parameter: Treatment Value: Drought vs. No Drought
  misc_feature: MA Experiment ID: 20001556 Result: Down-regulated in Transcription
  misc_feature: MA Experiment 20001556 PARAMETER Experiment Name: At_Drought_Soil_Dry_P Parameter: Age (day) Value: 26
  misc_feature: MA Experiment 20001556 PARAMETER Experiment Name: At_Drought_Soil_Dry_P Parameter: Organism Value: A. thaliana
  misc_feature: MA Experiment 20001556 PARAMETER Experiment Name: At_Drought_Soil_Dry_P Parameter: Plant Line Value: WS
  misc_feature: MA Experiment 20001556 PARAMETER Experiment Name: At_Drought_Soil_Dry_P Parameter: Post Timepoint (hr) Value: None
  misc_feature: MA Experiment 20001556 PARAMETER Experiment Name: At_Drought_Soil_Dry_P Parameter: Post-Treatment Value: None
  misc_feature: MA Experiment 20001556 PARAMETER Experiment Name: At_Drought_Soil_Dry_P Parameter: Timepoint (day) Value: 12
  misc_feature: MA Experiment 20001556 PARAMETER Experiment Name: At_Drought_Soil_Dry_P Parameter: Treatment Value: Drought vs. No Drought
  misc_feature: MA Experiment ID: 20001904 Result: Down-regulated in Transcription
  misc_feature: MA Experiment 20001904 PARAMETER Experiment Name: At_Drought_Reproduction_P Parameter: Age (day) Value: 37
  misc_feature: MA Experiment 20001904 PARAMETER Experiment Name: At_Drought_Reproduction_P Parameter: Organism Value: A. thaliana
  misc_feature: MA Experiment 20001904 PARAMETER Experiment Name: At_Drought_Reproduction_P Parameter: Plant Line Value: WS
  misc_feature: MA Experiment 20001904 PARAMETER Experiment Name: At_Drought_Reproduction_P Parameter: Timepoint (day) Value: 7
  misc_feature: MA Experiment 20001904 PARAMETER Experiment Name: At_Drought_Reproduction_P Parameter: Tissue Value: Rosettes
  misc_feature: MA Experiment 20001904 PARAMETER Experiment Name: At_Drought_Reproduction_P Parameter: Treatment Value: Drought vs. No Drought
  misc_feature: MA Experiment ID: 20001910 Result: Down-regulated in Transcription
  misc_feature: MA Experiment 20001910 PARAMETER Experiment Name: At_Drought_Reproduction_P Parameter: Age (day) Value: 37
  misc_feature: MA Experiment 20001910 PARAMETER Experiment Name: At_Drought_Reproduction_P Parameter: Organism Value: A. thaliana
  misc_feature: MA Experiment 20001910 PARAMETER Experiment Name: At_Drought_Reproduction_P Parameter: Plant Line Value: WS
  misc_feature: MA Experiment 20001910 PARAMETER Experiment Name: At_Drought_Reproduction_P Parameter: Timepoint (day) Value: 7
  misc_feature: MA Experiment 20001910 PARAMETER Experiment Name: At_Drought_Reproduction_P Parameter: Tissue Value: Flowers
  misc_feature: MA Experiment 20001910 PARAMETER Experiment Name: At_Drought_Reproduction_P Parameter: Treatment Value: Drought vs. No Drought
aatctgaaagttcttaagtggttccacgatgtttccattttgttctgacttccgaggccaacgagatgagtccaataaacaaagggcacggaaacattctttttaaattaggtttgttttttatttttggtttttggtttttcccggaaattgtatgaagtcttcgttacagtttctctctctcacattctctgtataaagtcttcttgagatcgaaggataacttcaattcgattcttttccaagctacacacagctgattttattataagaagattgattgtgatgggtactagagctctgcagattcctttacttgaaggtgagactgataattacgatggtgttactgtaaccatggtggaacctatggattctgaggtttttactgaaagtcttagggcttcgctttcgcattggagagaagaggggaagaagggaatttggataaagctgcctcttggattggctaatcttgtggaggctgcagttagtgaaggatttagatatcaccacgcggagcctgagtacttgatgcttgtatcttggatctctgaaactcctgatacaatcccagccaatgcttctcatgttgtaggtgctggtgctttggtcatcaacaaaaatactaaagaggtcctcgttgtccaggagaggagtgggtttttcaaagataaaaatgtgtggaagctgcctactggtgttatcaacgagggcgaggatatatggactggagtagctagggaagtggaagaagaaactggaattattgcagattttgtcgaagtactggctttcaggcaaagccacaaagccatcttaaaaaagaaaacagatatgtttttcctgtgtgtcttaagtccgcgctcttacgatattactgaacaaaaatctgagatcttgcaagctaagtggatgccgatccaagagtatgtagaccaaccatggaacaagaagaacgagatgttcaagttcatggctaacatttgccaaaagaagtgtgaggaagaatacttgggattcgccattgtgccaactaccacatcatctggtaaagagagctttatctactgcaatgcggatcatgccaagcgccttaaagtatcgcgtgaccaagcctctgcttctctctgaaaacattctcatctgattctgtttgatctcggcatgtgtgtgtccagtgtgtacaaaacaggatactttcttctatattattccgattctacaaaattgcgtctaaatatttaagtttataccatctctatgagccactgtaaaacttgccatcgactt

SEQ ID NO: 21780 - protein, 282 aa, Arabidopsis thaliana
  peptide (1)..(282): Ceres Seq. ID no. 12370579
  misc_feature (102)..(237): Pfam Name: NUDIX domain Pfam Description: NUDIX domain
  misc_feature (161)..(264): Homolog of NCBI NO: 30686884 NR Description: MutT/nudix family protein [Arabidopsis thaliana]
  misc_feature (16)..(161): Homolog of NCBI NO: 30686884 NR Description: MutT/nudix family protein [Arabidopsis thaliana]
  misc_feature (16)..(264): Homolog of NCBI NO: 38564312 NR Description: At4g25434 [Arabidopsis thaliana]
  misc_feature (10)..(269): Homolog of NCBI NO: 18422823 NR Description: MutT domain protein-like
  misc_feature (10)..(269): Homolog of NCBI NO: 9758793 NR Description: MutT domain protein-like [Arabidopsis thaliana]
  misc_feature (1)..(282): Homolog of NCBI NO: 15228145 NR Description: putative mutT domain protein; protein id:
  misc_feature (1)..(282): Homolog of NCBI NO: 38564302 NR Description: At2g04430 [Arabidopsis thaliana]
  misc_feature (10)..(281): Homolog of NCBI NO: 15228147 NR Description: putative mutT domain protein; protein id:
  misc_feature (1)..(282): Homolog of NCBI NO: 15235458 NR Description: growth factor like protein
  misc_feature (1)..(282): Homolog of NCBI NO: 21553511 NR Description: growth factor like protein [Arabidopsis thaliana]
MGTRALQIPLLEGETDNYDGVTVTMVEPMDSEVFTESLRASLSHWREEGKKGIWIKLPLGLANLVEAAVSEGFRYHHAEPEYLMLVSWISETPDTIPANASHVVGAGALVINKNTKEVLVVQERSGFFKDKNVWKLPTGVINEGEDIWTGVAREVEEETGIIADFVEVLAFRQSHKAILKKKTDMFFLCVLSPRSYDITEQKSEILQAKWMPIQEYVDQPWNKKNEMFKFMANICQKKCEEEYLGFAIVPTTTSSGKESFIYCNADHAKRLKVSRDQASASL

SEQ ID NO: 21781 - protein, 258 aa, Arabidopsis thaliana
  peptide (1)..(258): Ceres Seq. ID no. 12370580
  misc_feature (78)..(213): Pfam Name: NUDIX domain Pfam Description: NUDIX domain
  misc_feature (137)..(240): Homolog of NCBI NO: 30686884 NR Description: MutT/nudix family protein [Arabidopsis thaliana]
  misc_feature (1)..(137): Homolog of NCBI NO: 30686884 NR Description: MutT/nudix family protein [Arabidopsis thaliana]
  misc_feature (1)..(240): Homolog of NCBI NO: 38564312 NR Description: At4g25434 [Arabidopsis thaliana]
  misc_feature (1)..(245): Homolog of NCBI NO: 18422823 NR Description: MutT domain protein-like
  misc_feature (1)..(245): Homolog of NCBI NO: 9758793 NR Description: MutT domain protein-like [Arabidopsis thaliana]
  misc_feature (1)..(258): Homolog of NCBI NO: 15228145 NR Description: putative mutT domain protein; protein id:
  misc_feature (1)..(258): Homolog of NCBI NO: 38564302 NR Description: At2g04430 [Arabidopsis thaliana]
  misc_feature (1)..(257): Homolog of NCBI NO: 15228147 NR Description: putative mutT domain protein; protein id:
  misc_feature (1)..(258): Homolog of NCBI NO: 15235458 NR Description: growth factor like protein
  misc_feature (1)..(258): Homolog of NCBI NO: 21553511 NR Description: growth factor like protein [Arabidopsis thaliana]
MVEPMDSEVFTESLRASLSHWREEGKKGIWIKLPLGLANLVEAAVSEGFRYHHAEPEYLMLVSWISETPDTIPANASHVVGAGALVINKNTKEVLVVQERSGFFKDKNVWKLPTGVINEGEDIWTGVAREVEEETGIIADFVEVLAFRQSHKAILKKKTDMFFLCVLSPRSYDITEQKSEILQAKWMPIQEYVDQPWNKKNEMFKFMANICQKKCEEEYLGFAIVPTTTSSGKESFIYCNADHAKRLKVSRDQASASL

SEQ ID NO: 21782 - protein, 254 aa, Arabidopsis thaliana
  peptide (1)..(254): Ceres Seq. ID no. 12370581
  misc_feature (74)..(209): Pfam Name: NUDIX domain Pfam Description: NUDIX domain
  misc_feature (133)..(236): Homolog of NCBI NO: 30686884 NR Description: MutT/nudix family protein [Arabidopsis thaliana]
  misc_feature (1)..(133): Homolog of NCBI NO: 30686884 NR Description: MutT/nudix family protein [Arabidopsis thaliana]
  misc_feature (1)..(236): Homolog of NCBI NO: 38564312 NR Description: At4g25434 [Arabidopsis thaliana]
  misc_feature (1)..(241): Homolog of NCBI NO: 18422823 NR Description: MutT domain protein-like
  misc_feature (1)..(241): Homolog of NCBI NO: 9758793 NR Description: MutT domain protein-like [Arabidopsis thaliana]
  misc_feature (1)..(254): Homolog of NCBI NO: 15228145 NR Description: putative mutT domain protein; protein id:
  misc_feature (1)..(254): Homolog of NCBI NO: 38564302 NR Description: At2g04430 [Arabidopsis thaliana]
  misc_feature (1)..(253): Homolog of NCBI NO: 15228147 NR Description: putative mutT domain protein; protein id:
  misc_feature (1)..(254): Homolog of NCBI NO: 15235458 NR Description: growth factor like protein
  misc_feature (1)..(254): Homolog of NCBI NO: 21553511 NR Description: growth factor like protein [Arabidopsis thaliana]
MDSEVFTESLRASLSHWREEGKKGIWIKLPLGLANLVEAAVSEGFRYHHAEPEYLMLVSWISETPDTIPANASHVVGAGALVINKNTKEVLVVQERSGFFKDKNVWKLPTGVINEGEDIWTGVAREVEEETGIIADFVEVLAFRQSHKAILKKKTDMFFLCVLSPRSYDITEQKSEILQAKWMPIQEYVDQPWNKKNEMFKFMANICQKKCEEEYLGFAIVPTTTSSGKESFIYCNADHAKRLKVSRDQASASL

SEQ ID NO: 21783 - DNA, 1725 bp, Arabidopsis thaliana
  misc_feature (1)..(1725): Ceres Seq. ID no. 12371079
  misc_feature: MA Experiment ID: 108434 Result: Down-regulated in Transcription
  misc_feature: MA Experiment 108434 PARAMETER Experiment Name: At_Root_Tips_cDNA_P Parameter: Tissue Value: Root Tips
  misc_feature: MA Experiment ID: 108573 Result: Up-regulated in Transcription
  misc_feature: MA Experiment 108573 PARAMETER Experiment Name: At_Drought_cDNA_P Parameter: Timepoint (hr) Value: 6
  misc_feature: MA Experiment 108573 PARAMETER Experiment Name: At_Drought_cDNA_P Parameter: Tissue Value: Aerial
  misc_feature: MA Experiment 108573 PARAMETER Experiment Name: At_Drought_cDNA_P Parameter: Treatment Value: Drought vs. No Drought
  misc_feature: MA Experiment ID: 108577 Result: Up-regulated in Transcription
  misc_feature: MA Experiment 108577 PARAMETER Experiment Name: At_42deg_Heat_cDNA_P Parameter: Temperature (deg C) Value: 42 vs. 22
  misc_feature: MA Experiment 108577 PARAMETER Experiment Name: At_42deg_Heat_cDNA_P Parameter: Timepoint (hr) Value: 6
  misc_feature: MA Experiment 108577 PARAMETER Experiment Name: At_42deg_Heat_cDNA_P Parameter: Tissue Value: Aerial
  misc_feature: MA Experiment ID: 108585 Result: Up-regulated in Transcription
  misc_feature: MA Experiment 108585 PARAMETER Experiment Name: At_5mM_NaNP_cDNA_P Parameter: Timepoint (hr) Value: 6
  misc_feature: MA Experiment 108585 PARAMETER Experiment Name: At_5mM_NaNP_cDNA_P Parameter: Tissue Value: Aerial
  misc_feature: MA Experiment 108585 PARAMETER Experiment Name: At_5mM_NaNP_cDNA_P Parameter: Treatment Value: null
  misc_feature: MA Experiment ID: 20000093 Result: Up-regulated in Transcription
  misc_feature: MA Experiment 20000093 PARAMETER Experiment Name: At_42deg_Heat_cDNA_P Parameter: Temperature (deg C) Value: 42 vs. 22
  misc_feature: MA Experiment 20000093 PARAMETER Experiment Name: At_42deg_Heat_cDNA_P Parameter: Timepoint (hr) Value: 0.5
  misc_feature: MA Experiment 20000093 PARAMETER Experiment Name: At_42deg_Heat_cDNA_P Parameter: Tissue Value: Aerial
  misc_feature: MA Experiment ID: 20000112 Result: Up-regulated in Transcription
  misc_feature: MA Experiment 20000112 PARAMETER Experiment Name: At_42deg_Heat_cDNA_P Parameter: Temperature (deg C) Value: 42 vs. 22
  misc_feature: MA Experiment 20000112 PARAMETER Experiment Name: At_42deg_Heat_cDNA_P Parameter: Timepoint (hr) Value: 2
  misc_feature: MA Experiment 20000112 PARAMETER Experiment Name: At_42deg_Heat_cDNA_P Parameter: Tissue Value: Aerial
  misc_feature: MA Experiment ID: 20000794 Result: Up-regulated in Transcription
  misc_feature: MA Experiment 20000794 PARAMETER Experiment Name: At_Petals_P Parameter: Age (day) Value: 23-25 days
  misc_feature: MA Experiment 20000794 PARAMETER Experiment Name: At_Petals_P Parameter: Plant Line Value: WS
  misc_feature: MA Experiment 20000794 PARAMETER Experiment Name: At_Petals_P Parameter: Tissue Value: Petals vs. Whole plant
  misc_feature: MA Experiment ID: 20001560 Result: Down-regulated in Transcription
  misc_feature: MA Experiment 20001560 PARAMETER Experiment Name: At_Drought_Soil_Dry_P Parameter: Age (day) Value: 28
  misc_feature: MA Experiment 20001560 PARAMETER Experiment Name: At_Drought_Soil_Dry_P Parameter: Organism Value: A. thaliana
  misc_feature: MA Experiment 20001560 PARAMETER Experiment Name: At_Drought_Soil_Dry_P Parameter: Plant Line Value: WS
  misc_feature: MA Experiment 20001560 PARAMETER Experiment Name: At_Drought_Soil_Dry_P Parameter: Post Timepoint (hr) Value: None
  misc_feature: MA Experiment 20001560 PARAMETER Experiment Name: At_Drought_Soil_Dry_P Parameter: Post-Treatment Value: None
  misc_feature: MA Experiment 20001560 PARAMETER Experiment Name: At_Drought_Soil_Dry_P Parameter: Timepoint (day) Value: 14
  misc_feature: MA Experiment 20001560 PARAMETER Experiment Name: At_Drought_Soil_Dry_P Parameter: Treatment Value: Drought vs. No Drought
  misc_feature: MA Experiment ID: 20001905 Result: Up-regulated in Transcription
  misc_feature: MA Experiment 20001905 PARAMETER Experiment Name: At_Drought_Reproduction_P Parameter: Age (day) Value: 40
  misc_feature: MA Experiment 20001905 PARAMETER Experiment Name: At_Drought_Reproduction_P Parameter: Organism Value: A. thaliana
  misc_feature: MA Experiment 20001905 PARAMETER Experiment Name: At_Drought_Reproduction_P Parameter: Plant Line Value: WS
  misc_feature: MA Experiment 20001905 PARAMETER Experiment Name: At_Drought_Reproduction_P Parameter: Timepoint (day) Value: 10
  misc_feature: MA Experiment 20001905 PARAMETER Experiment Name: At_Drought_Reproduction_P Parameter: Tissue Value: Rosettes
  misc_feature: MA Experiment 20001905 PARAMETER Experiment Name: At_Drought_Reproduction_P Parameter: Treatment Value: Drought vs. No Drought
aatttttagtctccctccgcgtagaagcttctccgagacttgtctctgctttgattgaagaagacgcttgatcgaaaattcccttagatttcgtaaatagggttttacagaaggtgagattacacagagatcggatttgcgaaaaaaaaaaatgggaagtccaaagaagaacgagaacaaaggcttcttcgccgccatgacttctggcttctccatgttcggtaccgccgtgtcgagatccgttaacggcgtgcaaggtaatgaaggagttgaggtcataaatccagaaggtggcaaggaagatgctgaagaggaagctcagaaaggaaggtggaaggacgaggaacgagatagttactggaagatgatgcagaaatatataggttcggatattacgtcaatggtgactcttcctgttgttatatttgagcctatgactatgctccagaagatggctgagataatggagtattctcatttgttggatcaagcagatgaatgcgaagatccatacttgcgtttagtatatgcttcatcatgggctatatctgtttactatgccttccaacgaacttggaagcctttcaatcctattcttggggagacatatgagatggtcaaccatggtgggatttcttttatttctgagcaggttagccatcatccaccaatgagtgctggtcatgccgagaacgagcacttcatttacgacatcacatcaaagttgaaaactaaacttttgggtaactctgttgatgtttaccctgtgggaagaacgcgtgtaaccctcaagaaagatggtgtggttctggatttggtgccgcctctcactaagattcacaatctaatatttggacgaacctgggttgactcacctggggaaatggtcatgacaaatttaaccactggagacaaagttgtgctttatttccagccatgtggctggttcggttctggccgctatgaagttgatggctacgtttacagcgcagctgaagaaccgaaaatcatgatgacaggaaaatggaatgagaaaatgagctaccaaccttgtgatgccgaaggggaaccccttccaggaacagagctgaaagaggtgtggcatttggctgatgtccccaaaaacgacaactttcagtacactcactttgctcacaagataaacagcttcgacacagcgcctgctaagctcttggcttcagactcacgtatccgtcctgatagatattcccttgagcagggtgacctttctaaagctggttccgagaaacacagccttgaggagagacaaagggccgaaaagaggaccagagagacaaagggacaaaagttcactccaagatggttcgatctaacggatgagatcacacctactccatggggagatattgaagtataccaatacaacgggaagtacaatgaacaccgagacacggcagagagctcaagtagtgcctccaacgaaacggacctcaaatcgatcgagtttaatccttggcaatatggtaatatctcaaccgaatgaagtaactcttatagtttaatttgttatctctatatacgaatgctgtgattcatgttcacttgaaagtgagtcccatgttgtttttaactttgtttcagactgaaaaatctgattatgtagtttgagtgataaaacataagttttgtgtttctgtctcattgtatctttgttccatttcgatcaatagtaattatgtttgt

SEQ ID NO: 21784 - protein, 457 aa, Arabidopsis thaliana
  peptide (1)..(457): Ceres Seq. ID no. 12371080
  misc_feature (37)..(428): Pfam Name: Oxysterol-binding protein Pfam Description: Oxysterol-binding protein
  misc_feature (282)..(422): Homolog of NCBI NO: 17529997 NR Description: oxysterol-binding protein-like protein OSBPL1A
  misc_feature (68)..(294): Homolog of NCBI NO: 17529997 NR Description: oxysterol-binding protein-like protein OSBPL1A
  misc_feature (308)..(399): Homolog of NCBI NO: 27469640 NR Description: Similar to oxysterol binding protein-like 2
  misc_feature (68)..(327): Homolog of NCBI NO: 27469640 NR Description: Similar to oxysterol binding protein-like 2
  misc_feature (77)..(294): Homolog of NCBI NO: 38639321 NR Description: putative oxysterol-binding protein [Solanum
  misc_feature (11)..(451): Homolog of NCBI NO: 38639323 NR Description: oxysterol-binding protein [Solanum tuberosum]
  misc_feature (1)..(455): Homolog of NCBI NO: 15241681 NR Description: putative protein
  misc_feature (4)..(456): Homolog of NCBI NO: 15232633 NR Description: putative oxysterol-binding protein
  misc_feature (1)..(457): Homolog of NCBI NO: 8885548 NR Description: oxysterol-binding protein [Arabidopsis thaliana]
  misc_feature (1)..(457): Homolog of NCBI NO: 15238398 NR Description: oxysterol-binding protein - like
MGSPKKNENKGFFAAMTSGFSMFGTAVSRSVNGVQGNEGVEVINPEGGKEDAEEEAQKGRWKDEERDSYWKMMQKYIGSDITSMVTLPVVIFEPMTMLQKMAEIMEYSHLLDQADECEDPYLRLVYASSWAISVYYAFQRTWKPFNPILGETYEMVNHGGISFISEQVSHHPPMSAGHAENEHFIYDITSKLKTKLLGNSVDVYPVGRTRVTLKKDGVVLDLVPPLTKIHNLIFGRTWVDSPGEMVMTNLTTGDKVVLYFQPCGWFGSGRYEVDGYVYSAAEEPKIMMTGKWNEKMSYQPCDAEGEPLPGTELKEVWHLADVPKNDNFQYTHFAHKINSFDTAPAKLLASDSRIRPDRYSLEQGDLSKAGSEKHSLEERQRAEKRTRETKGQKFTPRWFDLTDEITPTPWGDIEVYQYNGKYNEHRDTAESSSSASNETDLKSIEFNPWQYGNISTE

SEQ ID NO: 21785 - protein, 442 aa, Arabidopsis thaliana
  peptide (1)..(442): Ceres Seq. ID no. 12371081
  misc_feature (22)..(413): Pfam Name: Oxysterol-binding protein Pfam Description: Oxysterol-binding protein
  misc_feature (267)..(407): Homolog of NCBI NO: 17529997 NR Description: oxysterol-binding protein-like protein OSBPL1A
  misc_feature (53)..(279): Homolog of NCBI NO: 17529997 NR Description: oxysterol-binding protein-like protein OSBPL1A
  misc_feature (293)..(384): Homolog of NCBI NO: 27469640 NR Description: Similar to oxysterol binding protein-like 2
  misc_feature (53)..(312): Homolog of NCBI NO: 27469640 NR Description: Similar to oxysterol binding protein-like 2
  misc_feature (62)..(279): Homolog of NCBI NO: 38639321 NR Description: putative oxysterol-binding protein [Solanum
  misc_feature (1)..(436): Homolog of NCBI NO: 38639323 NR Description: oxysterol-binding protein [Solanum tuberosum]
  misc_feature (1)..(440): Homolog of NCBI NO: 15241681 NR Description: putative protein
  misc_feature (1)..(441): Homolog of NCBI NO: 15232633 NR Description: putative oxysterol-binding protein
  misc_feature (1)..(442): Homolog of NCBI NO: 8885548 NR Description: oxysterol-binding protein [Arabidopsis thaliana]
  misc_feature (1)..(442): Homolog of NCBI NO: 15238398 NR Description: oxysterol-binding protein - like
MTSGFSMFGTAVSRSVNGVQGNEGVEVINPEGGKEDAEEEAQKGRWKDEERDSYWKMMQKYIGSDITSMVTLPVVIFEPMTMLQKMAEIMEYSHLLDQADECEDPYLRLVYASSWAISVYYAFQRTWKPFNPILGETYEMVNHGGISFISEQVSHHPPMSAGHAENEHFIYDITSKLKTKLLGNSVDVYPVGRTRVTLKKDGVVLDLVPPLTKIHNLIFGRTWVDSPGEMVMTNLTTGDKVVLYFQPCGWFGSGRYEVDGYVYSAAEEPKIMMTGKWNEKMSYQPCDAEGEPLPGTELKEVWHLADVPKNDNFQYTHFAHKINSFDTAPAKLLASDSRIRPDRYSLEQGDLSKAGSEKHSLEERQRAEKRTRETKGQKFTPRWFDLTDEITPTPWGDIEVYQYNGKYNEHRDTAESSSSASNETDLKSIEFNPWQYGNISTE

SEQ ID NO: 21786 - protein, 436 aa, Arabidopsis thaliana
  peptide (1)..(436): Ceres Seq. ID no. 12371082
  misc_feature (16)..(407): Pfam Name: Oxysterol-binding protein Pfam Description: Oxysterol-binding protein
  misc_feature (261)..(401): Homolog of NCBI NO: 17529997 NR Description: oxysterol-binding protein-like protein OSBPL1A
  misc_feature (47)..(273): Homolog of NCBI NO: 17529997 NR Description: oxysterol-binding protein-like protein OSBPL1A
  misc_feature (287)..(378): Homolog of NCBI NO: 27469640 NR Description: Similar to oxysterol binding protein-like 2
  misc_feature (47)..(306): Homolog of NCBI NO: 27469640 NR Description: Similar to oxysterol binding protein-like 2
  misc_feature (56)..(273): Homolog of NCBI NO: 38639321 NR Description: putative oxysterol-binding protein [Solanum
  misc_feature (1)..(430): Homolog of NCBI NO: 38639323 NR Description: oxysterol-binding protein [Solanum tuberosum]
  misc_feature (1)..(434): Homolog of NCBI NO: 15241681 NR Description: putative protein
  misc_feature (1)..(435): Homolog of NCBI NO: 15232633 NR Description: putative oxysterol-binding protein
  misc_feature (1)..(436): Homolog of NCBI NO: 8885548 NR Description: oxysterol-binding protein [Arabidopsis thaliana]
  misc_feature (1)..(436): Homolog of NCBI NO: 15238398 NR Description: oxysterol-binding protein - like
MFGTAVSRSVNGVQGNEGVEVINPEGGKEDAEEEAQKGRWKDEERDSYWKMMQKYIGSDITSMVTLPVVIFEPMTMLQKMAEIMEYSHLLDQADECEDPYLRLVYASSWAISVYYAFQRTWKPFNPILGETYEMVNHGGISFISEQVSHHPPMSAGHAENEHFIYDITSKLKTKLLGNSVDVYPVGRTRVTLKKDGVVLDLVPPLTKIHNLIFGRTWVDSPGEMVMTNLTTGDKVVLYFQPCGWFGSGRYEVDGYVYSAAEEPKIMMTGKWNEKMSYQPCDAEGEPLPGTELKEVWHLADVPKNDNFQYTHFAHKINSFDTAPAKLLASDSRIRPDRYSLEQGDLSKAGSEKHSLEERQRAEKRTRETKGQKFTPRWFDLTDEITPTPWGDIEVYQYNGKYNEHRDTAESSSSASNETDLKSIEFNPWQYGNISTE

SEQ ID NO: 21787 - DNA, 1890 bp, Arabidopsis thaliana
  misc_feature (1)..(1890): Ceres Seq. ID no. 12324805
  misc_feature: MA Experiment ID: 108461 Result: Down-regulated in Transcription
  misc_feature: MA Experiment 108461 PARAMETER Experiment Name: At_Germinating_Seeds_cDNA_P Parameter: Age (day) Value: 1 vs. 0
  misc_feature: MA Experiment 108461 PARAMETER Experiment Name: At_Germinating_Seeds_cDNA_P Parameter: Tissue Value: Germinating Seeds
  misc_feature: MA Experiment ID: 108488 Result: Down-regulated in Transcription
  misc_feature: MA Experiment ID: 108569 Result: Up-regulated in Transcription
  misc_feature: MA Experiment 108569 PARAMETER Experiment Name: At_0.001%_MeJA__cDNA_P Parameter: Timepoint (hr) Value: 6
  misc_feature: MA Experiment 108569 PARAMETER Experiment Name: At_0.001%_MeJA__cDNA_P Parameter: Tissue Value: Aerial
  misc_feature: MA Experiment 108569 PARAMETER Experiment Name: At_0.001%_MeJA__cDNA_P Parameter: Treatment Value: 0.001% MeJA vs. No Treatment
  misc_feature: MA Experiment ID: 108573 Result: Up-regulated in Transcription
  misc_feature: MA Experiment 108573 PARAMETER Experiment Name: At_Drought_cDNA_P Parameter: Timepoint (hr) Value: 6
  misc_feature: MA Experiment 108573 PARAMETER Experiment Name: At_Drought_cDNA_P Parameter: Tissue Value: Aerial
  misc_feature: MA Experiment 108573 PARAMETER Experiment Name: At_Drought_cDNA_P Parameter: Treatment Value: Drought vs. No Drought
  misc_feature: MA Experiment ID: 108585 Result: Up-regulated in Transcription
  misc_feature: MA Experiment 108585 PARAMETER Experiment Name: At_5mM_NaNP_cDNA_P Parameter: Timepoint (hr) Value: 6
  misc_feature: MA Experiment 108585 PARAMETER Experiment Name: At_5mM_NaNP_cDNA_P Parameter: Tissue Value: Aerial
  misc_feature: MA Experiment 108585 PARAMETER Experiment Name: At_5mM_NaNP_cDNA_P Parameter: Treatment Value: null
  misc_feature: MA Experiment ID: 108594 Result: Down-regulated in Transcription
  misc_feature: MA Experiment 108594 PARAMETER Experiment Name: At_Ler-rhl_Root_cDNA_P Parameter: Plant Line Value: null
  misc_feature: MA Experiment ID: 20000069 Result: Up-regulated in Transcription
  misc_feature: MA Experiment 20000069 PARAMETER Experiment Name: At_100uM_ABA_Mutants_cDNA_P Parameter: Plant Line Value: CS23
  misc_feature: MA Experiment 20000069 PARAMETER Experiment Name: At_100uM_ABA_Mutants_cDNA_P Parameter: Timepoint (hr) Value: 6
  misc_feature: MA Experiment 20000069 PARAMETER Experiment Name: At_100uM_ABA_Mutants_cDNA_P Parameter: Tissue Value: Aerial
  misc_feature: MA Experiment 20000069 PARAMETER Experiment Name: At_100uM_ABA_Mutants_cDNA_P Parameter: Treatment Value: 100uM ABA vs. No Treatment
  misc_feature: MA Experiment ID: 20000070 Result: Up-regulated in Transcription
  misc_feature: MA Experiment 20000070 PARAMETER Experiment Name: At_100uM_ABA_Mutants_cDNA_P Parameter: Plant Line Value: CS24
  misc_feature: MA Experiment 20000070 PARAMETER Experiment Name: At_100uM_ABA_Mutants_cDNA_P Parameter: Timepoint (hr) Value: 6
  misc_feature: MA Experiment 20000070 PARAMETER Experiment Name: At_100uM_ABA_Mutants_cDNA_P Parameter: Tissue Value: Aerial
  misc_feature: MA Experiment 20000070 PARAMETER Experiment Name: At_100uM_ABA_Mutants_cDNA_P Parameter: Treatment Value: 100uM ABA vs. No Treatment
  misc_feature: MA Experiment ID: 20000071 Result: Up-regulated in Transcription
  misc_feature: MA Experiment 20000071 PARAMETER Experiment Name: At_100uM_ABA_Mutants_cDNA_P Parameter: Plant Line Value: CS8104
  misc_feature: MA Experiment 20000071 PARAMETER Experiment Name: At_100uM_ABA_Mutants_cDNA_P Parameter: Timepoint (hr) Value: 6
  misc_feature: MA Experiment 20000071 PARAMETER Experiment Name: At_100uM_ABA_Mutants_cDNA_P Parameter: Tissue Value: Aerial
  misc_feature: MA Experiment 20000071 PARAMETER Experiment Name: At_100uM_ABA_Mutants_cDNA_P Parameter: Treatment Value: 100uM ABA vs. No Treatment
  misc_feature: MA Experiment ID: 20000072 Result: Up-regulated in Transcription
  misc_feature: MA Experiment 20000072 PARAMETER Experiment Name: At_100uM_ABA_Mutants_cDNA_P Parameter: Plant Line Value: CS8105
  misc_feature: MA Experiment 20000072 PARAMETER Experiment Name: At_100uM_ABA_Mutants_cDNA_P Parameter: Timepoint (hr) Value: 6
  misc_feature: MA Experiment 20000072 PARAMETER Experiment Name: At_100uM_ABA_Mutants_cDNA_P Parameter: Tissue Value: Aerial
  misc_feature: MA Experiment 20000072 PARAMETER Experiment Name: At_100uM_ABA_Mutants_cDNA_P Parameter: Treatment Value: 100uM ABA vs. No Treatment
  misc_feature: MA Experiment ID: 20000086 Result: Up-regulated in Transcription
  misc_feature: MA Experiment 20000086 PARAMETER Experiment Name: At_100uM_ABA_Mutants_cDNA_P Parameter: Plant Line Value: CS22
  misc_feature: MA Experiment 20000086 PARAMETER Experiment Name: At_100uM_ABA_Mutants_cDNA_P Parameter: Timepoint (hr) Value: 6
  misc_feature: MA Experiment 20000086 PARAMETER Experiment Name: At_100uM_ABA_Mutants_cDNA_P Parameter: Tissue Value: Aerial
  misc_feature: MA Experiment 20000086 PARAMETER Experiment Name: At_100uM_ABA_Mutants_cDNA_P Parameter: Treatment Value: 100uM ABA vs. No Treatment
  misc_feature: MA Experiment ID: 20000088 Result: Up-regulated in Transcription
  misc_feature: MA Experiment 20000088 PARAMETER Experiment Name: At_100uM_ABA_Mutants_cDNA_P Parameter: Plant Line Value: Landsberg
  misc_feature: MA Experiment 20000088 PARAMETER Experiment Name: At_100uM_ABA_Mutants_cDNA_P Parameter: Timepoint (hr) Value: 6
  misc_feature: MA Experiment 20000088 PARAMETER Experiment Name: At_100uM_ABA_Mutants_cDNA_P Parameter: Tissue Value: Aerial
  misc_feature: MA Experiment 20000088 PARAMETER Experiment Name: At_100uM_ABA_Mutants_cDNA_P Parameter: Treatment Value: 100uM ABA vs. No Treatment
  misc_feature: MA Experiment ID: 20000117 Result: Up-regulated in Transcription
  misc_feature: MA Experiment 20000117 PARAMETER Experiment Name: At_100uM_ABA_Mutants_cDNA_P Parameter: Plant Line Value: Columbia
  misc_feature: MA Experiment 20000117 PARAMETER Experiment Name: At_100uM_ABA_Mutants_cDNA_P Parameter: Timepoint (hr) Value: 6
  misc_feature: MA Experiment 20000117 PARAMETER Experiment Name: At_100uM_ABA_Mutants_cDNA_P Parameter: Tissue Value: Aerial
  misc_feature: MA Experiment 20000117 PARAMETER Experiment Name: At_100uM_ABA_Mutants_cDNA_P Parameter: Treatment Value: 100uM ABA vs. No Treatment
  misc_feature: MA Experiment ID: 20000179 Result: Down-regulated in Transcription
  misc_feature: MA Experiment 20000179 PARAMETER Experiment Name: At_Germinating_Seeds_P Parameter: Age (hr) Value: 6 vs. 0
  misc_feature: MA Experiment 20000179 PARAMETER Experiment Name: At_Germinating_Seeds_P Parameter: Tissue Value: Germinating Seeds
  misc_feature: MA Experiment ID: 20000180 Result: Down-regulated in Transcription
  misc_feature: MA Experiment 20000180 PARAMETER Experiment Name: At_Germinating_Seeds_P Parameter: Age (hr) Value: 24 vs. 0
  misc_feature: MA Experiment 20000180 PARAMETER Experiment Name: At_Germinating_Seeds_P Parameter: Tissue Value: Germinating Seeds
  misc_feature: MA Experiment ID: 20000185 Result: Up-regulated in Transcription
  misc_feature: MA Experiment 20000185 PARAMETER Experiment Name: At_Roots__P Parameter: Age (day) Value: 7 vs. 21
  misc_feature: MA Experiment 20000185 PARAMETER Experiment Name: At_Roots__P Parameter: Organism Value: A. thaliana
  misc_feature: MA Experiment 20000185 PARAMETER Experiment Name: At_Roots__P Parameter: Tissue Value: Roots vs. Whole Plant
  misc_feature: MA Experiment ID: 20000794 Result: Up-regulated in Transcription
  misc_feature: MA Experiment 20000794 PARAMETER Experiment Name: At_Petals_P Parameter: Age (day) Value: 23-25 days
  misc_feature: MA Experiment 20000794 PARAMETER Experiment Name: At_Petals_P Parameter: Plant Line Value: WS
  misc_feature: MA Experiment 20000794 PARAMETER Experiment Name: At_Petals_P Parameter: Tissue Value: Petals vs. Whole plant
aaactcataaatctctcattctttctcagattctctctctctgttttccttgttctccaagccagatctctctccataaatctctcttcatctctctctttccaccaaacatccgcgatcctcgattctcaattccgtgtctgttttttttcttcacttagcgatggcgatgatagagcaaaggccgaagacgaagatcgtttgtactctaggtccagcttccagatctgttccgatggtcgagaagcttcttagggctggtatgaacgttgctcgtttcaatttctctcatggatctcatgaataccatcaagagactctcgataatcttcatcaagctatgcttaacactgggattctctgtgccgtcatgctcgacaccaagggtccagaaatccgaaccgggttcttgaaagatgggaaaccaatccagctgaaacaaggacaagagatcactatttcgactgactatgacttgaagggtgacgagaacacgatttgcatgagctacaaaaagttggctgttgatgtgaacccaggaatggtcattctttgtgctgatggtacaatctccttactggttctctcttgtgacaaagagaacggtacagtccgttgccggtgtgagaactctgcgatgctcggtgagagaaagaacgttaatctcccaggtgttgttgtggatctcccaactctaactgagaaagacaaagaagacatcatgcaatggggagtcccgaatcaaatcgacatgattgctctgtcttttgtcaggaaaggttcagacttggttcaagtccggaaacttctaggaaagcacgccaaaaacattcttctcatgtctaaggtcgagaaccaagaaggtgtggcaaattttgatgacattttggtcaattcagacgctttcatgattgctagaggagatctgggcatggaaatcccgattgagaagatcttcttagctcagaaggtgatgatctacaaatgcaacatccagggaaaacctgtggtcacagcaactcagatgctcgagtccatgatcaaatctcctagacccacaagagccgaagctacggatgtagcaaacgcagtccttgatggtacagactgtgtcatgctcagtggtgaaactgcagctggagcataccctgaactagccgtccgtacaatggctaagatctgcgtggaagccgagagcacccttgactacggtgatgtcttcaagaggatcatgctgtactctccagttccaatgagtccactcgagtcacttgcatcttcagctgtcagaactgctaactcagctagagccactctcatcatggtcctaaccagaggaggaagcacagcaagacttgtggctaagtacagaccaggaatgcctattctatccgtcgttgttcctgagatcaaaaccgacttctttgactggtcttgcagcgatgaatcccccgcgagacacagccttatcttccgtggtctgatcccagtgctctacgctggatccgcaagagcctcacacgatgaatcaacagaagaagctatcgagtttgctactcagtacgggaaagagaaagagctatgcaagactggagattccgttgttgctctactccgagtcggtaatgcttccgtgatcaagatcttgaccgtcaagtgatgattccactcaaaaattcacgtttttggcgtttggggaacgctactttaaacgttttattatgaaactattcaagattgtgattaaaatcttgagatagaaaactcaagttctattttttgcttattaccacaactactgtgaccggtgaatccacttaacagctccttttgggatattttggttgtattgaaacctattggatcattcatacacgtatcaattatcat

SEQ ID NO: 21788 - protein, 498 aa, Arabidopsis thaliana
  peptide (1)..(498): Ceres Seq. ID no. 12324806
  misc_feature (367)..(498): Pfam Name: Pyruvate kinase, alpha/beta domain Pfam Description: Pyruvate kinase, alpha/beta domain
  misc_feature (6)..(498): Homolog of NCBI NO: 2497543 NR Description: Pyruvate kinase, cytosolic isozyme
  misc_feature (1)..(498): Homolog of NCBI NO: 15236190 NR Description: pyruvate kinase like protein; protein id:
  misc_feature (8)..(498): Homolog of NCBI NO: 15242863 NR Description: pyruvate kinase; protein id: At5g63680.1
  misc_feature (8)..(498): Homolog of NCBI NO: 15242313 NR Description: pyruvate kinase; protein id: At5g08570.1
  misc_feature (8)..(498): Homolog of NCBI NO: 2497538 NR Description: Pyruvate kinase, cytosolic isozyme
  misc_feature (1)..(498): Homolog of NCBI NO: 15241190 NR Description: pyruvate kinase
MAMIEQRPKTKIVCTLGPASRSVPMVEKLLRAGMNVARFNFSHGSHEYHQETLDNLHQAMLNTGILCAVMLDTKGPEIRTGFLKDGKPIQLKQGQEITISTDYDLKGDENTICMSYKKLAVDVNPGMVILCADGTISLLVLSCDKENGTVRCRCENSAMLGERKNVNLPGVVVDLPTLTEKDKEDIMQWGVPNQIDMIALSFVRKGSDLVQVRKLLGKHAKNILLMSKVENQEGVANFDDILVNSDAFMIARGDLGMEIPIEKIFLAQKVMIYKCNIQGKPVVTATQMLESMIKSPRPTRAEATDVANAVLDGTDCVMLSGETAAGAYPELAVRTMAKICVEAESTLDYGDVFKRIMLYSPVPMSPLESLASSAVRTANSARATLIMVLTRGGSTARLVAKYRPGMPILSVVVPEIKTDFFDWSCSDESPARHSLIFRGLIPVLYAGSARASHDESTEEAIEFATQYGKEKELCKTGDSVVALLRVGNASVIKILTVK

SEQ ID NO: 21789 - protein, 496 aa, Arabidopsis thaliana
  peptide (1)..(496): Ceres Seq. ID no. 12324807
  misc_feature (365)..(496): Pfam Name: Pyruvate kinase, alpha/beta domain Pfam Description: Pyruvate kinase, alpha/beta domain
  misc_feature (6)..(496): Homolog of NCBI NO: 2497538 NR Description: Pyruvate kinase, cytosolic isozyme
  misc_feature (6)..(496): Homolog of NCBI NO: 15242863 NR Description: pyruvate kinase; protein id: At5g63680.1
  misc_feature (6)..(496): Homolog of NCBI NO: 15242313 NR Description: pyruvate kinase; protein id: At5g08570.1
  misc_feature (4)..(496): Homolog of NCBI NO: 2497543 NR Description: Pyruvate kinase, cytosolic isozyme
  misc_feature (1)..(496): Homolog of NCBI NO: 15236190 NR Description: pyruvate kinase like protein; protein id:
  misc_feature (1)..(496): Homolog of NCBI NO: 15241190 NR Description: pyruvate kinase
MIEQRPKTKIVCTLGPASRSVPMVEKLLRAGMNVARFNFSHGSHEYHQETLDNLHQAMLNTGILCAVMLDTKGPEIRTGFLKDGKPIQLKQGQEITISTDYDLKGDENTICMSYKKLAVDVNPGMVILCADGTISLLVLSCDKENGTVRCRCENSAMLGERKNVNLPGVVVDLPTLTEKDKEDIMQWGVPNQIDMIALSFVRKGSDLVQVRKLLGKHAKNILLMSKVENQEGVANFDDILVNSDAFMIARGDLGMEIPIEKIFLAQKVMIYKCNIQGKPVVTATQMLESMIKSPRPTRAEATDVANAVLDGTDCVMLSGETAAGAYPELAVRTMAKICVEAESTLDYGDVFKRIMLYSPVPMSPLESLASSAVRTANSARATLIMVLTRGGSTARLVAKYRPGMPILSVVVPEIKTDFFDWSCSDESPARHSLIFRGLIPVLYAGSARASHDESTEEAIEFATQYGKEKELCKTGDSVVALLRVGNASVIKILTVK

SEQ ID NO: 21790 - protein, 474 aa, Arabidopsis thaliana
  peptide (1)..(474): Ceres Seq. ID no. 12324808
  misc_feature (343)..(474): Pfam Name: Pyruvate kinase, alpha/beta domain Pfam Description: Pyruvate kinase, alpha/beta domain
  misc_feature (1)..(474): Homolog of NCBI NO: 2497538 NR Description: Pyruvate kinase, cytosolic isozyme
  misc_feature (1)..(474): Homolog of NCBI NO: 15242863 NR Description: pyruvate kinase; protein id: At5g63680.1
  misc_feature (1)..(474): Homolog of NCBI NO: 15242313 NR Description: pyruvate kinase; protein id: At5g08570.1
  misc_feature (1)..(474): Homolog of NCBI NO: 2497543 NR Description: Pyruvate kinase, cytosolic isozyme
  misc_feature (1)..(474): Homolog of NCBI NO: 15236190 NR Description: pyruvate kinase like protein; protein id:
  misc_feature (1)..(474): Homolog of NCBI NO: 15241190 NR Description: pyruvate kinase
MVEKLLRAGMNVARFNFSHGSHEYHQETLDNLHQAMLNTGILCAVMLDTKGPEIRTGFLKDGKPIQLKQGQEITISTDYDLKGDENTICMSYKKLAVDVNPGMVILCADGTISLLVLSCDKENGTVRCRCENSAMLGERKNVNLPGVVVDLPTLTEKDKEDIMQWGVPNQIDMIALSFVRKGSDLVQVRKLLGKHAKNILLMSKVENQEGVANFDDILVNSDAFMIARGDLGMEIPIEKIFLAQKVMIYKCNIQGKPVVTATQMLESMIKSPRPTRAEATDVANAVLDGTDCVMLSGETAAGAYPELAVRTMAKICVEAESTLDYGDVFKRIMLYSPVPMSPLESLASSAVRTANSARATLIMVLTRGGSTARLVAKYRPGMPILSVVVPEIKTDFFDWSCSDESPARHSLIFRGLIPVLYAGSARASHDESTEEAIEFATQYGKEKELCKTGDSVVALLRVGNASVIKILTVK

SEQ ID NO: 21791 - DNA, 2067 bp, Arabidopsis thaliana
  misc_feature (1)..(2067): Ceres Seq. ID no. 12678932
  misc_feature: MA Experiment ID: 108576 Result: Down-regulated in Transcription
  misc_feature: MA Experiment 108576 PARAMETER Experiment Name: At_42deg_Heat_cDNA_P Parameter: Temperature (deg C) Value: 42 vs. 22
  misc_feature: MA Experiment 108576 PARAMETER Experiment Name: At_42deg_Heat_cDNA_P Parameter: Timepoint (hr) Value: 1
  misc_feature: MA Experiment 108576 PARAMETER Experiment Name: At_42deg_Heat_cDNA_P Parameter: Tissue Value: Aerial
  misc_feature: MA Experiment ID: 108577 Result: Down-regulated in Transcription
  misc_feature: MA Experiment 108577 PARAMETER Experiment Name: At_42deg_Heat_cDNA_P Parameter: Temperature (deg C) Value: 42 vs. 22
  misc_feature: MA Experiment 108577 PARAMETER Experiment Name: At_42deg_Heat_cDNA_P Parameter: Timepoint (hr) Value: 6
  misc_feature: MA Experiment 108577 PARAMETER Experiment Name: At_42deg_Heat_cDNA_P Parameter: Tissue Value: Aerial
  misc_feature: MA Experiment ID: 108579 Result: Down-regulated in Transcription
  misc_feature: MA Experiment 108579 PARAMETER Experiment Name: At_4deg_Cold_cDNA_P Parameter: Temperature (deg C) Value: 4 vs. 22
  misc_feature: MA Experiment 108579 PARAMETER Experiment Name: At_4deg_Cold_cDNA_P Parameter: Timepoint (hr) Value: 6
  misc_feature: MA Experiment 108579 PARAMETER Experiment Name: At_4deg_Cold_cDNA_P Parameter: Tissue Value: Aerial
  misc_feature: MA Experiment ID: 108595 Result: Down-regulated in Transcription
  misc_feature: MA Experiment 108595 PARAMETER Experiment Name: At_Ler-pi_Ovule_cDNA_P Parameter: Plant Line Value: null
  misc_feature: MA Experiment ID: 108607 Result: Down-regulated in Transcription
  misc_feature: MA Experiment 108607 PARAMETER Experiment Name: At_100uM_ABA_cDNA_P Parameter: Timepoint (hr) Value: 4
  misc_feature: MA Experiment 108607 PARAMETER Experiment Name: At_100uM_ABA_cDNA_P Parameter: Tissue Value: Aerial
  misc_feature: MA Experiment 108607 PARAMETER Experiment Name: At_100uM_ABA_cDNA_P Parameter: Treatment Value: 100uM ABA vs. No Treatment
  misc_feature: MA Experiment ID: 20000069 Result: Down-regulated in Transcription
  misc_feature: MA Experiment 20000069 PARAMETER Experiment Name: At_100uM_ABA_Mutants_cDNA_P Parameter: Plant Line Value: CS23
  misc_feature: MA Experiment 20000069 PARAMETER Experiment Name: At_100uM_ABA_Mutants_cDNA_P Parameter: Timepoint (hr) Value: 6
  misc_feature: MA Experiment 20000069 PARAMETER Experiment Name: At_100uM_ABA_Mutants_cDNA_P Parameter: Tissue Value: Aerial
  misc_feature: MA Experiment 20000069 PARAMETER Experiment Name: At_100uM_ABA_Mutants_cDNA_P Parameter: Treatment Value: 100uM ABA vs. No Treatment
  misc_feature: MA Experiment ID: 20000113 Result: Down-regulated in Transcription
  misc_feature: MA Experiment 20000113 PARAMETER Experiment Name: At_42deg_Heat_cDNA_P Parameter: Temperature (deg C) Value: 42 vs. 22
  misc_feature: MA Experiment 20000113 PARAMETER Experiment Name: At_42deg_Heat_cDNA_P Parameter: Timepoint (hr) Value: 8
  misc_feature: MA Experiment 20000113 PARAMETER Experiment Name: At_42deg_Heat_cDNA_P Parameter: Tissue Value: Aerial
  misc_feature: MA Experiment ID: 20000171 Result: Down-regulated in Transcription
  misc_feature: MA Experiment 20000171 PARAMETER Experiment Name: At_42deg_Heat_P Parameter: Age (day) Value: 14
  misc_feature: MA Experiment 20000171 PARAMETER Experiment Name: At_42deg_Heat_P Parameter: Organism Value: A. thaliana
  misc_feature: MA Experiment 20000171 PARAMETER Experiment Name: At_42deg_Heat_P Parameter: Plant Line Value: WS
  misc_feature: MA Experiment 20000171 PARAMETER Experiment Name: At_42deg_Heat_P Parameter: Temperature (deg C) Value: 42 vs. 22
  misc_feature: MA Experiment 20000171 PARAMETER Experiment Name: At_42deg_Heat_P Parameter: Timepoint (hr) Value: 1
  misc_feature: MA Experiment 20000171 PARAMETER Experiment Name: At_42deg_Heat_P Parameter: Tissue Value: Aerial
  misc_feature: MA Experiment ID: 20000173 Result: Down-regulated in Transcription
  misc_feature: MA Experiment 20000173 PARAMETER Experiment Name: At_42deg_Heat_P Parameter: Age (day) Value: 14
  misc_feature: MA Experiment 20000173 PARAMETER Experiment Name: At_42deg_Heat_P Parameter: Organism Value: A. thaliana
  misc_feature: MA Experiment 20000173 PARAMETER Experiment Name: At_42deg_Heat_P Parameter: Plant Line Value: WS
  misc_feature: MA Experiment 20000173 PARAMETER Experiment Name: At_42deg_Heat_P Parameter: Temperature (deg C) Value: 42 vs. 22
  misc_feature: MA Experiment 20000173 PARAMETER Experiment Name: At_42deg_Heat_P Parameter: Timepoint (hr) Value: 6
  misc_feature: MA Experiment 20000173 PARAMETER Experiment Name: At_42deg_Heat_P Parameter: Tissue Value: Aerial
  misc_feature: MA Experiment ID: 20000182 Result: Down-regulated in Transcription
  misc_feature: MA Experiment 20000182 PARAMETER Experiment Name: At_2mM_SA_P Parameter: Age (day) Value: 14
  misc_feature: MA Experiment 20000182 PARAMETER Experiment Name: At_2mM_SA_P Parameter: Organism Value: A. thaliana
  misc_feature: MA Experiment 20000182 PARAMETER Experiment Name: At_2mM_SA_P Parameter: Plant Line Value: WS
  misc_feature: MA Experiment 20000182 PARAMETER Experiment Name: At_2mM_SA_P Parameter: Timepoint (hr) Value: 6
  misc_feature: MA Experiment 20000182 PARAMETER Experiment Name: At_2mM_SA_P Parameter: Tissue Value: Aerial
  misc_feature: MA Experiment 20000182 PARAMETER Experiment Name: At_2mM_SA_P Parameter: Treatment Value: 2mM SA vs. No Treatment
  misc_feature: MA Experiment ID: 20000184 Result: Up-regulated in Transcription
  misc_feature: MA Experiment 20000184 PARAMETER Experiment Name: At_Shoots__P Parameter: Age (day) Value: 7
  misc_feature: MA Experiment 20000184 PARAMETER Experiment Name: At_Shoots__P Parameter: Tissue Value: Shoots vs. Whole Plant
  misc_feature: MA Experiment ID: 20000267 Result: Down-regulated in Transcription
  misc_feature: MA Experiment 20000267 PARAMETER Experiment Name: At_Drought_P Parameter: Age (day) Value: 7
  misc_feature: MA Experiment 20000267 PARAMETER Experiment Name: At_Drought_P Parameter: Organism Value: A. thaliana
  misc_feature: MA Experiment 20000267 PARAMETER Experiment Name: At_Drought_P Parameter: Plant Line Value: WS
  misc_feature: MA Experiment 20000267 PARAMETER Experiment Name: At_Drought_P Parameter: Timepoint (hr) Value: 6
  misc_feature: MA Experiment 20000267 PARAMETER Experiment Name: At_Drought_P Parameter: Tissue Value: Whole Plant
  misc_feature: MA Experiment 20000267 PARAMETER Experiment Name: At_Drought_P Parameter: Treatment Value: Drought vs. No Drought
  misc_feature: MA Experiment ID: 20000286 Result: Up-regulated in Transcription
  misc_feature: MA Experiment 20000286 PARAMETER Experiment Name: At_Open_Flower_P Parameter: Age (day) Value: 21
  misc_feature: MA Experiment 20000286 PARAMETER Experiment Name: At_Open_Flower_P Parameter: Plant Line Value: WS
  misc_feature: MA Experiment 20000286 PARAMETER Experiment Name: At_Open_Flower_P Parameter: Tissue Value: Half Open vs. Whole Plant
  misc_feature: MA Experiment ID: 20000308 Result: Down-regulated in Transcription
  misc_feature: MA Experiment 20000308 PARAMETER Experiment Name: At_100mM_NaCl__P Parameter: Age (day) Value: 17
  misc_feature: MA Experiment 20000308 PARAMETER Experiment Name: At_100mM_NaCl__P Parameter: Organism Value: A. thaliana
  misc_feature: MA Experiment 20000308 PARAMETER Experiment Name: At_100mM_NaCl__P Parameter: Plant Line Value: WS
  misc_feature: MA Experiment 20000308 PARAMETER Experiment Name: At_100mM_NaCl__P Parameter: Timepoint (hr) Value: 72
  misc_feature: MA Experiment 20000308 PARAMETER Experiment Name: At_100mM_NaCl__P Parameter: Tissue Value: Whole Plant
  misc_feature: MA Experiment 20000308 PARAMETER Experiment Name: At_100mM_NaCl__P Parameter: Treatment Value: 100mM NaCl vs. No Treatment
  misc_feature: MA Experiment ID: 20000437 Result: Down-regulated in Transcription
  misc_feature: MA Experiment 20000437 PARAMETER Experiment Name: At_Drought_P Parameter: Age (day) Value: 8
  misc_feature: MA Experiment 20000437 PARAMETER Experiment Name: At_Drought_P Parameter: Organism Value: A. thaliana
  misc_feature: MA Experiment 20000437 PARAMETER Experiment Name: At_Drought_P Parameter: Plant Line Value: WS
  misc_feature: MA Experiment 20000437 PARAMETER Experiment Name: At_Drought_P Parameter: Timepoint (hr) Value: 24
  misc_feature: MA Experiment 20000437 PARAMETER Experiment Name: At_Drought_P Parameter: Tissue Value: Whole Plant
  misc_feature: MA Experiment 20000437 PARAMETER Experiment Name: At_Drought_P Parameter: Treatment Value: Drought vs. No Drought
  misc_feature: MA Experiment ID: 20000794 Result: Up-regulated in Transcription
  misc_feature: MA Experiment 20000794 PARAMETER Experiment Name: At_Petals_P Parameter: Age (day) Value: 23-25 days
  misc_feature: MA Experiment 20000794 PARAMETER Experiment Name: At_Petals_P Parameter: Plant Line Value: WS
  misc_feature: MA Experiment 20000794 PARAMETER Experiment Name: At_Petals_P Parameter: Tissue Value: Petals vs. Whole plant
  misc_feature: MA Experiment ID: 20001248 Result: Up-regulated in Transcription
  misc_feature: MA Experiment 20001248 PARAMETER Experiment Name: At_Far-red-induction_P Parameter: Age (day) Value: 7
  misc_feature: MA Experiment 20001248 PARAMETER Experiment Name: At_Far-red-induction_P Parameter: Light Value: Far-red vs. White
  misc_feature: MA Experiment 20001248 PARAMETER Experiment Name: At_Far-red-induction_P Parameter: Organism Value: A. thaliana
  misc_feature: MA Experiment 20001248 PARAMETER Experiment Name: At_Far-red-induction_P Parameter: Plant Line Value: Columbia
  misc_feature: MA Experiment 20001248 PARAMETER Experiment Name: At_Far-red-induction_P Parameter: Timepoint (hr) Value: 4
  misc_feature: MA Experiment 20001248 PARAMETER Experiment Name: At_Far-red-induction_P Parameter: Tissue Value: Whole Plant
  misc_feature: MA Experiment ID: 20001554 Result: Down-regulated in Transcription
  misc_feature: MA Experiment 20001554 PARAMETER Experiment Name: At_Drought_Soil_Dry_P Parameter: Age (day) Value: 21
  misc_feature: MA Experiment 20001554 PARAMETER Experiment Name: At_Drought_Soil_Dry_P Parameter: Organism Value: A. thaliana
  misc_feature: MA Experiment 20001554 PARAMETER Experiment Name: At_Drought_Soil_Dry_P Parameter: Plant Line Value: WS
  misc_feature: MA Experiment 20001554 PARAMETER Experiment Name: At_Drought_Soil_Dry_P Parameter: Post Timepoint (hr) Value: None
  misc_feature: MA Experiment 20001554 PARAMETER Experiment Name: At_Drought_Soil_Dry_P Parameter: Post-Treatment Value: None
  misc_feature: MA Experiment 20001554 PARAMETER Experiment Name: At_Drought_Soil_Dry_P Parameter: Timepoint (day) Value: 7
  misc_feature: MA Experiment 20001554 PARAMETER Experiment Name: At_Drought_Soil_Dry_P Parameter: Treatment Value: Drought vs. No Drought
  misc_feature: MA Experiment ID: 20001555 Result: Down-regulated in Transcription
  misc_feature: MA Experiment 20001555 PARAMETER Experiment Name: At_Drought_Soil_Dry_P Parameter: Age (day) Value: 24
  misc_feature: MA Experiment 20001555 PARAMETER Experiment Name: At_Drought_Soil_Dry_P Parameter: Organism Value: A. thaliana
  misc_feature: MA Experiment 20001555 PARAMETER Experiment Name: At_Drought_Soil_Dry_P Parameter: Plant Line Value: WS
  misc_feature: MA Experiment 20001555 PARAMETER Experiment Name: At_Drought_Soil_Dry_P Parameter: Post Timepoint (hr) Value: None
  misc_feature: MA Experiment 20001555 PARAMETER Experiment Name: At_Drought_Soil_Dry_P Parameter: Post-Treatment Value: None
  misc_feature: MA Experiment 20001555 PARAMETER Experiment Name: At_Drought_Soil_Dry_P Parameter: Timepoint (day) Value: 10
  misc_feature: MA Experiment 20001555 PARAMETER Experiment Name: At_Drought_Soil_Dry_P Parameter: Treatment Value: Drought vs. No Drought
  misc_feature: MA Experiment ID: 20001556 Result: Down-regulated in Transcription
  misc_feature: MA Experiment 20001556 PARAMETER Experiment Name: At_Drought_Soil_Dry_P Parameter: Age (day) Value: 26
  misc_feature: MA Experiment 20001556 PARAMETER Experiment Name: At_Drought_Soil_Dry_P Parameter: Organism Value: A. thaliana
  misc_feature: MA Experiment 20001556 PARAMETER Experiment Name: At_Drought_Soil_Dry_P Parameter: Plant Line Value: WS
  misc_feature: MA Experiment 20001556 PARAMETER Experiment Name: At_Drought_Soil_Dry_P Parameter: Post Timepoint (hr) Value: None
  misc_feature: MA Experiment 20001556 PARAMETER Experiment Name: At_Drought_Soil_Dry_P Parameter: Post-Treatment Value: None
  misc_feature: MA Experiment 20001556 PARAMETER Experiment Name: At_Drought_Soil_Dry_P Parameter: Timepoint (day) Value: 12
  misc_feature: MA Experiment 20001556 PARAMETER Experiment Name: At_Drought_Soil_Dry_P Parameter: Treatment Value: Drought vs. No Drought
  misc_feature: MA Experiment ID: 20001559 Result: Down-regulated in Transcription
  misc_feature: MA Experiment 20001559 PARAMETER Experiment Name: At_Drought_Soil_Dry_P Parameter: Age (day) Value: 28
  misc_feature: MA Experiment 20001559 PARAMETER Experiment Name: At_Drought_Soil_Dry_P Parameter: Organism Value: A. thaliana
  misc_feature: MA Experiment 20001559 PARAMETER Experiment Name: At_Drought_Soil_Dry_P Parameter: Plant Line Value: WS
  misc_feature: MA Experiment 20001559 PARAMETER Experiment Name: At_Drought_Soil_Dry_P Parameter: Post Timepoint (hr) Value: 29
  misc_feature: MA Experiment 20001559 PARAMETER Experiment Name: At_Drought_Soil_Dry_P Parameter: Post-Treatment Value: Re-Water vs. No Drought
  misc_feature: MA Experiment 20001559 PARAMETER Experiment Name: At_Drought_Soil_Dry_P Parameter: Timepoint (day) Value: 14
  misc_feature: MA Experiment 20001559 PARAMETER Experiment Name: At_Drought_Soil_Dry_P Parameter: Treatment Value: Drought vs. No Drought
  misc_feature: MA Experiment ID: 20001904 Result: Down-regulated in Transcription
  misc_feature: MA Experiment 20001904 PARAMETER Experiment Name: At_Drought_Reproduction_P Parameter: Age (day) Value: 37
  misc_feature: MA Experiment 20001904 PARAMETER Experiment Name: At_Drought_Reproduction_P Parameter: Organism Value: A. thaliana
  misc_feature: MA Experiment 20001904 PARAMETER Experiment Name: At_Drought_Reproduction_P Parameter: Plant Line Value: WS
  misc_feature: MA Experiment 20001904 PARAMETER Experiment Name: At_Drought_Reproduction_P Parameter: Timepoint (day) Value: 7
  misc_feature: MA Experiment 20001904 PARAMETER Experiment Name: At_Drought_Reproduction_P Parameter: Tissue Value: Rosettes
  misc_feature: MA Experiment 20001904 PARAMETER Experiment Name: At_Drought_Reproduction_P Parameter: Treatment Value: Drought vs. No Drought
  misc_feature: MA Experiment ID: 20001905 Result: Down-regulated in Transcription
  misc_feature: MA Experiment 20001905 PARAMETER Experiment Name: At_Drought_Reproduction_P Parameter: Age (day) Value: 40
  misc_feature: MA Experiment 20001905 PARAMETER Experiment Name: At_Drought_Reproduction_P Parameter: Organism Value: A. thaliana
  misc_feature: MA Experiment 20001905 PARAMETER Experiment Name: At_Drought_Reproduction_P Parameter: Plant Line Value: WS
  misc_feature: MA Experiment 20001905 PARAMETER Experiment Name: At_Drought_Reproduction_P Parameter: Timepoint (day) Value: 10
  misc_feature: MA Experiment 20001905 PARAMETER Experiment Name: At_Drought_Reproduction_P Parameter: Tissue Value: Rosettes
  misc_feature: MA Experiment 20001905 PARAMETER Experiment Name: At_Drought_Reproduction_P Parameter: Treatment Value: Drought vs. No Drought
  misc_feature: MA Experiment ID: 20001906 Result: Down-regulated in Transcription
  misc_feature: MA Experiment 20001906 PARAMETER Experiment Name: At_Drought_Reproduction_P Parameter: Age (day) Value: 35
  misc_feature: MA Experiment 20001906 PARAMETER Experiment Name: At_Drought_Reproduction_P Parameter: Organism Value: A. thaliana
  misc_feature: MA Experiment 20001906 PARAMETER Experiment Name: At_Drought_Reproduction_P Parameter: Plant Line Value: WS
  misc_feature: MA Experiment 20001906 PARAMETER Experiment Name: At_Drought_Reproduction_P Parameter: Timepoint (day) Value: 5
  misc_feature: MA Experiment 20001906 PARAMETER Experiment Name: At_Drought_Reproduction_P Parameter: Tissue Value: Siliques
  misc_feature: MA Experiment 20001906 PARAMETER Experiment Name: At_Drought_Reproduction_P Parameter: Treatment Value: Drought vs. No Drought
  misc_feature: MA Experiment ID: 20001911 Result: Down-regulated in Transcription
  misc_feature: MA Experiment 20001911 PARAMETER Experiment Name: At_Drought_Reproduction_P Parameter: Age (day) Value: 40
  misc_feature: MA Experiment 20001911 PARAMETER Experiment Name: At_Drought_Reproduction_P Parameter: Organism Value: A. thaliana
  misc_feature: MA Experiment 20001911 PARAMETER Experiment Name: At_Drought_Reproduction_P Parameter: Plant Line Value: WS
  misc_feature: MA Experiment 20001911 PARAMETER Experiment Name: At_Drought_Reproduction_P Parameter: Timepoint (day) Value: 10
  misc_feature: MA Experiment 20001911 PARAMETER Experiment Name: At_Drought_Reproduction_P Parameter: Tissue Value: Flowers
  misc_feature: MA Experiment 20001911 PARAMETER Experiment Name: At_Drought_Reproduction_P Parameter: Treatment Value: Drought vs. No Drought
  misc_feature: Pfam Name: Aa_trans Pfam Description: Transmembrane amino acid transporter protein
gaagcatcttatagtatttttagcttcattccttcttttgctctgatcaaagtcttctccttcccttctctctctctttcctcctctgcacatttctgggttcttctcttcttatgctctgtttcttttaagacacagaagaaacagtacagagttgagattttcttaaacaaaagtgaaaagagaagaaacaagtgacagctcaaacggacaaaaaccactcttgggtctttcttgcttctgattctttctcttctctaatagaagaaaacatctagaagctaaaaaaatgtcggaaggagtagaagcgatagtagcaaatgacaacggaacagatcaggtaaacggaaaccgtaccgggaaagataacgaagaacacgacggctccaccggttctaacctaagcaatttcctatggcacggtggctctgtctgggacgcttggttcagctgcgcatctaaccaagtggctcaagtgttattgacattaccgtactcgtttagtcaactaggaatgttatcaggaatagtacttcagatcttctatggtttactaggaagctggactgcttatctcatctctgttctctacgtcgaatacagagctcgtaaagaaaaagaaggcaaaagcttcaaaaaccacgtcattcagtggtttgaagtacttgatggattacttggttcatactggaaagcactaggactcgcatttaattgcactttcctcttgtttggatctgttatccaactcattgcttgtgccagtaacatttattacataaacgatcatctggacaagagaacatggacttacatatttggcgcgtgttgtgcaaccactgtctttataccgtcgtttcacaattaccgaatttggtcattccttggccttggaatgaccacttacaccgcttggtacttagccattgcctccatcatccacggccaggcggaaggtgtgaaacattcaggtccaacaaagctagtgctttattttacgggagccacaaatattttgtacacctttggaggtcacgcggttactgttgagattatgcatgctatgtggaaaccacagaagtttaagtacatttacttgatggcgacgttatacgtgttcacgctaacgattccgtcagctgccgccgtttactgggctttcggagacgcacttctcgaccactccaacgctttctctcttatgcccaagaacgcgtggcgtgacgccgctgttatcctcatgctcattcatcagtttataacgttcgggttcgcttgtacacctttgtactttgtgtgggagaaagtgattgggatgcatgacacaaagagcatttgcttaagggctttggctagattgcctgtggtcatacctatttggttcttagctattatcttcccctttttcggtccaatcaattccgctgtcggtgctcttcttgttagcttcaccgtctatatcatcccatctctcgctcacatgctcacttaccgatctgcctccgctcgtcagaatgcggcggagaagccaccgttctttatgccgagctggacggcgatgtacgtgttgaatgctttcgtggtggtttgggttcttatagtcggatttgggttcggtggatgggctagtgtaaccaactttgttcgtcaagtcgacacttttggtctctttgccaagtgttaccaatgtaaaccagctgcagccgccgcacatgccccggtctccgctttacaccaccgtctttgagagatcgagtcagggttcttctaatgcgtttgtggagggttcttaaaattatttgttcttcttttgtgttttgtgttcgtatacgtgaagggagtaaaagtcacgaaaatagtgtactttttacacacccctttaaatgcgtgctaagctcttaattatttttttctcttttggggttttgtatttttgttttcactccttagttttttttttaaaattgaatagtcgataatatgtagtgtgtgatttcttaatttggtattgttaaaacaataggctaagaaaatgtatcgtcttctctccttttacttgtctttagt

SEQ ID NO: 21792 - protein, 485 aa, Arabidopsis thaliana
  peptide (1)..(485): Ceres Seq. ID no. 12678933
  misc_feature: Pfam Name: Aa_trans Pfam Description: Transmembrane amino acid transporter protein
  misc_feature (1)..(484): Homolog of NCBI NO: 5881784 NR Description: putative AUX1-like permease [Arabidopsis thaliana]
  misc_feature (1)..(484): Homolog of NCBI NO: 25956260 NR Description: AUX1-like auxin transport protein [Cucumis
  misc_feature (4)..(475): Homolog of NCBI NO: 10441742 NR Description: putative AUX1-like permease
  misc_feature (3)..(483): Homolog of NCBI NO: 10800918 NR Description: putative AUX1-like permease [Medicago truncatula]
  misc_feature (1)..(484): Homolog of NCBI NO: 15240927 NR Description: LAX1 / AUX1 -like permease; protein id:
  misc_feature (2)..(483): Homolog of NCBI NO: 21586468 NR Description: auxin influx carrier protein [Medicago truncatula]
  misc_feature (1)..(477): Homolog of NCBI NO: 6650716 NR Description: AUX1-like protein [Populus tremula x Populus
  misc_feature (1)..(483): Homolog of NCBI NO: 37651177 NR Description: AUX1-like auxin influx carrier protein [Pisum
  misc_feature (3)..(483): Homolog of NCBI NO: 10800920 NR Description: putative AUX1-like permease [Medicago truncatula]
  misc_feature (1)..(485): Homolog of NCBI NO: 18404642 NR Description: expressed protein
MSEGVEAIVANDNGTDQVNGNRTGKDNEEHDGSTGSNLSNFLWHGGSVWDAWFSCASNQVAQVLLTLPYSFSQLGMLSGIVLQIFYGLLGSWTAYLISVLYVEYRARKEKEGKSFKNHVIQWFEVLDGLLGSYWKALGLAFNCTFLLFGSVIQLIACASNIYYINDHLDKRTWTYIFGACCATTVFIPSFHNYRIWSFLGLGMTTYTAWYLAIASIIHGQAEGVKHSGPTKLVLYFTGATNILYTFGGHAVTVEIMHAMWKPQKFKYIYLMATLYVFTLTIPSAAAVYWAFGDALLDHSNAFSLMPKNAWRDAAVILMLIHQFITFGFACTPLYFVWEKVIGMHDTKSICLRALARLPVVIPIWFLAIIFPFFGPINSAVGALLVSFTVYIIPSLAHMLTYRSASARQNAAEKPPFFMPSWTAMYVLNAFVVVWVLIVGFGFGGWASVTNFVRQVDTFGLFAKCYQCKPAAAAAHAPVSALHHRL

SEQ ID NO: 21793 - protein, 410 aa, Arabidopsis thaliana
  peptide (1)..(410): Ceres Seq. ID no. 12678934
  misc_feature: Pfam Name: Aa_trans Pfam Description: Transmembrane amino acid transporter protein
  misc_feature (1)..(409): Homolog of NCBI NO: 5881784 NR Description: putative AUX1-like permease [Arabidopsis thaliana]
  misc_feature (1)..(409): Homolog of NCBI NO: 25956260 NR Description: AUX1-like auxin transport protein [Cucumis
  misc_feature (1)..(400): Homolog of NCBI NO: 10441742 NR Description: putative AUX1-like permease
  misc_feature (1)..(408): Homolog of NCBI NO: 10800918 NR Description: putative AUX1-like permease [Medicago truncatula]
  misc_feature (1)..(409): Homolog of NCBI NO: 15240927 NR Description: LAX1 / AUX1 -like permease; protein id:
  misc_feature (1)..(408): Homolog of NCBI NO: 21586468 NR Description: auxin influx carrier protein [Medicago truncatula]
  misc_feature (1)..(402): Homolog of NCBI NO: 6650716 NR Description: AUX1-like protein [Populus tremula x Populus
  misc_feature (1)..(408): Homolog of NCBI NO: 37651177 NR Description: AUX1-like auxin influx carrier protein [Pisum
  misc_feature (1)..(408): Homolog of NCBI NO: 10800920 NR Description: putative AUX1-like permease [Medicago truncatula]
  misc_feature (1)..(410): Homolog of NCBI NO: 18404642 NR Description: expressed protein
MLSGIVLQIFYGLLGSWTAYLISVLYVEYRARKEKEGKSFKNHVIQWFEVLDGLLGSYWKALGLAFNCTFLLFGSVIQLIACASNIYYINDHLDKRTWTYIFGACCATTVFIPSFHNYRIWSFLGLGMTTYTAWYLAIASIIHGQAEGVKHSGPTKLVLYFTGATNILYTFGGHAVTVEIMHAMWKPQKFKYIYLMATLYVFTLTIPSAAAVYWAFGDALLDHSNAFSLMPKNAWRDAAVILMLIHQFITFGFACTPLYFVWEKVIGMHDTKSICLRALARLPVVIPIWFLAIIFPFFGPINSAVGALLVSFTVYIIPSLAHMLTYRSASARQNAAEKPPFFMPSWTAMYVLNAFVVVWVLIVGFGFGGWASVTNFVRQVDTFGLFAKCYQCKPAAAAAHAPVSALHHRL

SEQ ID NO: 21794 - protein, 283 aa, Arabidopsis thaliana
  peptide (1)..(283): Ceres Seq. ID no. 12678935
  misc_feature: Pfam Name: Aa_trans Pfam Description: Transmembrane amino acid transporter protein
  misc_feature (1)..(282): Homolog of NCBI NO: 5881784 NR Description: putative AUX1-like permease [Arabidopsis thaliana]
  misc_feature (1)..(282): Homolog of NCBI NO: 25956260 NR Description: AUX1-like auxin transport protein [Cucumis
  misc_feature (1)..(273): Homolog of NCBI NO: 10441742 NR Description: putative AUX1-like permease
  misc_feature (1)..(281): Homolog of NCBI NO: 10800918 NR Description: putative AUX1-like permease [Medicago truncatula]
  misc_feature (1)..(282): Homolog of NCBI NO: 15240927 NR Description: LAX1 / AUX1 -like permease; protein id:
  misc_feature (1)..(281): Homolog of NCBI NO: 21586468 NR Description: auxin influx carrier protein [Medicago truncatula]
  misc_feature (1)..(275): Homolog of NCBI NO: 6650716 NR Description: AUX1-like protein [Populus tremula x Populus
  misc_feature (1)..(281): Homolog of NCBI NO: 37651177 NR Description: AUX1-like auxin influx carrier protein [Pisum
  misc_feature (1)..(281): Homolog of NCBI NO: 10800920 NR Description: putative AUX1-like permease [Medicago truncatula]
  misc_feature (1)..(283): Homolog of NCBI NO: 18404642 NR Description: expressed protein
MTTYTAWYLAIASIIHGQAEGVKHSGPTKLVLYFTGATNILYTFGGHAVTVEIMHAMWKPQKFKYIYLMATLYVFTLTIPSAAAVYWAFGDALLDHSNAFSLMPKNAWRDAAVILMLIHQFITFGFACTPLYFVWEKVIGMHDTKSICLRALARLPVVIPIWFLAIIFPFFGPINSAVGALLVSFTVYIIPSLAHMLTYRSASARQNAAEKPPFFMPSWTAMYVLNAFVVVWVLIVGFGFGGWASVTNFVRQVDTFGLFAKCYQCKPAAAAAHAPVSALHHRL

SEQ ID NO: 21795 - DNA, 918 bp, Arabidopsis thaliana
  misc_feature (1)..(918): Ceres Seq. ID no. 13490449
  misc_feature: MA Experiment ID: 108462 Result: Up-regulated in Transcription
  misc_feature: MA Experiment 108462 PARAMETER Experiment Name: At_Germinating_Seeds_cDNA_P Parameter: Age (day) Value: 2 vs. 0
  misc_feature: MA Experiment 108462 PARAMETER Experiment Name: At_Germinating_Seeds_cDNA_P Parameter: Tissue Value: Germinating Seeds
  misc_feature: MA Experiment ID: 108463 Result: Up-regulated in Transcription
  misc_feature: MA Experiment 108463 PARAMETER Experiment Name: At_Germinating_Seeds_cDNA_P Parameter: Age (day) Value: 3 vs. 0
  misc_feature: MA Experiment 108463 PARAMETER Experiment Name: At_Germinating_Seeds_cDNA_P Parameter: Tissue Value: Germinating Seeds
  misc_feature: MA Experiment ID: 108464 Result: Up-regulated in Transcription
  misc_feature: MA Experiment 108464 PARAMETER Experiment Name: At_Germinating_Seeds_cDNA_P Parameter: Age (day) Value: 4 vs. 0
  misc_feature: MA Experiment 108464 PARAMETER Experiment Name: At_Germinating_Seeds_cDNA_P Parameter: Tissue Value: Germinating Seeds
  misc_feature: MA Experiment ID: 108667 Result: Down-regulated in Transcription
  misc_feature: MA Experiment 108667 PARAMETER Experiment Name: At_2mM_SA_cDNA_P Parameter: Plant Line Value: WS
  misc_feature: MA Experiment 108667 PARAMETER Experiment Name: At_2mM_SA_cDNA_P Parameter: Timepoint (hr) Value: 1
  misc_feature: MA Experiment 108667 PARAMETER Experiment Name: At_2mM_SA_cDNA_P Parameter: Treatment Value: 2mM SA vs. No Treatment
  misc_feature: MA Experiment ID: 20000111 Result: Down-regulated in Transcription
  misc_feature: MA Experiment 20000111 PARAMETER Experiment Name: At_42deg_Heat_cDNA_P Parameter: Temperature (deg C) Value: 42 vs. 22
  misc_feature: MA Experiment 20000111 PARAMETER Experiment Name: At_42deg_Heat_cDNA_P Parameter: Timepoint (hr) Value: 6
  misc_feature: MA Experiment 20000111 PARAMETER Experiment Name: At_42deg_Heat_cDNA_P Parameter: Tissue Value: Aerial
  misc_feature: MA Experiment ID: 20000112 Result: Down-regulated in Transcription
  misc_feature: MA Experiment 20000112 PARAMETER Experiment Name: At_42deg_Heat_cDNA_P Parameter: Temperature (deg C) Value: 42 vs. 22
  misc_feature: MA Experiment 20000112 PARAMETER Experiment Name: At_42deg_Heat_cDNA_P Parameter: Timepoint (hr) Value: 2
  misc_feature: MA Experiment 20000112 PARAMETER Experiment Name: At_42deg_Heat_cDNA_P Parameter: Tissue Value: Aerial
  misc_feature: MA Experiment ID: 20000144 Result: Down-regulated in Transcription
  misc_feature: MA Experiment 20000144 PARAMETER Experiment Name: At_42deg_Heat_cDNA_P Parameter: Temperature (deg C) Value: 42 vs. 22
  misc_feature: MA Experiment 20000144 PARAMETER Experiment Name: At_42deg_Heat_cDNA_P Parameter: Timepoint (hr) Value: 1
  misc_feature: MA Experiment 20000144 PARAMETER Experiment Name: At_42deg_Heat_cDNA_P Parameter: Tissue Value: Aerial
  misc_feature: MA Experiment ID: 20000171 Result: Down-regulated in Transcription
  misc_feature: MA Experiment 20000171 PARAMETER Experiment Name: At_42deg_Heat_P Parameter: Age (day) Value: 14
  misc_feature: MA Experiment 20000171 PARAMETER Experiment Name: At_42deg_Heat_P Parameter: Organism Value: A. thaliana
  misc_feature: MA Experiment 20000171 PARAMETER Experiment Name: At_42deg_Heat_P Parameter: Plant Line Value: WS
  misc_feature: MA Experiment 20000171 PARAMETER Experiment Name: At_42deg_Heat_P Parameter: Temperature (deg C) Value: 42 vs. 22
  misc_feature: MA Experiment 20000171 PARAMETER Experiment Name: At_42deg_Heat_P Parameter: Timepoint (hr) Value: 1
  misc_feature: MA Experiment 20000171 PARAMETER Experiment Name: At_42deg_Heat_P Parameter: Tissue Value: Aerial
  misc_feature: MA Experiment ID: 20000173 Result: Down-regulated in Transcription
  misc_feature: MA Experiment 20000173 PARAMETER Experiment Name: At_42deg_Heat_P Parameter: Age (day) Value: 14
  misc_feature: MA Experiment 20000173 PARAMETER Experiment Name: At_42deg_Heat_P Parameter: Organism Value: A. thaliana
  misc_feature: MA Experiment 20000173 PARAMETER Experiment Name: At_42deg_Heat_P Parameter: Plant Line Value: WS
  misc_feature: MA Experiment 20000173 PARAMETER Experiment Name: At_42deg_Heat_P Parameter: Temperature (deg C) Value: 42 vs. 22
  misc_feature: MA Experiment 20000173 PARAMETER Experiment Name: At_42deg_Heat_P Parameter: Timepoint (hr) Value: 6
  misc_feature: MA Experiment 20000173 PARAMETER Experiment Name: At_42deg_Heat_P Parameter: Tissue Value: Aerial
  misc_feature: MA Experiment ID: 20000182 Result: Down-regulated in Transcription
  misc_feature: MA Experiment 20000182 PARAMETER Experiment Name: At_2mM_SA_P Parameter: Age (day) Value: 14
  misc_feature: MA Experiment 20000182 PARAMETER Experiment Name: At_2mM_SA_P Parameter: Organism Value: A. thaliana
  misc_feature: MA Experiment 20000182 PARAMETER Experiment Name: At_2mM_SA_P Parameter: Plant Line Value: WS
  misc_feature: MA Experiment 20000182 PARAMETER Experiment Name: At_2mM_SA_P Parameter: Timepoint (hr) Value: 6
  misc_feature: MA Experiment 20000182 PARAMETER Experiment Name: At_2mM_SA_P Parameter: Tissue Value: Aerial
  misc_feature: MA Experiment 20000182 PARAMETER Experiment Name: At_2mM_SA_P Parameter: Treatment Value: 2mM SA vs. No Treatment
  misc_feature: MA Experiment ID: 20000184 Result: Up-regulated in Transcription
  misc_feature: MA Experiment 20000184 PARAMETER Experiment Name: At_Shoots__P Parameter: Age (day) Value: 7
  misc_feature: MA Experiment 20000184 PARAMETER Experiment Name: At_Shoots__P Parameter: Tissue Value: Shoots vs. Whole Plant
  misc_feature: MA Experiment ID: 20000185 Result: Down-regulated in Transcription
  misc_feature: MA Experiment 20000185 PARAMETER Experiment Name: At_Roots__P Parameter: Age (day) Value: 7 vs. 21
  misc_feature: MA Experiment 20000185 PARAMETER Experiment Name: At_Roots__P Parameter: Organism Value: A. thaliana
  misc_feature: MA Experiment 20000185 PARAMETER Experiment Name: At_Roots__P Parameter: Tissue Value: Roots vs. Whole Plant
  misc_feature: MA Experiment ID: 20000227 Result: Down-regulated in Transcription
  misc_feature: MA Experiment 20000227 PARAMETER Experiment Name: At_Root-Tips-vs-Tops_P Parameter: Tissue Value: Root Tips vs. Root Tops
  misc_feature: MA Experiment ID: 20000437 Result: Down-regulated in Transcription
  misc_feature: MA Experiment 20000437 PARAMETER Experiment Name: At_Drought_P Parameter: Age (day) Value: 8
  misc_feature: MA Experiment 20000437 PARAMETER Experiment Name: At_Drought_P Parameter: Organism Value: A. thaliana
  misc_feature: MA Experiment 20000437 PARAMETER Experiment Name: At_Drought_P Parameter: Plant Line Value: WS
  misc_feature: MA Experiment 20000437 PARAMETER Experiment Name: At_Drought_P Parameter: Timepoint (hr) Value: 24
  misc_feature: MA Experiment 20000437 PARAMETER Experiment Name: At_Drought_P Parameter: Tissue Value: Whole Plant
  misc_feature: MA Experiment 20000437 PARAMETER Experiment Name: At_Drought_P Parameter: Treatment Value: Drought vs. No Drought
  misc_feature: MA Experiment ID: 20000438 Result: Up-regulated in Transcription
  misc_feature: MA Experiment 20000438 PARAMETER Experiment Name: At_Shoots__P Parameter: Age (day) Value: 14
  misc_feature: MA Experiment 20000438 PARAMETER Experiment Name: At_Shoots__P Parameter: Tissue Value: Shoots vs. Whole Plant
  misc_feature: MA Experiment ID: 20000441 Result: Up-regulated in Transcription
  misc_feature: MA Experiment 20000441 PARAMETER Experiment Name: At_1uM_BR-BRZ__P Parameter: Tissue Value: Shoot Apices
  misc_feature: MA Experiment 20000441 PARAMETER Experiment Name: At_1uM_BR-BRZ__P Parameter: Treatment Value: 1uM BR vs. No Treatment
  misc_feature: MA Experiment ID: 20000443 Result: Up-regulated in Transcription
  misc_feature: MA Experiment 20000443 PARAMETER Experiment Name: At_1uM_BR-BRZ__P Parameter: Tissue Value: Shoot Apices
  misc_feature: MA Experiment 20000443 PARAMETER Experiment Name: At_1uM_BR-BRZ__P Parameter: Treatment Value: 1uM BRZ vs. No Treatment
  misc_feature: MA Experiment ID: 20000578 Result: Down-regulated in Transcription
  misc_feature: MA Experiment 20000578 PARAMETER Experiment Name: At_CS3726__P Parameter: Organism Value: A. thaliana
  misc_feature: MA Experiment 20000578 PARAMETER Experiment Name: At_CS3726__P Parameter: Plant Line Value: CS3726
  misc_feature: MA Experiment 20000578 PARAMETER Experiment Name: At_CS3726__P Parameter: Tissue Value: Whole Plant
  misc_feature: MA Experiment ID: 20000606 Result: Down-regulated in Transcription
  misc_feature: MA Experiment 20000606 PARAMETER Experiment Name: At_CS8548_Mutant_P Parameter: Age (day) Value: 14
  misc_feature: MA Experiment 20000606 PARAMETER Experiment Name: At_CS8548_Mutant_P Parameter: Plant Line Value: CS8548 vs. wt
  misc_feature: MA Experiment 20000606 PARAMETER Experiment Name: At_CS8548_Mutant_P Parameter: Tissue Value: Whole Plant
  misc_feature: MA Experiment ID: 20000794 Result: Down-regulated in Transcription
  misc_feature: MA Experiment 20000794 PARAMETER Experiment Name: At_Petals_P Parameter: Age (day) Value: 23-25 days
  misc_feature: MA Experiment 20000794 PARAMETER Experiment Name: At_Petals_P Parameter: Plant Line Value: WS
  misc_feature: MA Experiment 20000794 PARAMETER Experiment Name: At_Petals_P Parameter: Tissue Value: Petals vs. Whole plant
  misc_feature: MA Experiment ID: 20001450 Result: Up-regulated in Transcription
  misc_feature: MA Experiment 20001450 PARAMETER Experiment Name: At_Far-red-induction_P Parameter: Age (day) Value: 7
  misc_feature: MA Experiment 20001450 PARAMETER Experiment Name: At_Far-red-induction_P Parameter: Light Value: Far-red vs. White
  misc_feature: MA Experiment 20001450 PARAMETER Experiment Name: At_Far-red-induction_P Parameter: Organism Value: A. thaliana
  misc_feature: MA Experiment 20001450 PARAMETER Experiment Name: At_Far-red-induction_P Parameter: Plant Line Value: Columbia
  misc_feature: MA Experiment 20001450 PARAMETER Experiment Name: At_Far-red-induction_P Parameter: Timepoint (hr) Value: 8
  misc_feature: MA Experiment 20001450 PARAMETER Experiment Name: At_Far-red-induction_P Parameter: Tissue Value: Whole Plant
  misc_feature: MA Experiment ID: 20001451 Result: Up-regulated in Transcription
  misc_feature: MA Experiment 20001451 PARAMETER Experiment Name: At_Far-red-induction_P Parameter: Age (day) Value: 7
  misc_feature: MA Experiment 20001451 PARAMETER Experiment Name: At_Far-red-induction_P Parameter: Light Value: Far-red vs. White
  misc_feature: MA Experiment 20001451 PARAMETER Experiment Name: At_Far-red-induction_P Parameter: Organism Value: A. thaliana
  misc_feature: MA Experiment 20001451 PARAMETER Experiment Name: At_Far-red-induction_P Parameter: Plant Line Value: Columbia
  misc_feature: MA Experiment 20001451 PARAMETER Experiment Name: At_Far-red-induction_P Parameter: Timepoint (hr) Value: 24
  misc_feature: MA Experiment 20001451 PARAMETER Experiment Name: At_Far-red-induction_P Parameter: Tissue Value: Whole Plant
  misc_feature: MA Experiment ID: 20001555 Result: Down-regulated in Transcription
  misc_feature: MA Experiment 20001555 PARAMETER Experiment Name: At_Drought_Soil_Dry_P Parameter: Age (day) Value: 24
  misc_feature: MA Experiment 20001555 PARAMETER Experiment Name: At_Drought_Soil_Dry_P Parameter: Organism Value: A. thaliana
  misc_feature: MA Experiment 20001555 PARAMETER Experiment Name: At_Drought_Soil_Dry_P Parameter: Plant Line Value: WS
  misc_feature: MA Experiment 20001555 PARAMETER Experiment Name: At_Drought_Soil_Dry_P Parameter: Post Timepoint (hr) Value: None
  misc_feature: MA Experiment 20001555 PARAMETER Experiment Name: At_Drought_Soil_Dry_P Parameter: Post-Treatment Value: None
  misc_feature: MA Experiment 20001555 PARAMETER Experiment Name: At_Drought_Soil_Dry_P Parameter: Timepoint (day) Value: 10
  misc_feature: MA Experiment 20001555 PARAMETER Experiment Name: At_Drought_Soil_Dry_P Parameter: Treatment Value: Drought vs. No Drought
  misc_feature: MA Experiment ID: 20001556 Result: Down-regulated in Transcription
  misc_feature: MA Experiment 20001556 PARAMETER Experiment Name: At_Drought_Soil_Dry_P Parameter: Age (day) Value: 26
  misc_feature: MA Experiment 20001556 PARAMETER Experiment Name: At_Drought_Soil_Dry_P Parameter: Organism Value: A. thaliana
  misc_feature: MA Experiment 20001556 PARAMETER Experiment Name: At_Drought_Soil_Dry_P Parameter: Plant Line Value: WS
  misc_feature: MA Experiment 20001556 PARAMETER Experiment Name: At_Drought_Soil_Dry_P Parameter: Post Timepoint (hr) Value: None
  misc_feature: MA Experiment 20001556 PARAMETER Experiment Name: At_Drought_Soil_Dry_P Parameter: Post-Treatment Value: None
  misc_feature: MA Experiment 20001556 PARAMETER Experiment Name: At_Drought_Soil_Dry_P Parameter: Timepoint (day) Value: 12
  misc_feature: MA Experiment 20001556 PARAMETER Experiment Name: At_Drought_Soil_Dry_P Parameter: Treatment Value: Drought vs. No Drought
  misc_feature: MA Experiment ID: 20001557 Result: Down-regulated in Transcription
  misc_feature: MA Experiment 20001557 PARAMETER Experiment Name: At_Drought_Soil_Dry_P Parameter: Age (day) Value: 27
  misc_feature: MA Experiment 20001557 PARAMETER Experiment Name: At_Drought_Soil_Dry_P Parameter: Organism Value: A. thaliana
  misc_feature: MA Experiment 20001557 PARAMETER Experiment Name: At_Drought_Soil_Dry_P Parameter: Plant Line Value: WS
  misc_feature: MA Experiment 20001557 PARAMETER Experiment Name: At_Drought_Soil_Dry_P Parameter: Post Timepoint (hr) Value: 3
  misc_feature: MA Experiment 20001557 PARAMETER Experiment Name: At_Drought_Soil_Dry_P Parameter: Post-Treatment Value: Re-Water vs. No Drought
  misc_feature: MA Experiment 20001557 PARAMETER Experiment Name: At_Drought_Soil_Dry_P Parameter: Timepoint (day) Value: 13
  misc_feature: MA Experiment 20001557 PARAMETER Experiment Name: At_Drought_Soil_Dry_P Parameter: Treatment Value: Drought vs. No Drought
  misc_feature: MA Experiment ID: 20001558 Result: Down-regulated in Transcription
  misc_feature: MA Experiment 20001558 PARAMETER Experiment Name: At_Drought_Soil_Dry_P Parameter: Age (day) Value: 27
  misc_feature: MA Experiment 20001558 PARAMETER Experiment Name: At_Drought_Soil_Dry_P Parameter: Organism Value: A. thaliana
  misc_feature: MA Experiment 20001558 PARAMETER Experiment Name: At_Drought_Soil_Dry_P Parameter: Plant Line Value: WS
  misc_feature: MA Experiment 20001558 PARAMETER Experiment Name: At_Drought_Soil_Dry_P Parameter: Post Timepoint (hr) Value: 6
  misc_feature: MA Experiment 20001558 PARAMETER Experiment Name: At_Drought_Soil_Dry_P Parameter: Post-Treatment Value: Re-Water vs. No Drought
  misc_feature: MA Experiment 20001558 PARAMETER Experiment Name: At_Drought_Soil_Dry_P Parameter: Timepoint (day) Value: 13
  misc_feature: MA Experiment 20001558 PARAMETER Experiment Name: At_Drought_Soil_Dry_P Parameter: Treatment Value: Drought vs. No Drought
  misc_feature: MA Experiment ID: 20001559 Result: Down-regulated in Transcription
  misc_feature: MA Experiment 20001559 PARAMETER Experiment Name: At_Drought_Soil_Dry_P Parameter: Age (day) Value: 28
  misc_feature: MA Experiment 20001559 PARAMETER Experiment Name: At_Drought_Soil_Dry_P Parameter: Organism Value: A. thaliana
  misc_feature: MA Experiment 20001559 PARAMETER Experiment Name: At_Drought_Soil_Dry_P Parameter: Plant Line Value: WS
  misc_feature: MA Experiment 20001559 PARAMETER Experiment Name: At_Drought_Soil_Dry_P Parameter: Post Timepoint (hr) Value: 29
  misc_feature: MA Experiment 20001559 PARAMETER Experiment Name: At_Drought_Soil_Dry_P Parameter: Post-Treatment Value: Re-Water vs. No Drought
  misc_feature: MA Experiment 20001559 PARAMETER Experiment Name: At_Drought_Soil_Dry_P Parameter: Timepoint (day) Value: 14
  misc_feature: MA Experiment 20001559 PARAMETER Experiment Name: At_Drought_Soil_Dry_P Parameter: Treatment Value: Drought vs. No Drought
  misc_feature: MA Experiment ID: 20001560 Result: Down-regulated in Transcription
  misc_feature: MA Experiment 20001560 PARAMETER Experiment Name: At_Drought_Soil_Dry_P Parameter: Age (day) Value: 28
  misc_feature: MA Experiment 20001560 PARAMETER Experiment Name: At_Drought_Soil_Dry_P Parameter: Organism Value: A. thaliana
  misc_feature: MA Experiment 20001560 PARAMETER Experiment Name: At_Drought_Soil_Dry_P Parameter: Plant Line Value: WS
  misc_feature: MA Experiment 20001560 PARAMETER Experiment Name: At_Drought_Soil_Dry_P Parameter: Post Timepoint (hr) Value: None
  misc_feature: MA Experiment 20001560 PARAMETER Experiment Name: At_Drought_Soil_Dry_P Parameter: Post-Treatment Value: None
  misc_feature: MA Experiment 20001560 PARAMETER Experiment Name: At_Drought_Soil_Dry_P Parameter: Timepoint (day) Value: 14
  misc_feature: MA Experiment 20001560 PARAMETER Experiment Name: At_Drought_Soil_Dry_P Parameter: Treatment Value: Drought vs. No Drought
tcaacccaccagtccaagtcaaacctcctcaagccatcccctaatcctatatatcagtttcttctcgcaaaccacctcacaatctatcaacagttttaaaaaaagacataactcaaccaatctcactttgaaaaagacatgaacaaaacccgccttcgtgctctctccccaccttccggtatgcaacaccgtaagagatgtcgattgagaggtcgaaactacgtaaggccagaagttaaacaacgcaacttctcaaaagatgaagacgatctcatcctcaagcttcatgcacttcttggcaatagatggtcattgatagcgggaagattgccaggacgaaccgacaacgaagttaggatccattgggaaacttacctaaaaaggaagctcgtaaaaatgggaatcgacccaaccaatcatcgtctccaccatcacaccaactacatttctagacgtcacctccattcttcacataaggaacatgaaaccaagattattagtgatcaatcttcttcggtatccgaatcatgtggtgtaacaattttgcccattccaagtaccaattgctcggaggatagtactagtaccggacgaagtcatttgcctgacctaaacattggtctcatcccggccgtgacttctttgccagctctttgccttcaggactctagcgaatcctctaccaatggttcaacaggtcaagaaacgcttcttctattccgatgagaaatggtgtatttgtttgtacacatttgttatattacaaatgcacatattataatattcactagagagatggtataacgatgtttgaaatatgttaatcctgaattggaccggctggtcattgaacaactattctcttaaatgtccggttctgttttcagtgattagtattatagtagatcgttaataact

SEQ ID NO: 21796 - protein, 195 aa, Arabidopsis thaliana
  peptide (1)..(195): Ceres Seq. ID no. 13490450
  misc_feature (35)..(80): Pfam Name: Myb-like DNA-binding domain Pfam Description: Myb-like DNA-binding domain
  misc_feature (7)..(96): Homolog of NCBI NO: 30687964 NR Description: myb family transcription factor [Arabidopsis
  misc_feature (7)..(96): Homolog of NCBI NO: 11273984 NR Description: probable transcription factor MYB3
  misc_feature (7)..(162): Homolog of NCBI NO: 2129933 NR Description: myb-related protein TMH27 - tomato
  misc_feature (7)..(195): Homolog of NCBI NO: 23476317 NR Description: myb-like transcription factor 6 [Gossypioides
  misc_feature (7)..(195): Homolog of NCBI NO: 23476313 NR Description: myb-like transcription factor 6 [Gossypium
  misc_feature (7)..(195): Homolog of NCBI NO: 7446161 NR Description: myb-related protein - upland cotton
  misc_feature (7)..(195): Homolog of NCBI NO: 23476311 NR Description: myb-like transcription factor 6 [Gossypium
  misc_feature (7)..(195): Homolog of NCBI NO: 23476315 NR Description: myb-like transcription factor 6 [Gossypium
  misc_feature (1)..(195): Homolog of NCBI NO: 15223923 NR Description: myb family transcription factor [Arabidopsis
  misc_feature (1)..(170): Homolog of NCBI NO: 2129650 NR Description: myb-related 24.7K transcription factor -
MNKTRLRALSPPSGMQHRKRCRLRGRNYVRPEVKQRNFSKDEDDLILKLHALLGNRWSLIAGRLPGRTDNEVRIHWETYLKRKLVKMGIDPTNHRLHHHTNYISRRHLHSSHKEHETKIISDQSSSVSESCGVTILPIPSTNCSEDSTSTGRSHLPDLNIGLIPAVTSLPALCLQDSSESSTNGSTGQETLLLFR

SEQ ID NO: 21797 - protein, 181 aa, Arabidopsis thaliana
  peptide (1)..(181): Ceres Seq. ID no. 13490451
  misc_feature (21)..(66): Pfam Name: Myb-like DNA-binding domain Pfam Description: Myb-like DNA-binding domain
  misc_feature (1)..(82): Homolog of NCBI NO: 30687964 NR Description: myb family transcription factor [Arabidopsis
  misc_feature (1)..(82): Homolog of NCBI NO: 11273984 NR Description: probable transcription factor MYB3
  misc_feature (1)..(148): Homolog of NCBI NO: 2129933 NR Description: myb-related protein TMH27 - tomato
  misc_feature (1)..(181): Homolog of NCBI NO: 23476317 NR Description: myb-like transcription factor 6 [Gossypioides
  misc_feature (1)..(181): Homolog of NCBI NO: 23476313 NR Description: myb-like transcription factor 6 [Gossypium
  misc_feature (1)..(181): Homolog of NCBI NO: 7446161 NR Description: myb-related protein - upland cotton
  misc_feature (1)..(181): Homolog of NCBI NO: 23476311 NR Description: myb-like transcription factor 6 [Gossypium
  misc_feature (1)..(181): Homolog of NCBI NO: 23476315 NR Description: myb-like transcription factor 6 [Gossypium
  misc_feature (1)..(181): Homolog of NCBI NO: 15223923 NR Description: myb family transcription factor [Arabidopsis
  misc_feature (1)..(156): Homolog of NCBI NO: 2129650 NR Description: myb-related 24.7K transcription factor -
MQHRKRCRLRGRNYVRPEVKQRNFSKDEDDLILKLHALLGNRWSLIAGRLPGRTDNEVRIHWETYLKRKLVKMGIDPTNHRLHHHTNYISRRHLHSSHKEHETKIISDQSSSVSESCGVTILPIPSTNCSEDSTSTGRSHLPDLNIGLIPAVTSLPALCLQDSSESSTNGSTGQETLLLFR

SEQ ID NO: 21798 - protein, 109 aa, Arabidopsis thaliana
  peptide (1)..(109): Ceres Seq. ID no. 13490452
  misc_feature (1)..(35): Homolog of NCBI NO: 6467223 NR Description: DNA-binding protein [Arabidopsis thaliana]
  misc_feature (1)..(76): Homolog of NCBI NO: 39725415 NR Description: MYB transcription factor [Eucalyptus gunnii]
  misc_feature (1)..(76): Homolog of NCBI NO: 2129933 NR Description: myb-related protein TMH27 - tomato
  misc_feature (1)..(109): Homolog of NCBI NO: 23476317 NR Description: myb-like transcription factor 6 [Gossypioides
  misc_feature (1)..(109): Homolog of NCBI NO: 23476313 NR Description: myb-like transcription factor 6 [Gossypium
  misc_feature (1)..(109): Homolog of NCBI NO: 7446161 NR Description: myb-related protein - upland cotton
  misc_feature (1)..(109): Homolog of NCBI NO: 23476311 NR Description: myb-like transcription factor 6 [Gossypium
  misc_feature (1)..(109): Homolog of NCBI NO: 23476315 NR Description: myb-like transcription factor 6 [Gossypium
  misc_feature (1)..(109): Homolog of NCBI NO: 15223923 NR Description: myb family transcription factor [Arabidopsis
  misc_feature (1)..(84): Homolog of NCBI NO: 2129650 NR Description: myb-related 24.7K transcription factor -
MGIDPTNHRLHHHTNYISRRHLHSSHKEHETKIISDQSSSVSESCGVTILPIPSTNCSEDSTSTGRSHLPDLNIGLIPAVTSLPALCLQDSSESSTNGSTGQETLLLFR

SEQ ID NO: 21799 - DNA, 914 bp, Arabidopsis thaliana
  misc_feature (1)..(914): Ceres Seq. ID no. 12332703
  misc_feature: MA Experiment ID: 108462 Result: Up-regulated in Transcription
  misc_feature: MA Experiment 108462 PARAMETER Experiment Name: At_Germinating_Seeds_cDNA_P Parameter: Age (day) Value: 2 vs. 0
  misc_feature: MA Experiment 108462 PARAMETER Experiment Name: At_Germinating_Seeds_cDNA_P Parameter: Tissue Value: Germinating Seeds
  misc_feature: MA Experiment ID: 108464 Result: Up-regulated in Transcription
  misc_feature: MA Experiment 108464 PARAMETER Experiment Name: At_Germinating_Seeds_cDNA_P Parameter: Age (day) Value: 4 vs. 0
  misc_feature: MA Experiment 108464 PARAMETER Experiment Name: At_Germinating_Seeds_cDNA_P Parameter: Tissue Value: Germinating Seeds
  misc_feature: MA Experiment ID: 20000069 Result: Down-regulated in Transcription
  misc_feature: MA Experiment 20000069 PARAMETER Experiment Name: At_100uM_ABA_Mutants_cDNA_P Parameter: Plant Line Value: CS23
  misc_feature: MA Experiment 20000069 PARAMETER Experiment Name: At_100uM_ABA_Mutants_cDNA_P Parameter: Timepoint (hr) Value: 6
  misc_feature: MA Experiment 20000069 PARAMETER Experiment Name: At_100uM_ABA_Mutants_cDNA_P Parameter: Tissue Value: Aerial
  misc_feature: MA Experiment 20000069 PARAMETER Experiment Name: At_100uM_ABA_Mutants_cDNA_P Parameter: Treatment Value: 100uM ABA vs. No Treatment
  misc_feature: MA Experiment ID: 20000070 Result: Down-regulated in Transcription
  misc_feature: MA Experiment 20000070 PARAMETER Experiment Name: At_100uM_ABA_Mutants_cDNA_P Parameter: Plant Line Value: CS24
  misc_feature: MA Experiment 20000070 PARAMETER Experiment Name: At_100uM_ABA_Mutants_cDNA_P Parameter: Timepoint (hr) Value: 6
  misc_feature: MA Experiment 20000070 PARAMETER Experiment Name: At_100uM_ABA_Mutants_cDNA_P Parameter: Tissue Value: Aerial
  misc_feature: MA Experiment 20000070 PARAMETER Experiment Name: At_100uM_ABA_Mutants_cDNA_P Parameter: Treatment Value: 100uM ABA vs. No Treatment
  misc_feature: MA Experiment ID: 20000071 Result: Down-regulated in Transcription
  misc_feature: MA Experiment 20000071 PARAMETER Experiment Name: At_100uM_ABA_Mutants_cDNA_P Parameter: Plant Line Value: CS8104
  misc_feature: MA Experiment 20000071 PARAMETER Experiment Name: At_100uM_ABA_Mutants_cDNA_P Parameter: Timepoint (hr) Value: 6
  misc_feature: MA Experiment 20000071 PARAMETER Experiment Name: At_100uM_ABA_Mutants_cDNA_P Parameter: Tissue Value: Aerial
  misc_feature: MA Experiment 20000071 PARAMETER Experiment Name: At_100uM_ABA_Mutants_cDNA_P Parameter: Treatment Value: 100uM ABA vs. No Treatment
  misc_feature: MA Experiment ID: 20000087 Result: Down-regulated in Transcription
  misc_feature: MA Experiment 20000087 PARAMETER Experiment Name: At_100uM_ABA_Mutants_cDNA_P Parameter: Plant Line Value: WS
  misc_feature: MA Experiment 20000087 PARAMETER Experiment Name: At_100uM_ABA_Mutants_cDNA_P Parameter: Timepoint (hr) Value: 6
  misc_feature: MA Experiment 20000087 PARAMETER Experiment Name: At_100uM_ABA_Mutants_cDNA_P Parameter: Tissue Value: Aerial
  misc_feature: MA Experiment 20000087 PARAMETER Experiment Name: At_100uM_ABA_Mutants_cDNA_P Parameter: Treatment Value: 100uM ABA vs. No Treatment
  misc_feature: MA Experiment ID: 20000089 Result: Down-regulated in Transcription
  misc_feature: MA Experiment ID: 20000117 Result: Down-regulated in Transcription
  misc_feature: MA Experiment 20000117 PARAMETER Experiment Name: At_100uM_ABA_Mutants_cDNA_P Parameter: Plant Line Value: Columbia
  misc_feature: MA Experiment 20000117 PARAMETER Experiment Name: At_100uM_ABA_Mutants_cDNA_P Parameter: Timepoint (hr) Value: 6
  misc_feature: MA Experiment 20000117 PARAMETER Experiment Name: At_100uM_ABA_Mutants_cDNA_P Parameter: Tissue Value: Aerial
  misc_feature: MA Experiment 20000117 PARAMETER Experiment Name: At_100uM_ABA_Mutants_cDNA_P Parameter: Treatment Value: 100uM ABA vs. No Treatment
  misc_feature: MA Experiment ID: 20000234 Result: Up-regulated in Transcription
  misc_feature: MA Experiment 20000234 PARAMETER Experiment Name: At_Siliques_P Parameter: Age (day) Value: 21
  misc_feature: MA Experiment 20000234 PARAMETER Experiment Name: At_Siliques_P Parameter: Organism Value: A. thaliana
  misc_feature: MA Experiment 20000234 PARAMETER Experiment Name: At_Siliques_P Parameter: Plant Line Value: WS
  misc_feature: MA Experiment 20000234 PARAMETER Experiment Name: At_Siliques_P Parameter: Tissue Value: Less Than 5mm Siliques vs. Whole Plant
  misc_feature: MA Experiment ID: 20000235 Result: Up-regulated in Transcription
  misc_feature: MA Experiment 20000235 PARAMETER Experiment Name: At_Siliques_P Parameter: Age (day) Value: 21
  misc_feature: MA Experiment 20000235 PARAMETER Experiment Name: At_Siliques_P Parameter: Organism Value: A. thaliana
  misc_feature: MA Experiment 20000235 PARAMETER Experiment Name: At_Siliques_P Parameter: Plant Line Value: WS
  misc_feature: MA Experiment 20000235 PARAMETER Experiment Name: At_Siliques_P Parameter: Tissue Value: 5-10mm Siliques vs. Whole Plant
  misc_feature: MA Experiment ID: 20000264 Result: Up-regulated in Transcription
  misc_feature: MA Experiment 20000264 PARAMETER Experiment Name: At_Open_Flower_P Parameter: Age (day) Value: 21
  misc_feature: MA Experiment 20000264 PARAMETER Experiment Name: At_Open_Flower_P Parameter: Plant Line Value: WS
  misc_feature: MA Experiment 20000264 PARAMETER Experiment Name: At_Open_Flower_P Parameter: Tissue Value: Open Flower vs. Whole Plant
  misc_feature: MA Experiment ID: 20000265 Result: Up-regulated in Transcription
  misc_feature: MA Experiment 20000265 PARAMETER Experiment Name: At_Open_Flower_P Parameter: Age (day) Value: 21
  misc_feature: MA Experiment 20000265 PARAMETER Experiment Name: At_Open_Flower_P Parameter: Plant Line Value: WS
  misc_feature: MA Experiment 20000265 PARAMETER Experiment Name: At_Open_Flower_P Parameter: Tissue Value: Closed Flower vs. Whole Plant
  misc_feature: MA Experiment ID: 20000286 Result: Up-regulated in Transcription
  misc_feature: MA Experiment 20000286 PARAMETER Experiment Name: At_Open_Flower_P Parameter: Age (day) Value: 21
  misc_feature: MA Experiment 20000286 PARAMETER Experiment Name: At_Open_Flower_P Parameter: Plant Line Value: WS
  misc_feature: MA Experiment 20000286 PARAMETER Experiment Name: At_Open_Flower_P Parameter: Tissue Value: Half Open vs. Whole Plant
  misc_feature: MA Experiment ID: 20000527 Result: Up-regulated in Transcription
  misc_feature: MA Experiment 20000527 PARAMETER Experiment Name: At_10percent_PEG_P Parameter: Age (day) Value: 20
  misc_feature: MA Experiment 20000527 PARAMETER Experiment Name: At_10percent_PEG_P Parameter: Organism Value: A. thaliana
  misc_feature: MA Experiment 20000527 PARAMETER Experiment Name: At_10percent_PEG_P Parameter: Plant Line Value: WS
  misc_feature: MA Experiment 20000527 PARAMETER Experiment Name: At_10percent_PEG_P Parameter: Timepoint (day) Value: 20
  misc_feature: MA Experiment 20000527 PARAMETER Experiment Name: At_10percent_PEG_P Parameter: Tissue Value: Whole Plant
  misc_feature: MA Experiment 20000527 PARAMETER Experiment Name: At_10percent_PEG_P Parameter: Treatment Value: 10percent PEG vs. No Treatment
  misc_feature: MA Experiment ID: 20000794 Result: Up-regulated in Transcription
  misc_feature: MA Experiment 20000794 PARAMETER Experiment Name: At_Petals_P Parameter: Age (day) Value: 23-25 days
  misc_feature: MA Experiment 20000794 PARAMETER Experiment Name: At_Petals_P Parameter: Plant Line Value: WS
  misc_feature: MA Experiment 20000794 PARAMETER Experiment Name: At_Petals_P Parameter: Tissue Value: Petals vs. Whole plant
  misc_feature: MA Experiment ID: 20001557 Result: Down-regulated in Transcription
  misc_feature: MA Experiment 20001557 PARAMETER Experiment Name: At_Drought_Soil_Dry_P Parameter: Age (day) Value: 27
  misc_feature: MA Experiment 20001557 PARAMETER Experiment Name: At_Drought_Soil_Dry_P Parameter: Organism Value: A. thaliana
  misc_feature: MA Experiment 20001557 PARAMETER Experiment Name: At_Drought_Soil_Dry_P Parameter: Plant Line Value: WS
  misc_feature: MA Experiment 20001557 PARAMETER Experiment Name: At_Drought_Soil_Dry_P Parameter: Post Timepoint (hr) Value: 3
  misc_feature: MA Experiment 20001557 PARAMETER Experiment Name: At_Drought_Soil_Dry_P Parameter: Post-Treatment Value: Re-Water vs. No Drought
  misc_feature: MA Experiment 20001557 PARAMETER Experiment Name: At_Drought_Soil_Dry_P Parameter: Timepoint (day) Value: 13
  misc_feature: MA Experiment 20001557 PARAMETER Experiment Name: At_Drought_Soil_Dry_P Parameter: Treatment Value: Drought vs. No Drought
  misc_feature: MA Experiment ID: 20001560 Result: Up-regulated in Transcription
  misc_feature: MA Experiment 20001560 PARAMETER Experiment Name: At_Drought_Soil_Dry_P Parameter: Age (day) Value: 28
  misc_feature: MA Experiment 20001560 PARAMETER Experiment Name: At_Drought_Soil_Dry_P Parameter: Organism Value: A. thaliana
  misc_feature: MA Experiment 20001560 PARAMETER Experiment Name: At_Drought_Soil_Dry_P Parameter: Plant Line Value: WS
  misc_feature: MA Experiment 20001560 PARAMETER Experiment Name: At_Drought_Soil_Dry_P Parameter: Post Timepoint (hr) Value: None
  misc_feature: MA Experiment 20001560 PARAMETER Experiment Name: At_Drought_Soil_Dry_P Parameter: Post-Treatment Value: None
  misc_feature: MA Experiment 20001560 PARAMETER Experiment Name: At_Drought_Soil_Dry_P Parameter: Timepoint (day) Value: 14
  misc_feature: MA Experiment 20001560 PARAMETER Experiment Name: At_Drought_Soil_Dry_P Parameter: Treatment Value: Drought vs. No Drought
agtcacacacacaacacaacaatggatattaacaggtggagtcttcaaggtatgactgctcttgtaaccggtggatcaaagggaattgggtatgcaatagtggaggaacttgtaggctttggtgcaagagttcacatctgtgacatagacgaaactctgctaaacgaatgcttaagtggatggcatgcaaaagggtttgaagtgagtggttcaatctgtgatgtttcctctcgacctcagagagtgcaattgatgcagactgtttcttctctatttggtgccaaactcaacatccttataaacaatgttggcaagtacatattaaagccaactttagaaagtacagctgaagatttctcaagtttaatggctaccaatttggaatctgcttactacatctcccaattggcacatcctttacttaaagcctcgggaaatgggaatatcgtgtttatttcctcggtaacgggggttgtctctggcacatctaccatatatggtgtaacaaaaggagccttgaatcaactggcaagagatttggcgtgtgaatgggccagtgacaacataagggctaactctgtagctccttgggtcactgcaacttctcttgtccaaaaatatcttgaagacgagatatttgcggaagctatgttctcaagaaccccattaggacgtgcatgtgagccacgtgaggttgcgtcgctggtgacatttctctgtctccctgcagcttcttatataacaggacaaaccatttgtattgatggtggtttcactgttaatggattctcctataagccatagggtcaaaccctagaaaacacttctacaattaacaatttctatgatgtatgaacatttggtcaagttttactacattatgtcaaaaataaatgaggtcaagcttatatatg

SEQ ID NO: 21800 - protein, 267 aa, Arabidopsis thaliana
  peptide (1)..(267): Ceres Seq. ID no. 12332704
  misc_feature (8)..(267): Homolog of NCBI NO: 21553753 NR Description: putative tropinone reductase [Arabidopsis
  misc_feature (8)..(267): Homolog of NCBI NO: 15227070 NR Description: putative tropinone reductase
  misc_feature (8)..(267): Homolog of NCBI NO: 15529236 NR Description: At2g29320/F16P2.30 [Arabidopsis thaliana]
  misc_feature (8)..(267): Homolog of NCBI NO: 15227072 NR Description: putative tropinone reductase
  misc_feature (8)..(267): Homolog of NCBI NO: 30684202 NR Description: short-chain dehydrogenase/reductase family
  misc_feature (8)..(267): Homolog of NCBI NO: 15227071 NR Description: putative tropinone reductase; protein id:
  misc_feature (8)..(267): Homolog of NCBI NO: 15227073 NR Description: putative tropinone reductase; protein id:
  misc_feature (8)..(255): Homolog of NCBI NO: 25406975 NR Description: protein F22G5.20 [imported] - Arabidopsis
  misc_feature (8)..(267): Homolog of NCBI NO: 15222400 NR Description: tropinone reductase-I, putative
  misc_feature (3)..(267): Homolog of NCBI NO: 15227076 NR Description: putative tropinone reductase
SHTHNTTMDINRWSLQGMTALVTGGSKGIGYAIVEELVGFGARVHICDIDETLLNECLSGWHAKGFEVSGSICDVSSRPQRVQLMQTVSSLFGAKLNILINNVGKYILKPTLESTAEDFSSLMATNLESAYYISQLAHPLLKASGNGNIVFISSVTGVVSGTSTIYGVTKGALNQLARDLACEWASDNIRANSVAPWVTATSLVQKYLEDEIFAEAMFSRTPLGRACEPREVASLVTFLCLPAASYITGQTICIDGGFTVNGFSYKP

SEQ ID NO: 21801 - protein, 260 aa, Arabidopsis thaliana
  peptide (1)..(260): Ceres Seq. ID no. 12332705
  misc_feature (1)..(260): Homolog of NCBI NO: 15227076 NR Description: putative tropinone reductase
  misc_feature (1)..(260): Homolog of NCBI NO: 21553753 NR Description: putative tropinone reductase [Arabidopsis
  misc_feature (1)..(260): Homolog of NCBI NO: 15227070 NR Description: putative tropinone reductase
  misc_feature (1)..(260): Homolog of NCBI NO: 15529236 NR Description: At2g29320/F16P2.30 [Arabidopsis thaliana]
  misc_feature (1)..(260): Homolog of NCBI NO: 15227072 NR Description: putative tropinone reductase
  misc_feature (1)..(260): Homolog of NCBI NO: 30684202 NR Description: short-chain dehydrogenase/reductase family
  misc_feature (1)..(260): Homolog of NCBI NO: 15227071 NR Description: putative tropinone reductase; protein id:
  misc_feature (1)..(260): Homolog of NCBI NO: 15227073 NR Description: putative tropinone reductase; protein id:
  misc_feature (1)..(248): Homolog of NCBI NO: 25406975 NR Description: protein F22G5.20 [imported] - Arabidopsis
  misc_feature (1)..(260): Homolog of NCBI NO: 15222400 NR Description: tropinone reductase-I, putative
MDINRWSLQGMTALVTGGSKGIGYAIVEELVGFGARVHICDIDETLLNECLSGWHAKGFEVSGSICDVSSRPQRVQLMQTVSSLFGAKLNILINNVGKYILKPTLESTAEDFSSLMATNLESAYYISQLAHPLLKASGNGNIVFISSVTGVVSGTSTIYGVTKGALNQLARDLACEWASDNIRANSVAPWVTATSLVQKYLEDEIFAEAMFSRTPLGRACEPREVASLVTFLCLPAASYITGQTICIDGGFTVNGFSYKP

SEQ ID NO: 21802 - protein, 250 aa, Arabidopsis thaliana
  peptide (1)..(250): Ceres Seq. ID no. 12332706
  misc_feature (1)..(250): Homolog of NCBI NO: 15227076 NR Description: putative tropinone reductase
  misc_feature (1)..(250): Homolog of NCBI NO: 21553753 NR Description: putative tropinone reductase [Arabidopsis
  misc_feature (1)..(250): Homolog of NCBI NO: 15227070 NR Description: putative tropinone reductase
  misc_feature (1)..(250): Homolog of NCBI NO: 15529236 NR Description: At2g29320/F16P2.30 [Arabidopsis thaliana]
  misc_feature (1)..(250): Homolog of NCBI NO: 15227072 NR Description: putative tropinone reductase
  misc_feature (1)..(250): Homolog of NCBI NO: 30684202 NR Description: short-chain dehydrogenase/reductase family
  misc_feature (1)..(250): Homolog of NCBI NO: 15227071 NR Description: putative tropinone reductase; protein id:
  misc_feature (1)..(250): Homolog of NCBI NO: 15227073 NR Description: putative tropinone reductase; protein id:
  misc_feature (1)..(238): Homolog of NCBI NO: 25406975 NR Description: protein F22G5.20 [imported] - Arabidopsis
  misc_feature (1)..(250): Homolog of NCBI NO: 15222400 NR Description: tropinone reductase-I, putative
MTALVTGGSKGIGYAIVEELVGFGARVHICDIDETLLNECLSGWHAKGFEVSGSICDVSSRPQRVQLMQTVSSLFGAKLNILINNVGKYILKPTLESTAEDFSSLMATNLESAYYISQLAHPLLKASGNGNIVFISSVTGVVSGTSTIYGVTKGALNQLARDLACEWASDNIRANSVAPWVTATSLVQKYLEDEIFAEAMFSRTPLGRACEPREVASLVTFLCLPAASYITGQTICIDGGFTVNGFSYKP

SEQ ID NO: 21803 - DNA, 839 bp, Arabidopsis thaliana
  misc_feature (1)..(839): Ceres Seq. ID no. 12601485
  misc_feature: MA Experiment ID: 108434 Result: Up-regulated in Transcription
  misc_feature: MA Experiment 108434 PARAMETER Experiment Name: At_Root_Tips_cDNA_P Parameter: Tissue Value: Root Tips
  misc_feature: MA Experiment ID: 108435 Result: Up-regulated in Transcription
  misc_feature: MA Experiment 108435 PARAMETER Experiment Name: At_stm_Mutants_cDNA_P Parameter: Plant Line Value: wt Landsburg vs stm
  misc_feature: MA Experiment 108435 PARAMETER Experiment Name: At_stm_Mutants_cDNA_P Parameter: Tissue Value: Shoot Apical Meristem Region
  misc_feature: MA Experiment ID: 108488 Result: Up-regulated in Transcription
  misc_feature: MA Experiment ID: 108573 Result: Up-regulated in Transcription
  misc_feature: MA Experiment 108573 PARAMETER Experiment Name: At_Drought_cDNA_P Parameter: Timepoint (hr) Value: 6
  misc_feature: MA Experiment 108573 PARAMETER Experiment Name: At_Drought_cDNA_P Parameter: Tissue Value: Aerial
  misc_feature: MA Experiment 108573 PARAMETER Experiment Name: At_Drought_cDNA_P Parameter: Treatment Value: Drought vs. No Drought
  misc_feature: MA Experiment ID: 108576 Result: Down-regulated in Transcription
  misc_feature: MA Experiment 108576 PARAMETER Experiment Name: At_42deg_Heat_cDNA_P Parameter: Temperature (deg C) Value: 42 vs. 22
  misc_feature: MA Experiment 108576 PARAMETER Experiment Name: At_42deg_Heat_cDNA_P Parameter: Timepoint (hr) Value: 1
  misc_feature: MA Experiment 108576 PARAMETER Experiment Name: At_42deg_Heat_cDNA_P Parameter: Tissue Value: Aerial
  misc_feature: MA Experiment ID: 108595 Result: Up-regulated in Transcription
  misc_feature: MA Experiment 108595 PARAMETER Experiment Name: At_Ler-pi_Ovule_cDNA_P Parameter: Plant Line Value: null
  misc_feature: MA Experiment ID: 20000030 Result: Up-regulated in Transcription
  misc_feature: MA Experiment 20000030 PARAMETER Experiment Name: At_CS6630_Roots_cDNA_P Parameter: Plant Line Value: CS6630 vs. WS
  misc_feature: MA Experiment 20000030 PARAMETER Experiment Name: At_CS6630_Roots_cDNA_P Parameter: Tissue Value: Roots
  misc_feature: MA Experiment ID: 20000071 Result: Up-regulated in Transcription
  misc_feature: MA Experiment 20000071 PARAMETER Experiment Name: At_100uM_ABA_Mutants_cDNA_P Parameter: Plant Line Value: CS8104
  misc_feature: MA Experiment 20000071 PARAMETER Experiment Name: At_100uM_ABA_Mutants_cDNA_P Parameter: Timepoint (hr) Value: 6
  misc_feature: MA Experiment 20000071 PARAMETER Experiment Name: At_100uM_ABA_Mutants_cDNA_P Parameter: Tissue Value: Aerial
  misc_feature: MA Experiment 20000071 PARAMETER Experiment Name: At_100uM_ABA_Mutants_cDNA_P Parameter: Treatment Value: 100uM ABA vs. No Treatment
  misc_feature: MA Experiment ID: 20000072 Result: Up-regulated in Transcription
  misc_feature: MA Experiment 20000072 PARAMETER Experiment Name: At_100uM_ABA_Mutants_cDNA_P Parameter: Plant Line Value: CS8105
  misc_feature: MA Experiment 20000072 PARAMETER Experiment Name: At_100uM_ABA_Mutants_cDNA_P Parameter: Timepoint (hr) Value: 6
  misc_feature: MA Experiment 20000072 PARAMETER Experiment Name: At_100uM_ABA_Mutants_cDNA_P Parameter: Tissue Value: Aerial
  misc_feature: MA Experiment 20000072 PARAMETER Experiment Name: At_100uM_ABA_Mutants_cDNA_P Parameter: Treatment Value: 100uM ABA vs. No Treatment
  misc_feature: MA Experiment ID: 20000087 Result: Up-regulated in Transcription
  misc_feature: MA Experiment 20000087 PARAMETER Experiment Name: At_100uM_ABA_Mutants_cDNA_P Parameter: Plant Line Value: WS
  misc_feature: MA Experiment 20000087 PARAMETER Experiment Name: At_100uM_ABA_Mutants_cDNA_P Parameter: Timepoint (hr) Value: 6
  misc_feature: MA Experiment 20000087 PARAMETER Experiment Name: At_100uM_ABA_Mutants_cDNA_P Parameter: Tissue Value: Aerial
  misc_feature: MA Experiment 20000087 PARAMETER Experiment Name: At_100uM_ABA_Mutants_cDNA_P Parameter: Treatment Value: 100uM ABA vs. No Treatment
  misc_feature: MA Experiment ID: 20000111 Result: Down-regulated in Transcription
  misc_feature: MA Experiment 20000111 PARAMETER Experiment Name: At_42deg_Heat_cDNA_P Parameter: Temperature (deg C) Value: 42 vs. 22
  misc_feature: MA Experiment 20000111 PARAMETER Experiment Name: At_42deg_Heat_cDNA_P Parameter: Timepoint (hr) Value: 6
  misc_feature: MA Experiment 20000111 PARAMETER Experiment Name: At_42deg_Heat_cDNA_P Parameter: Tissue Value: Aerial
  misc_feature: MA Experiment ID: 20000113 Result: Down-regulated in Transcription
  misc_feature: MA Experiment 20000113 PARAMETER Experiment Name: At_42deg_Heat_cDNA_P Parameter: Temperature (deg C) Value: 42 vs. 22
  misc_feature: MA Experiment 20000113 PARAMETER Experiment Name: At_42deg_Heat_cDNA_P Parameter: Timepoint (hr) Value: 8
  misc_feature: MA Experiment 20000113 PARAMETER Experiment Name: At_42deg_Heat_cDNA_P Parameter: Tissue Value: Aerial
  misc_feature: MA Experiment ID: 20000117 Result: Up-regulated in Transcription
  misc_feature: MA Experiment 20000117 PARAMETER Experiment Name: At_100uM_ABA_Mutants_cDNA_P Parameter: Plant Line Value: Columbia
  misc_feature: MA Experiment 20000117 PARAMETER Experiment Name: At_100uM_ABA_Mutants_cDNA_P Parameter: Timepoint (hr) Value: 6
  misc_feature: MA Experiment 20000117 PARAMETER Experiment Name: At_100uM_ABA_Mutants_cDNA_P Parameter: Tissue Value: Aerial
  misc_feature: MA Experiment 20000117 PARAMETER Experiment Name: At_100uM_ABA_Mutants_cDNA_P Parameter: Treatment Value: 100uM ABA vs. No Treatment
  misc_feature: MA Experiment ID: 20000144 Result: Down-regulated in Transcription
  misc_feature: MA Experiment 20000144 PARAMETER Experiment Name: At_42deg_Heat_cDNA_P Parameter: Temperature (deg C) Value: 42 vs. 22
  misc_feature: MA Experiment 20000144 PARAMETER Experiment Name: At_42deg_Heat_cDNA_P Parameter: Timepoint (hr) Value: 1
  misc_feature: MA Experiment 20000144 PARAMETER Experiment Name: At_42deg_Heat_cDNA_P Parameter: Tissue Value: Aerial
  misc_feature: MA Experiment ID: 20000171 Result: Down-regulated in Transcription
  misc_feature: MA Experiment 20000171 PARAMETER Experiment Name: At_42deg_Heat_P Parameter: Age (day) Value: 14
  misc_feature: MA Experiment 20000171 PARAMETER Experiment Name: At_42deg_Heat_P Parameter: Organism Value: A. thaliana
  misc_feature: MA Experiment 20000171 PARAMETER Experiment Name: At_42deg_Heat_P Parameter: Plant Line Value: WS
  misc_feature: MA Experiment 20000171 PARAMETER Experiment Name: At_42deg_Heat_P Parameter: Temperature (deg C) Value: 42 vs. 22
  misc_feature: MA Experiment 20000171 PARAMETER Experiment Name: At_42deg_Heat_P Parameter: Timepoint (hr) Value: 1
  misc_feature: MA Experiment 20000171 PARAMETER Experiment Name: At_42deg_Heat_P Parameter: Tissue Value: Aerial
  misc_feature: MA Experiment ID: 20000173 Result: Down-regulated in Transcription
  misc_feature: MA Experiment 20000173 PARAMETER Experiment Name: At_42deg_Heat_P Parameter: Age (day) Value: 14
  misc_feature: MA Experiment 20000173 PARAMETER Experiment Name: At_42deg_Heat_P Parameter: Organism Value: A. thaliana
  misc_feature: MA Experiment 20000173 PARAMETER Experiment Name: At_42deg_Heat_P Parameter: Plant Line Value: WS
  misc_feature: MA Experiment 20000173 PARAMETER Experiment Name: At_42deg_Heat_P Parameter: Temperature (deg C) Value: 42 vs. 22
  misc_feature: MA Experiment 20000173 PARAMETER Experiment Name: At_42deg_Heat_P Parameter: Timepoint (hr) Value: 6
  misc_feature: MA Experiment 20000173 PARAMETER Experiment Name: At_42deg_Heat_P Parameter: Tissue Value: Aerial
  misc_feature: MA Experiment ID: 20000185 Result: Down-regulated in Transcription
  misc_feature: MA Experiment 20000185 PARAMETER Experiment Name: At_Roots__P Parameter: Age (day) Value: 7 vs. 21
  misc_feature: MA Experiment 20000185 PARAMETER Experiment Name: At_Roots__P Parameter: Organism Value: A. thaliana
  misc_feature: MA Experiment 20000185 PARAMETER Experiment Name: At_Roots__P Parameter: Tissue Value: Roots vs. Whole Plant
  misc_feature: MA Experiment ID: 20000227 Result: Down-regulated in Transcription
  misc_feature: MA Experiment 20000227 PARAMETER Experiment Name: At_Root-Tips-vs-Tops_P Parameter: Tissue Value: Root Tips vs. Root Tops
  misc_feature: MA Experiment ID: 20000234 Result: Up-regulated in Transcription
  misc_feature: MA Experiment 20000234 PARAMETER Experiment Name: At_Siliques_P Parameter: Age (day) Value: 21
  misc_feature: MA Experiment 20000234 PARAMETER Experiment Name: At_Siliques_P Parameter: Organism Value: A. thaliana
  misc_feature: MA Experiment 20000234 PARAMETER Experiment Name: At_Siliques_P Parameter: Plant Line Value: WS
  misc_feature: MA Experiment 20000234 PARAMETER Experiment Name: At_Siliques_P Parameter: Tissue Value: Less Than 5mm Siliques vs. Whole Plant
  misc_feature: MA Experiment ID: 20000264 Result: Up-regulated in Transcription
  misc_feature: MA Experiment 20000264 PARAMETER Experiment Name: At_Open_Flower_P Parameter: Age (day) Value: 21
  misc_feature: MA Experiment 20000264 PARAMETER Experiment Name: At_Open_Flower_P Parameter: Plant Line Value: WS
  misc_feature: MA Experiment 20000264 PARAMETER Experiment Name: At_Open_Flower_P Parameter: Tissue Value: Open Flower vs. Whole Plant
  misc_feature: MA Experiment ID: 20000265 Result: Up-regulated in Transcription
  misc_feature: MA Experiment 20000265 PARAMETER Experiment Name: At_Open_Flower_P Parameter: Age (day) Value: 21
  misc_feature: MA Experiment 20000265 PARAMETER Experiment Name: At_Open_Flower_P Parameter: Plant Line Value: WS
  misc_feature: MA Experiment 20000265 PARAMETER Experiment Name: At_Open_Flower_P Parameter: Tissue Value: Closed Flower vs. Whole Plant
  misc_feature: MA Experiment ID: 20000286 Result: Up-regulated in Transcription
  misc_feature: MA Experiment 20000286 PARAMETER Experiment Name: At_Open_Flower_P Parameter: Age (day) Value: 21
  misc_feature: MA Experiment 20000286 PARAMETER Experiment Name: At_Open_Flower_P Parameter: Plant Line Value: WS
  misc_feature: MA Experiment 20000286 PARAMETER Experiment Name: At_Open_Flower_P Parameter: Tissue Value: Half Open vs. Whole Plant
  misc_feature: MA Experiment ID: 20000451 Result: Up-regulated in Transcription
  misc_feature: MA Experiment 20000451 PARAMETER Experiment Name: At_CS6879_Shoots-Roots_P Parameter: Age (day) Value: 14
  misc_feature: MA Experiment 20000451 PARAMETER Experiment Name: At_CS6879_Shoots-Roots_P Parameter: Organism Value: A. thaliana
  misc_feature: MA Experiment 20000451 PARAMETER Experiment Name: At_CS6879_Shoots-Roots_P Parameter: Plant Line Value: CS6879 vs. WS
  misc_feature: MA Experiment 20000451 PARAMETER Experiment Name: At_CS6879_Shoots-Roots_P Parameter: Tissue Value: Roots
  misc_feature: MA Experiment ID: 20000495 Result: Up-regulated in Transcription
  misc_feature: MA Experiment 20000495 PARAMETER Experiment Name: At_Guard_Cells_P Parameter: Harvest Date Value: 8/2/2002
  misc_feature: MA Experiment 20000495 PARAMETER Experiment Name: At_Guard_Cells_P Parameter: Organism Value: A. thaliana
  misc_feature: MA Experiment 20000495 PARAMETER Experiment Name: At_Guard_Cells_P Parameter: Tissue Value: Guard Cells vs. Leaves
  misc_feature: MA Experiment ID: 20000496 Result: Up-regulated in Transcription
  misc_feature: MA Experiment 20000496 PARAMETER Experiment Name: At_Guard_Cells_P Parameter: Harvest Date Value: 7/19/2002
  misc_feature: MA Experiment 20000496 PARAMETER Experiment Name: At_Guard_Cells_P Parameter: Organism Value: Canola
  misc_feature: MA Experiment 20000496 PARAMETER Experiment Name: At_Guard_Cells_P Parameter: Tissue Value: Guard Cells vs. Leaves
  misc_feature: MA Experiment ID: 20000573 Result: Down-regulated in Transcription
  misc_feature: MA Experiment 20000573 PARAMETER Experiment Name: At_100uM_ABA_Mutants__P Parameter: Organism Value: A. thaliana
  misc_feature: MA Experiment 20000573 PARAMETER Experiment Name: At_100uM_ABA_Mutants__P Parameter: Plant Line Value: CS22 vs. Ler wt
  misc_feature: MA Experiment 20000573 PARAMETER Experiment Name: At_100uM_ABA_Mutants__P Parameter: Timepoint (hr) Value: N/A
  misc_feature: MA Experiment 20000573 PARAMETER Experiment Name: At_100uM_ABA_Mutants__P Parameter: Tissue Value: Whole Plant
  misc_feature: MA Experiment 20000573 PARAMETER Experiment Name: At_100uM_ABA_Mutants__P Parameter: Treatment Value: None
  misc_feature: MA Experiment ID: 20001555 Result: Up-regulated in Transcription
  misc_feature: MA Experiment 20001555 PARAMETER Experiment Name: At_Drought_Soil_Dry_P Parameter: Age (day) Value: 24
  misc_feature: MA Experiment 20001555 PARAMETER Experiment Name: At_Drought_Soil_Dry_P Parameter: Organism Value: A. thaliana
  misc_feature: MA Experiment 20001555 PARAMETER Experiment Name: At_Drought_Soil_Dry_P Parameter: Plant Line Value: WS
  misc_feature: MA Experiment 20001555 PARAMETER Experiment Name: At_Drought_Soil_Dry_P Parameter: Post Timepoint (hr) Value: None
  misc_feature: MA Experiment 20001555 PARAMETER Experiment Name: At_Drought_Soil_Dry_P Parameter: Post-Treatment Value: None
  misc_feature: MA Experiment 20001555 PARAMETER Experiment Name: At_Drought_Soil_Dry_P Parameter: Timepoint (day) Value: 10
  misc_feature: MA Experiment 20001555 PARAMETER Experiment Name: At_Drought_Soil_Dry_P Parameter: Treatment Value: Drought vs. No Drought
  misc_feature: MA Experiment ID: 20001559 Result: Up-regulated in Transcription
  misc_feature: MA Experiment 20001559 PARAMETER Experiment Name: At_Drought_Soil_Dry_P Parameter: Age (day) Value: 28
  misc_feature: MA Experiment 20001559 PARAMETER Experiment Name: At_Drought_Soil_Dry_P Parameter: Organism Value: A. thaliana
  misc_feature: MA Experiment 20001559 PARAMETER Experiment Name: At_Drought_Soil_Dry_P Parameter: Plant Line Value: WS
  misc_feature: MA Experiment 20001559 PARAMETER Experiment Name: At_Drought_Soil_Dry_P Parameter: Post Timepoint (hr) Value: 29
  misc_feature: MA Experiment 20001559 PARAMETER Experiment Name: At_Drought_Soil_Dry_P Parameter: Post-Treatment Value: Re-Water vs. No Drought
  misc_feature: MA Experiment 20001559 PARAMETER Experiment Name: At_Drought_Soil_Dry_P Parameter: Timepoint (day) Value: 14
  misc_feature: MA Experiment 20001559 PARAMETER Experiment Name: At_Drought_Soil_Dry_P Parameter: Treatment Value: Drought vs. No Drought
  misc_feature: MA Experiment ID: 20001904 Result: Up-regulated in Transcription
  misc_feature: MA Experiment 20001904 PARAMETER Experiment Name: At_Drought_Reproduction_P Parameter: Age (day) Value: 37
  misc_feature: MA Experiment 20001904 PARAMETER Experiment Name: At_Drought_Reproduction_P Parameter: Organism Value: A. thaliana
  misc_feature: MA Experiment 20001904 PARAMETER Experiment Name: At_Drought_Reproduction_P Parameter: Plant Line Value: WS
  misc_feature: MA Experiment 20001904 PARAMETER Experiment Name: At_Drought_Reproduction_P Parameter: Timepoint (day) Value: 7
  misc_feature: MA Experiment 20001904 PARAMETER Experiment Name: At_Drought_Reproduction_P Parameter: Tissue Value: Rosettes
  misc_feature: MA Experiment 20001904 PARAMETER Experiment Name: At_Drought_Reproduction_P Parameter: Treatment Value: Drought vs. No Drought
  misc_feature: MA Experiment ID: 20001905 Result: Up-regulated in Transcription
  misc_feature: MA Experiment 20001905 PARAMETER Experiment Name: At_Drought_Reproduction_P Parameter: Age (day) Value: 40
  misc_feature: MA Experiment 20001905 PARAMETER Experiment Name: At_Drought_Reproduction_P Parameter: Organism Value: A. thaliana
  misc_feature: MA Experiment 20001905 PARAMETER Experiment Name: At_Drought_Reproduction_P Parameter: Plant Line Value: WS
  misc_feature: MA Experiment 20001905 PARAMETER Experiment Name: At_Drought_Reproduction_P Parameter: Timepoint (day) Value: 10
  misc_feature: MA Experiment 20001905 PARAMETER Experiment Name: At_Drought_Reproduction_P Parameter: Tissue Value: Rosettes
  misc_feature: MA Experiment 20001905 PARAMETER Experiment Name: At_Drought_Reproduction_P Parameter: Treatment Value: Drought vs. No Drought
acacgaaacgattccgcttctccgcttccttcataaatatctcactcatcgtcactacattgttctttcacacgcaattttcatttctctcttaaccgtaaacgaatctctcttctcaaagttttattttctctctgcgatggctcaagaagatgttactgctgttgctactaacggtgctggtccggtggagacgcatcttgtcttcactgagttcaagcagatgttgctcgttgaagctcaaaaggtcggtgacgctgttactttctacaaatctgcttttggtgcgatcgagtctggtcattctctttaccctaagcgtaagcttgaccaagagcttcctcatgttctctcttctgagcttaatctcgctggctcttccttcgttgtttgcgacgtttcctctctccctggtttttctactgcgaaatcggaaggttcgggagtgacttttcttctcggaactaaggatgctgaagccgccgttgcgaaagctgttgacgccggagctgtgaaagtggaggttacggaggcagaagttgaactgggattcaaaggaaaagttacggatccttttggtgtcacttggatcttcgcggagaagaagaccgtgatcaccgacgagaacaaagaggtttagaatctgtcgtcggatctaattcttcgtcggtttctgaacaaaaaaaactatctattatcctaggtttatgcttttattttgtcttttgtggaatccggtaatcagtaaaccggatcgagtaggctaatgactttcggattctaatttcaccccttttgacaaactctaatcttggtgaaattgcatattaatctcgggc

SEQ ID NO: 21804 - protein, 212 aa, Arabidopsis thaliana
  peptide (1)..(212): Ceres Seq. ID no. 12601486
  misc_feature (86)..(197): Pfam Name: Glyoxalase/Bleomycin resistance Pfam Description: Glyoxalase/Bleomycin resistance
  misc_feature (86)..(197): Pfam Name: Glyoxalase/Bleomycin resistance Pfam Description: Glyoxalase/Bleomycin resistance
  misc_feature (86)..(208): Homolog of NCBI NO: 26990157 NR Description: glyoxalase family protein [Pseudomonas putida
  misc_feature (86)..(201): Homolog of NCBI NO: 16263553 NR Description: Hypothetical protein [Sinorhizobium meliloti]
  misc_feature (86)..(208): Homolog of NCBI NO: 26990157 NR Description: glyoxalase family protein [Pseudomonas putida
  misc_feature (67)..(197): Homolog of NCBI NO: 28565534 NR Description: early tobacco anther 1 [Nicotiana tabacum]
  misc_feature (47)..(212): Homolog of NCBI NO: 18422918 NR Description: expressed protein
  misc_feature (86)..(201): Homolog of NCBI NO: 16263553 NR Description: Hypothetical protein [Sinorhizobium meliloti]
  misc_feature (67)..(197): Homolog of NCBI NO: 28565534 NR Description: early tobacco anther 1 [Nicotiana tabacum]
  misc_feature (47)..(212): Homolog of NCBI NO: 18422918 NR Description: expressed protein
HETIPLLRFLHKYLTHRHYIVLSHAIFISLLTVNESLFSKFYFLSAMAQEDVTAVATNGAGPVETHLVFTEFKQMLLVEAQKVGDAVTFYKSAFGAIESGHSLYPKRKLDQELPHVLSSELNLAGSSFVVCDVSSLPGFSTAKSEGSGVTFLLGTKDAEAAVAKAVDAGAVKVEVTEAEVELGFKGKVTDPFGVTWIFAEKKTVITDENKEV

SEQ ID NO: 21805 - protein, 166 aa, Arabidopsis thaliana
  peptide (1)..(166): Ceres Seq. ID no. 12601487
  misc_feature (40)..(151): Pfam Name: Glyoxalase/Bleomycin resistance Pfam Description: Glyoxalase/Bleomycin resistance
  misc_feature (40)..(151): Pfam Name: Glyoxalase/Bleomycin resistance Pfam Description: Glyoxalase/Bleomycin resistance
  misc_feature (40)..(162): Homolog of NCBI NO: 26990157 NR Description: glyoxalase family protein [Pseudomonas putida
  misc_feature (40)..(155): Homolog of NCBI NO: 16263553 NR Description: Hypothetical protein [Sinorhizobium meliloti]
  misc_feature (40)..(162): Homolog of NCBI NO: 26990157 NR Description: glyoxalase family protein [Pseudomonas putida
  misc_feature (21)..(151): Homolog of NCBI NO: 28565534 NR Description: early tobacco anther 1 [Nicotiana tabacum]
  misc_feature (1)..(166): Homolog of NCBI NO: 18422918 NR Description: expressed protein
  misc_feature (40)..(155): Homolog of NCBI NO: 16263553 NR Description: Hypothetical protein [Sinorhizobium meliloti]
  misc_feature (21)..(151): Homolog of NCBI NO: 28565534 NR Description: early tobacco anther 1 [Nicotiana tabacum]
  misc_feature (1)..(166): Homolog of NCBI NO: 18422918 NR Description: expressed protein
MAQEDVTAVATNGAGPVETHLVFTEFKQMLLVEAQKVGDAVTFYKSAFGAIESGHSLYPKRKLDQELPHVLSSELNLAGSSFVVCDVSSLPGFSTAKSEGSGVTFLLGTKDAEAAVAKAVDAGAVKVEVTEAEVELGFKGKVTDPFGVTWIFAEKKTVITDENKEV

SEQ ID NO: 21806 - protein, 138 aa, Arabidopsis thaliana
  peptide (1)..(138): Ceres Seq. ID no. 12601488
  misc_feature (12)..(123): Pfam Name: Glyoxalase/Bleomycin resistance Pfam Description: Glyoxalase/Bleomycin resistance
  misc_feature (12)..(123): Pfam Name: Glyoxalase/Bleomycin resistance Pfam Description: Glyoxalase/Bleomycin resistance
  misc_feature (12)..(134): Homolog of NCBI NO: 26990157 NR Description: glyoxalase family protein [Pseudomonas putida
  misc_feature (12)..(127): Homolog of NCBI NO: 16263553 NR Description: Hypothetical protein [Sinorhizobium meliloti]
  misc_feature (12)..(134): Homolog of NCBI NO: 26990157 NR Description: glyoxalase family protein [Pseudomonas putida
  misc_feature (1)..(123): Homolog of NCBI NO: 28565534 NR Description: early tobacco anther 1 [Nicotiana tabacum]
  misc_feature (1)..(138): Homolog of NCBI NO: 18422918 NR Description: expressed protein
  misc_feature (12)..(127): Homolog of NCBI NO: 16263553 NR Description: Hypothetical protein [Sinorhizobium meliloti]
  misc_feature (1)..(123): Homolog of NCBI NO: 28565534 NR Description: early tobacco anther 1 [Nicotiana tabacum]
  misc_feature (1)..(138): Homolog of NCBI NO: 18422918 NR Description: expressed protein
MLLVEAQKVGDAVTFYKSAFGAIESGHSLYPKRKLDQELPHVLSSELNLAGSSFVVCDVSSLPGFSTAKSEGSGVTFLLGTKDAEAAVAKAVDAGAVKVEVTEAEVELGFKGKVTDPFGVTWIFAEKKTVITDENKEV

SEQ ID NO: 21807 - DNA, 551 bp, Arabidopsis thaliana
  misc_feature (1)..(551): Ceres Seq. ID no. 12331957
  misc_feature: MA Experiment ID: 108461 Result: Up-regulated in Transcription
  misc_feature: MA Experiment 108461 PARAMETER Experiment Name: At_Germinating_Seeds_cDNA_P Parameter: Age (day) Value: 1 vs. 0
  misc_feature: MA Experiment 108461 PARAMETER Experiment Name: At_Germinating_Seeds_cDNA_P Parameter: Tissue Value: Germinating Seeds
  misc_feature: MA Experiment ID: 108595 Result: Down-regulated in Transcription
  misc_feature: MA Experiment 108595 PARAMETER Experiment Name: At_Ler-pi_Ovule_cDNA_P Parameter: Plant Line Value: null
agatcagtgattgttcgatgaacgaagaggagccagacaaagaacacgtggcggattctactatgtcggcggcggcgattgatggtgtggcggctctgagatcggtgtttcagcgggtaaaccaggcggcggagaaagcgggtcgtgggtcggatcagatacgggtcgtagcggtgagtaagacgaaaccagtttctctgattcgccaagtatacgacgctggtcagaggtcttttggagagaattatgtgcaagagatcattgagaaggcacctcagcttccagaagatatagagtggcatttcattgggaatttgcagagcaacaaagtgaagcctttgctatgtaaattgactttgctatttcaaagtcctcatctttagtttttttgtattgagttactaaattgggtgtaaaactccacacttgagttctattcttaattctttggtttgatcagctggtgttcctaaccttgtgaccgtggaaagtgttgatgatgaaaaggtaaaagtttctcttttgtatatttaaagagaaattggtttgtt

SEQ ID NO: 21808 - protein, 126 aa, Arabidopsis thaliana
  peptide (1)..(126): Ceres Seq. ID no. 12331958
  misc_feature (38)..(114): Pfam Name: Alanine racemase, N-terminal domain Pfam Description: Alanine racemase, N-terminal domain
  misc_feature (32)..(109): Homolog of NCBI NO: 27364896 NR Description: Predicted enzyme with a TIM-barrel fold [Vibrio
  misc_feature (37)..(120): Homolog of NCBI NO: 23053894 NR Description: hypothetical protein [Geobacter metallireducens]
  misc_feature (26)..(120): Homolog of NCBI NO: 23111455 NR Description: hypothetical protein [Desulfitobacterium
  misc_feature (21)..(93): Homolog of NCBI NO: 19386825 NR Description: B1147A04.20 [Oryza sativa (japonica
  misc_feature (32)..(120): Homolog of NCBI NO: 21674628 NR Description: conserved hypothetical protein [Chlorobium
  misc_feature (21)..(114): Homolog of NCBI NO: 14030629 NR Description: AT4g26860/F10M23_200 [Arabidopsis thaliana]
  misc_feature (21)..(114): Homolog of NCBI NO: 18416879 NR Description: putative Proline synthetase associated protein
  misc_feature (21)..(114): Homolog of NCBI NO: 7445224 NR Description: hypothetical protein F10M23.200 - Arabidopsis
  misc_feature (6)..(114): Homolog of NCBI NO: 30682530 NR Description: Proline synthetase associated protein -related
  misc_feature (6)..(114): Homolog of NCBI NO: 18391333 NR Description: putative Proline synthetase associated protein
ISDCSMNEEEPDKEHVADSTMSAAAIDGVAALRSVFQRVNQAAEKAGRGSDQIRVVAVSKTKPVSLIRQVYDAGQRSFGENYVQEIIEKAPQLPEDIEWHFIGNLQSNKVKPLLCKLTLLFQSPHL

SEQ ID NO: 21809 - protein, 121 aa, Arabidopsis thaliana
  peptide (1)..(121): Ceres Seq. ID no. 12331959
  misc_feature (33)..(109): Pfam Name: Alanine racemase, N-terminal domain Pfam Description: Alanine racemase, N-terminal domain
  misc_feature (27)..(104): Homolog of NCBI NO: 27364896 NR Description: Predicted enzyme with a TIM-barrel fold [Vibrio
  misc_feature (32)..(115): Homolog of NCBI NO: 23053894 NR Description: hypothetical protein [Geobacter metallireducens]
  misc_feature (21)..(115): Homolog of NCBI NO: 23111455 NR Description: hypothetical protein [Desulfitobacterium
  misc_feature (16)..(88): Homolog of NCBI NO: 19386825 NR Description: B1147A04.20 [Oryza sativa (japonica
  misc_feature (27)..(115): Homolog of NCBI NO: 21674628 NR Description: conserved hypothetical protein [Chlorobium
  misc_feature (16)..(109): Homolog of NCBI NO: 14030629 NR Description: AT4g26860/F10M23_200 [Arabidopsis thaliana]
  misc_feature (16)..(109): Homolog of NCBI NO: 18416879 NR Description: putative Proline synthetase associated protein
  misc_feature (16)..(109): Homolog of NCBI NO: 7445224 NR Description: hypothetical protein F10M23.200 - Arabidopsis
  misc_feature (1)..(109): Homolog of NCBI NO: 30682530 NR Description: Proline synthetase associated protein -related
  misc_feature (1)..(109): Homolog of NCBI NO: 18391333 NR Description: putative Proline synthetase associated protein
MNEEEPDKEHVADSTMSAAAIDGVAALRSVFQRVNQAAEKAGRGSDQIRVVAVSKTKPVSLIRQVYDAGQRSFGENYVQEIIEKAPQLPEDIEWHFIGNLQSNKVKPLLCKLTLLFQSPHL

SEQ ID NO: 21810 - protein, 106 aa, Arabidopsis thaliana
  peptide (1)..(106): Ceres Seq. ID no. 12331960
  misc_feature (18)..(94): Pfam Name: Alanine racemase, N-terminal domain Pfam Description: Alanine racemase, N-terminal domain
  misc_feature (12)..(89): Homolog of NCBI NO: 27364896 NR Description: Predicted enzyme with a TIM-barrel fold [Vibrio
  misc_feature (17)..(100): Homolog of NCBI NO: 23053894 NR Description: hypothetical protein [Geobacter metallireducens]
  misc_feature (6)..(100): Homolog of NCBI NO: 23111455 NR Description: hypothetical protein [Desulfitobacterium
  misc_feature (1)..(73): Homolog of NCBI NO: 19386825 NR Description: B1147A04.20 [Oryza sativa (japonica
  misc_feature (12)..(100): Homolog of NCBI NO: 21674628 NR Description: conserved hypothetical protein [Chlorobium
  misc_feature (1)..(94): Homolog of NCBI NO: 14030629 NR Description: AT4g26860/F10M23_200 [Arabidopsis thaliana]
  misc_feature (1)..(94): Homolog of NCBI NO: 18416879 NR Description: putative Proline synthetase associated protein
  misc_feature (1)..(94): Homolog of NCBI NO: 7445224 NR Description: hypothetical protein F10M23.200 - Arabidopsis
  misc_feature (1)..(94): Homolog of NCBI NO: 30682530 NR Description: Proline synthetase associated protein -related
  misc_feature (1)..(94): Homolog of NCBI NO: 18391333 NR Description: putative Proline synthetase associated protein
MSAAAIDGVAALRSVFQRVNQAAEKAGRGSDQIRVVAVSKTKPVSLIRQVYDAGQRSFGENYVQEIIEKAPQLPEDIEWHFIGNLQSNKVKPLLCKLTLLFQSPHL

SEQ ID NO: 21811 - DNA, 1299 bp, Arabidopsis thaliana
  misc_feature (1)..(1299): Ceres Seq. ID no. 12389208
  misc_feature: MA Experiment ID: 20000185 Result: Up-regulated in Transcription
  misc_feature: MA Experiment 20000185 PARAMETER Experiment Name: At_Roots__P Parameter: Age (day) Value: 7 vs. 21
  misc_feature: MA Experiment 20000185 PARAMETER Experiment Name: At_Roots__P Parameter: Organism Value: A. thaliana
  misc_feature: MA Experiment 20000185 PARAMETER Experiment Name: At_Roots__P Parameter: Tissue Value: Roots vs. Whole Plant
  misc_feature: MA Experiment ID: 20000227 Result: Down-regulated in Transcription
  misc_feature: MA Experiment 20000227 PARAMETER Experiment Name: At_Root-Tips-vs-Tops_P Parameter: Tissue Value: Root Tips vs. Root Tops
  misc_feature: MA Experiment ID: 20000439 Result: Up-regulated in Transcription
  misc_feature: MA Experiment 20000439 PARAMETER Experiment Name: At_Roots__P Parameter: Age (day) Value: 14 vs. 21
  misc_feature: MA Experiment 20000439 PARAMETER Experiment Name: At_Roots__P Parameter: Organism Value: A. thaliana
  misc_feature: MA Experiment 20000439 PARAMETER Experiment Name: At_Roots__P Parameter: Tissue Value: Roots vs. Whole Plant
aaagcgtcgtctcttgttccttccgctgccaacaaaatggagctgtcgtctgcgtccgccatattaagccactcctcctccgccgctcagcttctcagacctaagctcgggtttattgatttgcttcctcgtcgagcgatgatcgtttcttctccttcttcttcgcttcctcgatttttgcggatggaatctcaatctcagcttcgccaatctatctcttgctctgcttcttcttcttcttctatggcattaggtagaattggagaagtaaagagagtaacaaagaagaaggagaagaaacgatcatcgctcgacgaggaagcaaatcaataaacccgagcttaggtctcggaaactgcccgacggaggcgagtcctttagttatggctgacgacgagaagtacggtaacaaaatggttatcagtctcactcctcgcctttatgactatgtcctcaacaaccttcgtgagcatgagattttgaagcaacttcgagaagaaactgccattagtcaaattcaggtgtcacctgatcaagcgcaattgcttgcaatgcttgtagagattcttggagctaaacgatgtattgaagttggagtttacacgggatattcatcactggctgtggcgttggttctaccagaatcagggcgtcttgttgcctgtgataaagatgctaacgctcttgaagttgctaagaggtactacgagcttgccggagtgtctcacaaggtcactgtgaaacatggtcttgcagcagaatctttgatgtctatgattcagaacggtgaagagtccagctatgattttgcatttcttgatgctgataaggcgatgtatcaggagtacttcgaatcgctacttcgactcgtcagggttggtggagtcattgtgattgataatgttctttggcatggatgggttgcggattctacggtgaatgatgagaggaccatcagcctaagaaatttcaacaaaaaattaatggatgatcaacgtgtaagcattagtatggtatcaatcggcgatggtatgaccatatgccgcaagaggtaatcatccgtaaaaaccactcagctcgcagtgaaacctgttccaagatagaagaagtcttcaaacataaaaggattgatgaagccaagatatccagtctcacaaacactaaagactcatcaacttttcccttttcagtcaaaaataagttgaataattgataaaccaatgtgtgggcctattgggctttgatatgtactgttttctatgtccgtttgaggccttttataaaatcgtcttacgaccc

SEQ ID NO: 21812 - protein, 223 aa, Arabidopsis thaliana
  peptide (1)..(223): Ceres Seq. ID no. 12389209
  misc_feature (27)..(223): Pfam Name: O-methyltransferase Pfam Description: O-methyltransferase
  misc_feature (12)..(223): Homolog of NCBI NO: 23043526 NR Description: hypothetical protein [Trichodesmium erythraeum
  misc_feature (10)..(223): Homolog of NCBI NO: 23129851 NR Description: hypothetical protein [Nostoc punctiforme]
  misc_feature (13)..(223): Homolog of NCBI NO: 23126866 NR Description: hypothetical protein [Nostoc punctiforme]
  misc_feature (13)..(222): Homolog of NCBI NO: 17232671 NR Description: O-methyltransferase [Nostoc sp. PCC 7120]
  misc_feature (10)..(223): Homolog of NCBI NO: 16331769 NR Description: O-methyltransferase [Synechocystis sp. PCC 6803]
  misc_feature (13)..(223): Homolog of NCBI NO: 7463011 NR Description: probable O-methyltransferase (EC 2.1.1.-) safC -
  misc_feature (15)..(223): Homolog of NCBI NO: 29654245 NR Description: O-methyltransferase [Coxiella burnetii RSA 493]
  misc_feature (1)..(223): Homolog of NCBI NO: 15228652 NR Description: O-methyltransferase, family 3 family
  misc_feature (1)..(223): Homolog of NCBI NO: 21593560 NR Description: unknown [Arabidopsis thaliana]
  misc_feature (1)..(223): Homolog of NCBI NO: 15228651 NR Description: O-methyltransferase, family 3 family
MADDEKYGNKMVISLTPRLYDYVLNNLREHEILKQLREETAISQIQVSPDQAQLLAMLVEILGAKRCIEVGVYTGYSSLAVALVLPESGRLVACDKDANALEVAKRYYELAGVSHKVTVKHGLAAESLMSMIQNGEESSYDFAFLDADKAMYQEYFESLLRLVRVGGVIVIDNVLWHGWVADSTVNDERTISLRNFNKKLMDDQRVSISMVSIGDGMTICRKR

SEQ ID NO: 21813 - protein, 213 aa, Arabidopsis thaliana
  peptide (1)..(213): Ceres Seq. ID no. 12389210
  misc_feature (17)..(213): Pfam Name: O-methyltransferase Pfam Description: O-methyltransferase
  misc_feature (5)..(213): Homolog of NCBI NO: 29654245 NR Description: O-methyltransferase [Coxiella burnetii RSA 493]
  misc_feature (1)..(213): Homolog of NCBI NO: 16331769 NR Description: O-methyltransferase [Synechocystis sp. PCC 6803]
  misc_feature (3)..(213): Homolog of NCBI NO: 7463011 NR Description: probable O-methyltransferase (EC 2.1.1.-) safC -
  misc_feature (2)..(213): Homolog of NCBI NO: 23043526 NR Description: hypothetical protein [Trichodesmium erythraeum
  misc_feature (1)..(213): Homolog of NCBI NO: 23129851 NR Description: hypothetical protein [Nostoc punctiforme]
  misc_feature (3)..(213): Homolog of NCBI NO: 23126866 NR Description: hypothetical protein [Nostoc punctiforme]
  misc_feature (3)..(212): Homolog of NCBI NO: 17232671 NR Description: O-methyltransferase [Nostoc sp. PCC 7120]
  misc_feature (1)..(213): Homolog of NCBI NO: 15228652 NR Description: O-methyltransferase, family 3 family
  misc_feature (1)..(213): Homolog of NCBI NO: 21593560 NR Description: unknown [Arabidopsis thaliana]
  misc_feature (1)..(213): Homolog of NCBI NO: 15228651 NR Description: O-methyltransferase, family 3 family
MVISLTPRLYDYVLNNLREHEILKQLREETAISQIQVSPDQAQLLAMLVEILGAKRCIEVGVYTGYSSLAVALVLPESGRLVACDKDANALEVAKRYYELAGVSHKVTVKHGLAAESLMSMIQNGEESSYDFAFLDADKAMYQEYFESLLRLVRVGGVIVIDNVLWHGWVADSTVNDERTISLRNFNKKLMDDQRVSISMVSIGDGMTICRKR

SEQ ID NO: 21814 - protein, 167 aa, Arabidopsis thaliana
  peptide (1)..(167): Ceres Seq. ID no. 12389211
  misc_feature (1)..(167): Pfam Name: O-methyltransferase Pfam Description: O-methyltransferase
  misc_feature (1)..(167): Homolog of NCBI NO: 29654245 NR Description: O-methyltransferase [Coxiella burnetii RSA 493]
  misc_feature (1)..(167): Homolog of NCBI NO: 16331769 NR Description: O-methyltransferase [Synechocystis sp. PCC 6803]
  misc_feature (1)..(167): Homolog of NCBI NO: 7463011 NR Description: probable O-methyltransferase (EC 2.1.1.-) safC -
  misc_feature (1)..(167): Homolog of NCBI NO: 23043526 NR Description: hypothetical protein [Trichodesmium erythraeum
  misc_feature (1)..(167): Homolog of NCBI NO: 23129851 NR Description: hypothetical protein [Nostoc punctiforme]
  misc_feature (1)..(167): Homolog of NCBI NO: 23126866 NR Description: hypothetical protein [Nostoc punctiforme]
  misc_feature (1)..(166): Homolog of NCBI NO: 17232671 NR Description: O-methyltransferase [Nostoc sp. PCC 7120]
  misc_feature (1)..(167): Homolog of NCBI NO: 15228652 NR Description: O-methyltransferase, family 3 family
  misc_feature (1)..(167): Homolog of NCBI NO: 21593560 NR Description: unknown [Arabidopsis thaliana]
  misc_feature (1)..(167): Homolog of NCBI NO: 15228651 NR Description: O-methyltransferase, family 3 family
MLVEILGAKRCIEVGVYTGYSSLAVALVLPESGRLVACDKDANALEVAKRYYELAGVSHKVTVKHGLAAESLMSMIQNGEESSYDFAFLDADKAMYQEYFESLLRLVRVGGVIVIDNVLWHGWVADSTVNDERTISLRNFNKKLMDDQRVSISMVSIGDGMTICRKR

SEQ ID NO: 21815 - DNA, 627 bp, Arabidopsis thaliana
  misc_feature (1)..(627): Ceres Seq. ID no. 12388514
  misc_feature: MA Experiment ID: 108595 Result: Up-regulated in Transcription
  misc_feature: MA Experiment 108595 PARAMETER Experiment Name: At_Ler-pi_Ovule_cDNA_P Parameter: Plant Line Value: null
  misc_feature: MA Experiment ID: 20000173 Result: Down-regulated in Transcription
  misc_feature: MA Experiment 20000173 PARAMETER Experiment Name: At_42deg_Heat_P Parameter: Age (day) Value: 14
  misc_feature: MA Experiment 20000173 PARAMETER Experiment Name: At_42deg_Heat_P Parameter: Organism Value: A. thaliana
  misc_feature: MA Experiment 20000173 PARAMETER Experiment Name: At_42deg_Heat_P Parameter: Plant Line Value: WS
  misc_feature: MA Experiment 20000173 PARAMETER Experiment Name: At_42deg_Heat_P Parameter: Temperature (deg C) Value: 42 vs. 22
  misc_feature: MA Experiment 20000173 PARAMETER Experiment Name: At_42deg_Heat_P Parameter: Timepoint (hr) Value: 6
  misc_feature: MA Experiment 20000173 PARAMETER Experiment Name: At_42deg_Heat_P Parameter: Tissue Value: Aerial
  misc_feature: MA Experiment ID: 20000227 Result: Down-regulated in Transcription
  misc_feature: MA Experiment 20000227 PARAMETER Experiment Name: At_Root-Tips-vs-Tops_P Parameter: Tissue Value: Root Tips vs. Root Tops
  misc_feature: MA Experiment ID: 20000495 Result: Down-regulated in Transcription
  misc_feature: MA Experiment 20000495 PARAMETER Experiment Name: At_Guard_Cells_P Parameter: Harvest Date Value: 8/2/2002
  misc_feature: MA Experiment 20000495 PARAMETER Experiment Name: At_Guard_Cells_P Parameter: Organism Value: A. thaliana
  misc_feature: MA Experiment 20000495 PARAMETER Experiment Name: At_Guard_Cells_P Parameter: Tissue Value: Guard Cells vs. Leaves
  misc_feature: MA Experiment ID: 20001451 Result: Down-regulated in Transcription
  misc_feature: MA Experiment 20001451 PARAMETER Experiment Name: At_Far-red-induction_P Parameter: Age (day) Value: 7
  misc_feature: MA Experiment 20001451 PARAMETER Experiment Name: At_Far-red-induction_P Parameter: Light Value: Far-red vs. White
  misc_feature: MA Experiment 20001451 PARAMETER Experiment Name: At_Far-red-induction_P Parameter: Organism Value: A. thaliana
  misc_feature: MA Experiment 20001451 PARAMETER Experiment Name: At_Far-red-induction_P Parameter: Plant Line Value: Columbia
  misc_feature: MA Experiment 20001451 PARAMETER Experiment Name: At_Far-red-induction_P Parameter: Timepoint (hr) Value: 24
  misc_feature: MA Experiment 20001451 PARAMETER Experiment Name: At_Far-red-induction_P Parameter: Tissue Value: Whole Plant
aatttatttttgtttagtttgttacttcgccgtgcgcggcgggagagaacgctggcggaaaaaagaaatcggaaaatcggaaaattggagaaaccctattcgacgaaaaggagagacctttgaatcgaagcttggtgtgtttatactatgaagagtcaatggtctaattttcatcagattgggagaaactctttcttagctgcttctactgtttacgtttcaaacgaattcaacttcttaaacacttctcttcttaatcgaagaagcttctgttttgcagaaggagatcgatccagctttgtagtgttgaaatcggaagcagagttcaacagtgcattgagtaaagctcgagatggatctttgccatcggttttctatttcactgccgcatggtgtggaccttgcaggcttatctctcctgtgatattggagctcagtaataaatatcctgatgtaacaacgtataaggtcgacattgacgagggcggtctatcaaatgctattgggaagttaaatgtatctgctgtgccaacactgcaattcttcaaaggtggcgtgaagaaagcagagattgtaggcgttgatgtggtgaggctgaagagtgtcatggaacaactctacaagtga

SEQ ID NO: 21816 - protein, 159 aa, Arabidopsis thaliana
  peptide (1)..(159): Ceres Seq. ID no. 12388515
  misc_feature (51)..(159): Pfam Name: Thioredoxin Pfam Description: Thioredoxin
  misc_feature (55)..(154): Homolog of NCBI NO: 6323072 NR Description: thioredoxin; Trx1p [Saccharomyces cerevisiae]
  misc_feature (52)..(144): Homolog of NCBI NO: 3915131 NR Description: Thioredoxin H-type (TRX-H) (Phloem sap 13 kDa
  misc_feature (54)..(154): Homolog of NCBI NO: 6321648 NR Description: thioredoxin; Trx2p [Saccharomyces cerevisiae]
  misc_feature (54)..(155): Homolog of NCBI NO: 38048645 NR Description: similar to Drosophila melanogaster thioredoxin
  misc_feature (52)..(156): Homolog of NCBI NO: 14581677 NR Description: Hsp70 interacting protein/thioredoxin chimera
  misc_feature (11)..(156): Homolog of NCBI NO: 27763683 NR Description: thioredoxin o [Chlamydomonas reinhardtii]
  misc_feature (64)..(159): Homolog of NCBI NO: 26453152 NR Description: putative thioredoxin [Arabidopsis thaliana]
  misc_feature (11)..(159): Homolog of NCBI NO: 15226875 NR Description: thioredoxin, putative; protein id: At2g35010.1
  misc_feature (1)..(159): Homolog of NCBI NO: 9755396 NR Description: F17F8.6 [Arabidopsis thaliana]
  misc_feature (1)..(159): Homolog of NCBI NO: 18397764 NR Description: expressed protein
MKSQWSNFHQIGRNSFLAASTVYVSNEFNFLNTSLLNRRSFCFAEGDRSSFVVLKSEAEFNSALSKARDGSLPSVFYFTAAWCGPCRLISPVILELSNKYPDVTTYKVDIDEGGLSNAIGKLNVSAVPTLQFFKGGVKKAEIVGVDVVRLKSVMEQLYK

SEQ ID NO: 21817 - DNA, 766 bp, Arabidopsis thaliana
  misc_feature (1)..(766): Ceres Seq. ID no. 12384599
  misc_feature: MA Experiment ID: 20000179 Result: Up-regulated in Transcription
  misc_feature: MA Experiment 20000179 PARAMETER Experiment Name: At_Germinating_Seeds_P Parameter: Age (hr) Value: 6 vs. 0
  misc_feature: MA Experiment 20000179 PARAMETER Experiment Name: At_Germinating_Seeds_P Parameter: Tissue Value: Germinating Seeds
  misc_feature: MA Experiment ID: 20000180 Result: Up-regulated in Transcription
  misc_feature: MA Experiment 20000180 PARAMETER Experiment Name: At_Germinating_Seeds_P Parameter: Age (hr) Value: 24 vs. 0
  misc_feature: MA Experiment 20000180 PARAMETER Experiment Name: At_Germinating_Seeds_P Parameter: Tissue Value: Germinating Seeds
  misc_feature: MA Experiment ID: 20000185 Result: Down-regulated in Transcription
  misc_feature: MA Experiment 20000185 PARAMETER Experiment Name: At_Roots__P Parameter: Age (day) Value: 7 vs. 21
  misc_feature: MA Experiment 20000185 PARAMETER Experiment Name: At_Roots__P Parameter: Organism Value: A. thaliana
  misc_feature: MA Experiment 20000185 PARAMETER Experiment Name: At_Roots__P Parameter: Tissue Value: Roots vs. Whole Plant
  misc_feature: MA Experiment ID: 20000286 Result: Down-regulated in Transcription
  misc_feature: MA Experiment 20000286 PARAMETER Experiment Name: At_Open_Flower_P Parameter: Age (day) Value: 21
  misc_feature: MA Experiment 20000286 PARAMETER Experiment Name: At_Open_Flower_P Parameter: Plant Line Value: WS
  misc_feature: MA Experiment 20000286 PARAMETER Experiment Name: At_Open_Flower_P Parameter: Tissue Value: Half Open vs. Whole Plant
  misc_feature: MA Experiment ID: 20000437 Result: Down-regulated in Transcription
  misc_feature: MA Experiment 20000437 PARAMETER Experiment Name: At_Drought_P Parameter: Age (day) Value: 8
  misc_feature: MA Experiment 20000437 PARAMETER Experiment Name: At_Drought_P Parameter: Organism Value: A. thaliana
  misc_feature: MA Experiment 20000437 PARAMETER Experiment Name: At_Drought_P Parameter: Plant Line Value: WS
  misc_feature: MA Experiment 20000437 PARAMETER Experiment Name: At_Drought_P Parameter: Timepoint (hr) Value: 24
  misc_feature: MA Experiment 20000437 PARAMETER Experiment Name: At_Drought_P Parameter: Tissue Value: Whole Plant
  misc_feature: MA Experiment 20000437 PARAMETER Experiment Name: At_Drought_P Parameter: Treatment Value: Drought vs. No Drought
  misc_feature: MA Experiment ID: 20000438 Result: Up-regulated in Transcription
  misc_feature: MA Experiment 20000438 PARAMETER Experiment Name: At_Shoots__P Parameter: Age (day) Value: 14
  misc_feature: MA Experiment 20000438 PARAMETER Experiment Name: At_Shoots__P Parameter: Tissue Value: Shoots vs. Whole Plant
  misc_feature: MA Experiment ID: 20000439 Result: Down-regulated in Transcription
  misc_feature: MA Experiment 20000439 PARAMETER Experiment Name: At_Roots__P Parameter: Age (day) Value: 14 vs. 21
  misc_feature: MA Experiment 20000439 PARAMETER Experiment Name: At_Roots__P Parameter: Organism Value: A. thaliana
  misc_feature: MA Experiment 20000439 PARAMETER Experiment Name: At_Roots__P Parameter: Tissue Value: Roots vs. Whole Plant
  misc_feature: MA Experiment ID: 20000496 Result: Down-regulated in Transcription
  misc_feature: MA Experiment 20000496 PARAMETER Experiment Name: At_Guard_Cells_P Parameter: Harvest Date Value: 7/19/2002
  misc_feature: MA Experiment 20000496 PARAMETER Experiment Name: At_Guard_Cells_P Parameter: Organism Value: Canola
  misc_feature: MA Experiment 20000496 PARAMETER Experiment Name: At_Guard_Cells_P Parameter: Tissue Value: Guard Cells vs. Leaves
  misc_feature: MA Experiment ID: 20000794 Result: Down-regulated in Transcription
  misc_feature: MA Experiment 20000794 PARAMETER Experiment Name: At_Petals_P Parameter: Age (day) Value: 23-25 days
  misc_feature: MA Experiment 20000794 PARAMETER Experiment Name: At_Petals_P Parameter: Plant Line Value: WS
  misc_feature: MA Experiment 20000794 PARAMETER Experiment Name: At_Petals_P Parameter: Tissue Value: Petals vs. Whole plant
  misc_feature: MA Experiment ID: 20001248 Result: Down-regulated in Transcription
  misc_feature: MA Experiment 20001248 PARAMETER Experiment Name: At_Far-red-induction_P Parameter: Age (day) Value: 7
  misc_feature: MA Experiment 20001248 PARAMETER Experiment Name: At_Far-red-induction_P Parameter: Light Value: Far-red vs. White
  misc_feature: MA Experiment 20001248 PARAMETER Experiment Name: At_Far-red-induction_P Parameter: Organism Value: A. thaliana
  misc_feature: MA Experiment 20001248 PARAMETER Experiment Name: At_Far-red-induction_P Parameter: Plant Line Value: Columbia
  misc_feature: MA Experiment 20001248 PARAMETER Experiment Name: At_Far-red-induction_P Parameter: Timepoint (hr) Value: 4
  misc_feature: MA Experiment 20001248 PARAMETER Experiment Name: At_Far-red-induction_P Parameter: Tissue Value: Whole Plant
  misc_feature: MA Experiment ID: 20001451 Result: Down-regulated in Transcription
  misc_feature: MA Experiment 20001451 PARAMETER Experiment Name: At_Far-red-induction_P Parameter: Age (day) Value: 7
  misc_feature: MA Experiment 20001451 PARAMETER Experiment Name: At_Far-red-induction_P Parameter: Light Value: Far-red vs. White
  misc_feature: MA Experiment 20001451 PARAMETER Experiment Name: At_Far-red-induction_P Parameter: Organism Value: A. thaliana
  misc_feature: MA Experiment 20001451 PARAMETER Experiment Name: At_Far-red-induction_P Parameter: Plant Line Value: Columbia
  misc_feature: MA Experiment 20001451 PARAMETER Experiment Name: At_Far-red-induction_P Parameter: Timepoint (hr) Value: 24
  misc_feature: MA Experiment 20001451 PARAMETER Experiment Name: At_Far-red-induction_P Parameter: Tissue Value: Whole Plant
  misc_feature: MA Experiment ID: 20001558 Result: Down-regulated in Transcription
  misc_feature: MA Experiment 20001558 PARAMETER Experiment Name: At_Drought_Soil_Dry_P Parameter: Age (day) Value: 27
  misc_feature: MA Experiment 20001558 PARAMETER Experiment Name: At_Drought_Soil_Dry_P Parameter: Organism Value: A. thaliana
  misc_feature: MA Experiment 20001558 PARAMETER Experiment Name: At_Drought_Soil_Dry_P Parameter: Plant Line Value: WS
  misc_feature: MA Experiment 20001558 PARAMETER Experiment Name: At_Drought_Soil_Dry_P Parameter: Post Timepoint (hr) Value: 6
  misc_feature: MA Experiment 20001558 PARAMETER Experiment Name: At_Drought_Soil_Dry_P Parameter: Post-Treatment Value: Re-Water vs. No Drought
  misc_feature: MA Experiment 20001558 PARAMETER Experiment Name: At_Drought_Soil_Dry_P Parameter: Timepoint (day) Value: 13
  misc_feature: MA Experiment 20001558 PARAMETER Experiment Name: At_Drought_Soil_Dry_P Parameter: Treatment Value: Drought vs. No Drought
  misc_feature: MA Experiment ID: 20001757 Result: Up-regulated in Transcription
  misc_feature: MA Experiment 20001757 PARAMETER Experiment Name: At_50mM_NH4NO3_L-to-H_P Parameter: Timepoint (hr) Value: 6
  misc_feature: MA Experiment 20001757 PARAMETER Experiment Name: At_50mM_NH4NO3_L-to-H_P Parameter: Tissue Value: Leaf
  misc_feature: MA Experiment 20001757 PARAMETER Experiment Name: At_50mM_NH4NO3_L-to-H_P Parameter: Treatment Value: 50mM NH4NO3 vs 100mM Mannitol
  misc_feature: MA Experiment ID: 20001905 Result: Down-regulated in Transcription
  misc_feature: MA Experiment 20001905 PARAMETER Experiment Name: At_Drought_Reproduction_P Parameter: Age (day) Value: 40
  misc_feature: MA Experiment 20001905 PARAMETER Experiment Name: At_Drought_Reproduction_P Parameter: Organism Value: A. thaliana
  misc_feature: MA Experiment 20001905 PARAMETER Experiment Name: At_Drought_Reproduction_P Parameter: Plant Line Value: WS
  misc_feature: MA Experiment 20001905 PARAMETER Experiment Name: At_Drought_Reproduction_P Parameter: Timepoint (day) Value: 10
  misc_feature: MA Experiment 20001905 PARAMETER Experiment Name: At_Drought_Reproduction_P Parameter: Tissue Value: Rosettes
  misc_feature: MA Experiment 20001905 PARAMETER Experiment Name: At_Drought_Reproduction_P Parameter: Treatment Value: Drought vs. No Drought
  misc_feature: MA Experiment ID: 20001906 Result: Down-regulated in Transcription
  misc_feature: MA Experiment 20001906 PARAMETER Experiment Name: At_Drought_Reproduction_P Parameter: Age (day) Value: 35
  misc_feature: MA Experiment 20001906 PARAMETER Experiment Name: At_Drought_Reproduction_P Parameter: Organism Value: A. thaliana
  misc_feature: MA Experiment 20001906 PARAMETER Experiment Name: At_Drought_Reproduction_P Parameter: Plant Line Value: WS
  misc_feature: MA Experiment 20001906 PARAMETER Experiment Name: At_Drought_Reproduction_P Parameter: Timepoint (day) Value: 5
  misc_feature: MA Experiment 20001906 PARAMETER Experiment Name: At_Drought_Reproduction_P Parameter: Tissue Value: Siliques
  misc_feature: MA Experiment 20001906 PARAMETER Experiment Name: At_Drought_Reproduction_P Parameter: Treatment Value: Drought vs. No Drought
  misc_feature: MA Experiment ID: 20001908 Result: Down-regulated in Transcription
  misc_feature: MA Experiment 20001908 PARAMETER Experiment Name: At_Drought_Reproduction_P Parameter: Age (day) Value: 40
  misc_feature: MA Experiment 20001908 PARAMETER Experiment Name: At_Drought_Reproduction_P Parameter: Organism Value: A. thaliana
  misc_feature: MA Experiment 20001908 PARAMETER Experiment Name: At_Drought_Reproduction_P Parameter: Plant Line Value: WS
  misc_feature: MA Experiment 20001908 PARAMETER Experiment Name: At_Drought_Reproduction_P Parameter: Timepoint (day) Value: 10
  misc_feature: MA Experiment 20001908 PARAMETER Experiment Name: At_Drought_Reproduction_P Parameter: Tissue Value: Siliques
  misc_feature: MA Experiment 20001908 PARAMETER Experiment Name: At_Drought_Reproduction_P Parameter: Treatment Value: Drought vs. No Drought
ataccaataagcaatttgctcattagagaacagagaaaaaaaaaaaacaatggcaactcaagccgccgggatcttcaactccgccataacaaccgccgcaacctccggcgtcaagaaactccactttttctcaacaacccaccgtcccaaatccctctccttcaccaaaaccgcaatccgcgccgagaaaacagattcctccgccgccgctgctgcagcccccgccacgaaagaagctcccgtgggattcacgccaccgcagctagacccaaacacaccgtctccgatcttcgctggaagcaccggtggtcttctacgtaaagcgcaagtggaagagttctacgttatcacgtggaactcaccgaaagaacagatctttgagatgccgacaggaggagcagcgatcatgagagaaggtccgaatcttctgaagctagcgaggaaagagcagtgtttagctttggggacaaggcttagatccaagtacaagatcacttaccagttttacagagtgtttcctaacggtgaggttcaatatcttcatcctaaagatggtgtttatccagagaaggcgaatccaggaagagaaggtgttggtctcaacatgagatctattgggaaaaatgttagtcccattgaagttaagtttactggcaaacaaagttatgatttgtaagatctgtaaactaaaaaaaaccaaaaactatgtgcatgtggtgatgattatgactatgtttcatgttaatttttaatggattttgttttg

SEQ ID NO: 21818 - protein, 208 aa, Arabidopsis thaliana; identical to SEQ ID NO: 21188
  peptide (1)..(208): Ceres Seq. ID no. 12384600
  misc_feature (70)..(207): Pfam Name: PsaD Pfam Description: PsaD
  misc_feature (5)..(208): Homolog of NCBI NO: 1488649 NR Description: psaD [Spinacia oleracea]
  misc_feature (1)..(208): Homolog of NCBI NO: 34787117 NR Description: putative photosystem I reaction centre PSI-D
  misc_feature (1)..(208): Homolog of NCBI NO: 417544 NR Description: Photosystem I reaction center subunit II,
  misc_feature (1)..(208): Homolog of NCBI NO: 19855891 NR Description: Photosystem I reaction center subunit II,
  misc_feature (1)..(208): Homolog of NCBI NO: 21293 NR Description: 20 kDa protein (AA 1-212) [Spinacia oleracea]
  misc_feature (1)..(208): Homolog of NCBI NO: 72680 NR Description: photosystem I chain II precursor - spinach
  misc_feature (1)..(208): Homolog of NCBI NO: 5732201 NR Description: photosystem I subunit II precursor [Arabidopsis
  misc_feature (1)..(208): Homolog of NCBI NO: 15218708 NR Description: putative photosystem I reaction center subunit II
  misc_feature (1)..(208): Homolog of NCBI NO: 21595031 NR Description: putative photosystem I reaction center subunit II
  misc_feature (1)..(208): Homolog of NCBI NO: 15235503 NR Description: putative photosystem I reaction center subunit II

SEQ ID NO: 21819 - protein, 106 aa, Arabidopsis thaliana
  peptide (1)..(106): Ceres Seq. ID no. 12384601
IPISNLLIREQRKKKNNGNSSRRDLQLRHNNRRNLRRQETPLFLNNPPSQIPLLHQNRNPRRENRFLRRRCCSPRHERSSRGIHATAARPKHTVSDLRWKHRWSST

SEQ ID NO: 21820 - DNA, 707 bp, Arabidopsis thaliana
  misc_feature (1)..(707): Ceres Seq. ID no. 13489159
  misc_feature: MA Experiment ID: 108434 Result: Up-regulated in Transcription
  misc_feature: MA Experiment 108434 PARAMETER Experiment Name: At_Root_Tips_cDNA_P Parameter: Tissue Value: Root Tips
  misc_feature: MA Experiment ID: 108561 Result: Down-regulated in Transcription
  misc_feature: MA Experiment 108561 PARAMETER Experiment Name: At_100uM_ABA_cDNA_P Parameter: Timepoint (hr) Value: 6
  misc_feature: MA Experiment 108561 PARAMETER Experiment Name: At_100uM_ABA_cDNA_P Parameter: Tissue Value: Aerial
  misc_feature: MA Experiment 108561 PARAMETER Experiment Name: At_100uM_ABA_cDNA_P Parameter: Treatment Value: 100uM ABA vs. No Treatment
  misc_feature: MA Experiment ID: 108573 Result: Down-regulated in Transcription
  misc_feature: MA Experiment 108573 PARAMETER Experiment Name: At_Drought_cDNA_P Parameter: Timepoint (hr) Value: 6
  misc_feature: MA Experiment 108573 PARAMETER Experiment Name: At_Drought_cDNA_P Parameter: Tissue Value: Aerial
  misc_feature: MA Experiment 108573 PARAMETER Experiment Name: At_Drought_cDNA_P Parameter: Treatment Value: Drought vs. No Drought
  misc_feature: MA Experiment ID: 108576 Result: Down-regulated in Transcription
  misc_feature: MA Experiment 108576 PARAMETER Experiment Name: At_42deg_Heat_cDNA_P Parameter: Temperature (deg C) Value: 42 vs. 22
  misc_feature: MA Experiment 108576 PARAMETER Experiment Name: At_42deg_Heat_cDNA_P Parameter: Timepoint (hr) Value: 1
  misc_feature: MA Experiment 108576 PARAMETER Experiment Name: At_42deg_Heat_cDNA_P Parameter: Tissue Value: Aerial
  misc_feature: MA Experiment ID: 108579 Result: Up-regulated in Transcription
  misc_feature: MA Experiment 108579 PARAMETER Experiment Name: At_4deg_Cold_cDNA_P Parameter: Temperature (deg C) Value: 4 vs. 22
  misc_feature: MA Experiment 108579 PARAMETER Experiment Name: At_4deg_Cold_cDNA_P Parameter: Timepoint (hr) Value: 6
  misc_feature: MA Experiment 108579 PARAMETER Experiment Name: At_4deg_Cold_cDNA_P Parameter: Tissue Value: Aerial
  misc_feature: MA Experiment ID: 108585 Result: Down-regulated in Transcription
  misc_feature: MA Experiment 108585 PARAMETER Experiment Name: At_5mM_NaNP_cDNA_P Parameter: Timepoint (hr) Value: 6
  misc_feature: MA Experiment 108585 PARAMETER Experiment Name: At_5mM_NaNP_cDNA_P Parameter: Tissue Value: Aerial
  misc_feature: MA Experiment 108585 PARAMETER Experiment Name: At_5mM_NaNP_cDNA_P Parameter: Treatment Value: null
  misc_feature: MA Experiment ID: 20000093 Result: Down-regulated in Transcription
  misc_feature: MA Experiment 20000093 PARAMETER Experiment Name: At_42deg_Heat_cDNA_P Parameter: Temperature (deg C) Value: 42 vs. 22
  misc_feature: MA Experiment 20000093 PARAMETER Experiment Name: At_42deg_Heat_cDNA_P Parameter: Timepoint (hr) Value: 0.5
  misc_feature: MA Experiment 20000093 PARAMETER Experiment Name: At_42deg_Heat_cDNA_P Parameter: Tissue Value: Aerial
  misc_feature: MA Experiment ID: 20000111 Result: Down-regulated in Transcription
  misc_feature: MA Experiment 20000111 PARAMETER Experiment Name: At_42deg_Heat_cDNA_P Parameter: Temperature (deg C) Value: 42 vs. 22
  misc_feature: MA Experiment 20000111 PARAMETER Experiment Name: At_42deg_Heat_cDNA_P Parameter: Timepoint (hr) Value: 6
  misc_feature: MA Experiment 20000111 PARAMETER Experiment Name: At_42deg_Heat_cDNA_P Parameter: Tissue Value: Aerial
  misc_feature: MA Experiment ID: 20000112 Result: Down-regulated in Transcription
  misc_feature: MA Experiment 20000112 PARAMETER Experiment Name: At_42deg_Heat_cDNA_P Parameter: Temperature (deg C) Value: 42 vs. 22
  misc_feature: MA Experiment 20000112 PARAMETER Experiment Name: At_42deg_Heat_cDNA_P Parameter: Timepoint (hr) Value: 2
  misc_feature: MA Experiment 20000112 PARAMETER Experiment Name: At_42deg_Heat_cDNA_P Parameter: Tissue Value: Aerial
  misc_feature: MA Experiment ID: 20000113 Result: Down-regulated in Transcription
  misc_feature: MA Experiment 20000113 PARAMETER Experiment Name: At_42deg_Heat_cDNA_P Parameter: Temperature (deg C) Value: 42 vs. 22
  misc_feature: MA Experiment 20000113 PARAMETER Experiment Name: At_42deg_Heat_cDNA_P Parameter: Timepoint (hr) Value: 8
  misc_feature: MA Experiment 20000113 PARAMETER Experiment Name: At_42deg_Heat_cDNA_P Parameter: Tissue Value: Aerial
  misc_feature: MA Experiment ID: 20000117 Result: Down-regulated in Transcription
  misc_feature: MA Experiment 20000117 PARAMETER Experiment Name: At_100uM_ABA_Mutants_cDNA_P Parameter: Plant Line Value: Columbia
  misc_feature: MA Experiment 20000117 PARAMETER Experiment Name: At_100uM_ABA_Mutants_cDNA_P Parameter: Timepoint (hr) Value: 6
  misc_feature: MA Experiment 20000117 PARAMETER Experiment Name: At_100uM_ABA_Mutants_cDNA_P Parameter: Tissue Value: Aerial
  misc_feature: MA Experiment 20000117 PARAMETER Experiment Name: At_100uM_ABA_Mutants_cDNA_P Parameter: Treatment Value: 100uM ABA vs. No Treatment
  misc_feature: MA Experiment ID: 20000144 Result: Down-regulated in Transcription
  misc_feature: MA Experiment 20000144 PARAMETER Experiment Name: At_42deg_Heat_cDNA_P Parameter: Temperature (deg C) Value: 42 vs. 22
  misc_feature: MA Experiment 20000144 PARAMETER Experiment Name: At_42deg_Heat_cDNA_P Parameter: Timepoint (hr) Value: 1
  misc_feature: MA Experiment 20000144 PARAMETER Experiment Name: At_42deg_Heat_cDNA_P Parameter: Tissue Value: Aerial
  misc_feature: MA Experiment ID: 20000173 Result: Down-regulated in Transcription
  misc_feature: MA Experiment 20000173 PARAMETER Experiment Name: At_42deg_Heat_P Parameter: Age (day) Value: 14
  misc_feature: MA Experiment 20000173 PARAMETER Experiment Name: At_42deg_Heat_P Parameter: Organism Value: A. thaliana
  misc_feature: MA Experiment 20000173 PARAMETER Experiment Name: At_42deg_Heat_P Parameter: Plant Line Value: WS
  misc_feature: MA Experiment 20000173 PARAMETER Experiment Name: At_42deg_Heat_P Parameter: Temperature (deg C) Value: 42 vs. 22
  misc_feature: MA Experiment 20000173 PARAMETER Experiment Name: At_42deg_Heat_P Parameter: Timepoint (hr) Value: 6
  misc_feature: MA Experiment 20000173 PARAMETER Experiment Name: At_42deg_Heat_P Parameter: Tissue Value: Aerial
  misc_feature: MA Experiment ID: 20000213 Result: Up-regulated in Transcription
  misc_feature: MA Experiment 20000213 PARAMETER Experiment Name: At_4deg_Cold_P Parameter: Timepoint (hr) Value: 2
  misc_feature: MA Experiment ID: 20000227 Result: Up-regulated in Transcription
  misc_feature: MA Experiment 20000227 PARAMETER Experiment Name: At_Root-Tips-vs-Tops_P Parameter: Tissue Value: Root Tips vs. Root Tops
  misc_feature: MA Experiment ID: 20000234 Result: Up-regulated in Transcription
  misc_feature: MA Experiment 20000234 PARAMETER Experiment Name: At_Siliques_P Parameter: Age (day) Value: 21
  misc_feature: MA Experiment 20000234 PARAMETER Experiment Name: At_Siliques_P Parameter: Organism Value: A. thaliana
  misc_feature: MA Experiment 20000234 PARAMETER Experiment Name: At_Siliques_P Parameter: Plant Line Value: WS
  misc_feature: MA Experiment 20000234 PARAMETER Experiment Name: At_Siliques_P Parameter: Tissue Value: Less Than 5mm Siliques vs. Whole Plant
  misc_feature: MA Experiment ID: 20000235 Result: Up-regulated in Transcription
  misc_feature: MA Experiment 20000235 PARAMETER Experiment Name: At_Siliques_P Parameter: Age (day) Value: 21
  misc_feature: MA Experiment 20000235 PARAMETER Experiment Name: At_Siliques_P Parameter: Organism Value: A. thaliana
  misc_feature: MA Experiment 20000235 PARAMETER Experiment Name: At_Siliques_P Parameter: Plant Line Value: WS
  misc_feature: MA Experiment 20000235 PARAMETER Experiment Name: At_Siliques_P Parameter: Tissue Value: 5-10mm Siliques vs. Whole Plant
  misc_feature: MA Experiment ID: 20000264 Result: Up-regulated in Transcription
  misc_feature: MA Experiment 20000264 PARAMETER Experiment Name: At_Open_Flower_P Parameter: Age (day) Value: 21
  misc_feature: MA Experiment 20000264 PARAMETER Experiment Name: At_Open_Flower_P Parameter: Plant Line Value: WS
  misc_feature: MA Experiment 20000264 PARAMETER Experiment Name: At_Open_Flower_P Parameter: Tissue Value: Open Flower vs. Whole Plant
  misc_feature: MA Experiment ID: 20000265 Result: Up-regulated in Transcription
  misc_feature: MA Experiment 20000265 PARAMETER Experiment Name: At_Open_Flower_P Parameter: Age (day) Value: 21
  misc_feature: MA Experiment 20000265 PARAMETER Experiment Name: At_Open_Flower_P Parameter: Plant Line Value: WS
  misc_feature: MA Experiment 20000265 PARAMETER Experiment Name: At_Open_Flower_P Parameter: Tissue Value: Closed Flower vs. Whole Plant
  misc_feature: MA Experiment ID: 20000286 Result: Up-regulated in Transcription
  misc_feature: MA Experiment 20000286 PARAMETER Experiment Name: At_Open_Flower_P Parameter: Age (day) Value: 21
  misc_feature: MA Experiment 20000286 PARAMETER Experiment Name: At_Open_Flower_P Parameter: Plant Line Value: WS
  misc_feature: MA Experiment 20000286 PARAMETER Experiment Name: At_Open_Flower_P Parameter: Tissue Value: Half Open vs. Whole Plant
  misc_feature: MA Experiment ID: 20000437 Result: Down-regulated in Transcription
  misc_feature: MA Experiment 20000437 PARAMETER Experiment Name: At_Drought_P Parameter: Age (day) Value: 8
  misc_feature: MA Experiment 20000437 PARAMETER Experiment Name: At_Drought_P Parameter: Organism Value: A. thaliana
  misc_feature: MA Experiment 20000437 PARAMETER Experiment Name: At_Drought_P Parameter: Plant Line Value: WS
  misc_feature: MA Experiment 20000437 PARAMETER Experiment Name: At_Drought_P Parameter: Timepoint (hr) Value: 24
  misc_feature: MA Experiment 20000437 PARAMETER Experiment Name: At_Drought_P Parameter: Tissue Value: Whole Plant
  misc_feature: MA Experiment 20000437 PARAMETER Experiment Name: At_Drought_P Parameter: Treatment Value: Drought vs. No Drought
  misc_feature: MA Experiment ID: 20000441 Result: Down-regulated in Transcription
  misc_feature: MA Experiment 20000441 PARAMETER Experiment Name: At_1uM_BR-BRZ__P Parameter: Tissue Value: Shoot Apices
  misc_feature: MA Experiment 20000441 PARAMETER Experiment Name: At_1uM_BR-BRZ__P Parameter: Treatment Value: 1uM BR vs. No Treatment
  misc_feature: MA Experiment ID: 20000443 Result: Down-regulated in Transcription
  misc_feature: MA Experiment 20000443 PARAMETER Experiment Name: At_1uM_BR-BRZ__P Parameter: Tissue Value: Shoot Apices
  misc_feature: MA Experiment 20000443 PARAMETER Experiment Name: At_1uM_BR-BRZ__P Parameter: Treatment Value: 1uM BRZ vs. No Treatment
  misc_feature: MA Experiment ID: 20001555 Result: Down-regulated in Transcription
  misc_feature: MA Experiment 20001555 PARAMETER Experiment Name: At_Drought_Soil_Dry_P Parameter: Age (day) Value: 24
  misc_feature: MA Experiment 20001555 PARAMETER Experiment Name: At_Drought_Soil_Dry_P Parameter: Organism Value: A. thaliana
  misc_feature: MA Experiment 20001555 PARAMETER Experiment Name: At_Drought_Soil_Dry_P Parameter: Plant Line Value: WS
  misc_feature: MA Experiment 20001555 PARAMETER Experiment Name: At_Drought_Soil_Dry_P Parameter: Post Timepoint (hr) Value: None
  misc_feature: MA Experiment 20001555 PARAMETER Experiment Name: At_Drought_Soil_Dry_P Parameter: Post-Treatment Value: None
  misc_feature: MA Experiment 20001555 PARAMETER Experiment Name: At_Drought_Soil_Dry_P Parameter: Timepoint (day) Value: 10
  misc_feature: MA Experiment 20001555 PARAMETER Experiment Name: At_Drought_Soil_Dry_P Parameter: Treatment Value: Drought vs. No Drought
  misc_feature: MA Experiment ID: 20001556 Result: Down-regulated in Transcription
  misc_feature: MA Experiment 20001556 PARAMETER Experiment Name: At_Drought_Soil_Dry_P Parameter: Age (day) Value: 26
  misc_feature: MA Experiment 20001556 PARAMETER Experiment Name: At_Drought_Soil_Dry_P Parameter: Organism Value: A. thaliana
  misc_feature: MA Experiment 20001556 PARAMETER Experiment Name: At_Drought_Soil_Dry_P Parameter: Plant Line Value: WS
  misc_feature: MA Experiment 20001556 PARAMETER Experiment Name: At_Drought_Soil_Dry_P Parameter: Post Timepoint (hr) Value: None
  misc_feature: MA Experiment 20001556 PARAMETER Experiment Name: At_Drought_Soil_Dry_P Parameter: Post-Treatment Value: None
  misc_feature: MA Experiment 20001556 PARAMETER Experiment Name: At_Drought_Soil_Dry_P Parameter: Timepoint (day) Value: 12
  misc_feature: MA Experiment 20001556 PARAMETER Experiment Name: At_Drought_Soil_Dry_P Parameter: Treatment Value: Drought vs. No Drought
  misc_feature: MA Experiment ID: 20001557 Result: Down-regulated in Transcription
  misc_feature: MA Experiment 20001557 PARAMETER Experiment Name: At_Drought_Soil_Dry_P Parameter: Age (day) Value: 27
  misc_feature: MA Experiment 20001557 PARAMETER Experiment Name: At_Drought_Soil_Dry_P Parameter: Organism Value: A. thaliana
  misc_feature: MA Experiment 20001557 PARAMETER Experiment Name: At_Drought_Soil_Dry_P Parameter: Plant Line Value: WS
  misc_feature: MA Experiment 20001557 PARAMETER Experiment Name: At_Drought_Soil_Dry_P Parameter: Post Timepoint (hr) Value: 3
  misc_feature: MA Experiment 20001557 PARAMETER Experiment Name: At_Drought_Soil_Dry_P Parameter: Post-Treatment Value: Re-Water vs. No Drought
  misc_feature: MA Experiment 20001557 PARAMETER Experiment Name: At_Drought_Soil_Dry_P Parameter: Timepoint (day) Value: 13
  misc_feature: MA Experiment 20001557 PARAMETER Experiment Name: At_Drought_Soil_Dry_P Parameter: Treatment Value: Drought vs. No Drought
  misc_feature: MA Experiment ID: 20001559 Result: Down-regulated in Transcription
  misc_feature: MA Experiment 20001559 PARAMETER Experiment Name: At_Drought_Soil_Dry_P Parameter: Age (day) Value: 28
  misc_feature: MA Experiment 20001559 PARAMETER Experiment Name: At_Drought_Soil_Dry_P Parameter: Organism Value: A. thaliana
  misc_feature: MA Experiment 20001559 PARAMETER Experiment Name: At_Drought_Soil_Dry_P Parameter: Plant Line Value: WS
  misc_feature: MA Experiment 20001559 PARAMETER Experiment Name: At_Drought_Soil_Dry_P Parameter: Post Timepoint (hr) Value: 29
  misc_feature: MA Experiment 20001559 PARAMETER Experiment Name: At_Drought_Soil_Dry_P Parameter: Post-Treatment Value: Re-Water vs. No Drought
  misc_feature: MA Experiment 20001559 PARAMETER Experiment Name: At_Drought_Soil_Dry_P Parameter: Timepoint (day) Value: 14
  misc_feature: MA Experiment 20001559 PARAMETER Experiment Name: At_Drought_Soil_Dry_P Parameter: Treatment Value: Drought vs. No Drought
  misc_feature: MA Experiment ID: 20001560 Result: Up-regulated in Transcription
  misc_feature: MA Experiment 20001560 PARAMETER Experiment Name: At_Drought_Soil_Dry_P Parameter: Age (day) Value: 28
  misc_feature: MA Experiment 20001560 PARAMETER Experiment Name: At_Drought_Soil_Dry_P Parameter: Organism Value: A. thaliana
  misc_feature: MA Experiment 20001560 PARAMETER Experiment Name: At_Drought_Soil_Dry_P Parameter: Plant Line Value: WS
  misc_feature: MA Experiment 20001560 PARAMETER Experiment Name: At_Drought_Soil_Dry_P Parameter: Post Timepoint (hr) Value: None
  misc_feature: MA Experiment 20001560 PARAMETER Experiment Name: At_Drought_Soil_Dry_P Parameter: Post-Treatment Value: None
  misc_feature: MA Experiment 20001560 PARAMETER Experiment Name: At_Drought_Soil_Dry_P Parameter: Timepoint (day) Value: 14
  misc_feature: MA Experiment 20001560 PARAMETER Experiment Name: At_Drought_Soil_Dry_P Parameter: Treatment Value: Drought vs. No Drought
  misc_feature: MA Experiment ID: 20001905 Result: Down-regulated in Transcription
  misc_feature: MA Experiment 20001905 PARAMETER Experiment Name: At_Drought_Reproduction_P Parameter: Age (day) Value: 40
  misc_feature: MA Experiment 20001905 PARAMETER Experiment Name: At_Drought_Reproduction_P Parameter: Organism Value: A. thaliana
  misc_feature: MA Experiment 20001905 PARAMETER Experiment Name: At_Drought_Reproduction_P Parameter: Plant Line Value: WS
  misc_feature: MA Experiment 20001905 PARAMETER Experiment Name: At_Drought_Reproduction_P Parameter: Timepoint (day) Value: 10
  misc_feature: MA Experiment 20001905 PARAMETER Experiment Name: At_Drought_Reproduction_P Parameter: Tissue Value: Rosettes
  misc_feature: MA Experiment 20001905 PARAMETER Experiment Name: At_Drought_Reproduction_P Parameter: Treatment Value: Drought vs. No Drought
  misc_feature: MA Experiment ID: 20001911 Result: Down-regulated in Transcription
  misc_feature: MA Experiment 20001911 PARAMETER Experiment Name: At_Drought_Reproduction_P Parameter: Age (day) Value: 40
  misc_feature: MA Experiment 20001911 PARAMETER Experiment Name: At_Drought_Reproduction_P Parameter: Organism Value: A. thaliana
  misc_feature: MA Experiment 20001911 PARAMETER Experiment Name: At_Drought_Reproduction_P Parameter: Plant Line Value: WS
  misc_feature: MA Experiment 20001911 PARAMETER Experiment Name: At_Drought_Reproduction_P Parameter: Timepoint (day) Value: 10
  misc_feature: MA Experiment 20001911 PARAMETER Experiment Name: At_Drought_Reproduction_P Parameter: Tissue Value: Flowers
  misc_feature: MA Experiment 20001911 PARAMETER Experiment Name: At_Drought_Reproduction_P Parameter: Treatment Value: Drought vs. No Drought
ttcactacaaaatttctcattcgcatcctccacaagaagaaaattcgatcggtcgattagtctttgtttgatttcgaaatggctcgtactaagcaaaccgcgaggaaatccacaggaggcaaagcaccaagaaagcaactcgcaaccaaggcggcaaggaaatctgctccggccaccggaggagtgaagaagccgcatagattccgtccaggaactgttgccttgagagagatcaggaagtatcagaagagcactgagcttctgatccgtaagcttcctttccagcgtctggttcgtgagatagctcaggatttcaagacggatctgaggtttcagagcagtgctgttgctgctttacaagaggctgctgaggcttaccttgttggtttgtttgaagacactaatctttgcgccattcacgctaagagggtcaccatcatgcctaaggatatccagctcgcgaggagaatcagaggagaaagagcttgaagactgttgttatggtttatatcttttgatttagttcgtcaatggaactctatttctggattttgatttgcgttttagtagtaatgggttcttgtaagtgttgagctttggctcgttttaattttcagttgttaggtactttggtttagttagccttgaagtgttcgatgaaataccccaacgaaactctctcctgtttaatagaacttattttcctt

SEQ ID NO: 21821 - protein, 136 aa, Arabidopsis thaliana; identical to SEQ ID NO: 8709
  peptide (1)..(136): Ceres Seq. ID no. 13489160
  misc_feature (17)..(135): Pfam Name: Core histone H2A/H2B/H3/H4 Pfam Description: Core histone H2A/H2B/H3/H4
  misc_feature (1)..(136): Homolog of NCBI NO: 122070 NR Description: Histone H3
  misc_feature (1)..(136): Homolog of NCBI NO: 34876364 NR Description: similar to CG31613-PA [Rattus norvegicus]
  misc_feature (1)..(136): Homolog of NCBI NO: 30061401 NR Description: histone 2, H3ca1 [Mus musculus]
  misc_feature (2)..(136): Homolog of NCBI NO: 122083 NR Description: Histone H3
  misc_feature (2)..(136): Homolog of NCBI NO: 70753 NR Description: histone H3 - garden pea (tentative sequence)
  misc_feature (1)..(136): Homolog of NCBI NO: 166384 NR Description: histone H3 (H3-1.1)
  misc_feature (1)..(136): Homolog of NCBI NO: 37546835 NR Description: similar to histone protein Hist2h3c1 [Homo
  misc_feature (1)..(136): Homolog of NCBI NO: 1362108 NR Description: histone H3 homolog - common tobacco
  misc_feature (1)..(136): Homolog of NCBI NO: 122087 NR Description: Histone H3
  misc_feature (1)..(136): Homolog of NCBI NO: 15232146 NR Description: histone H3 [Arabidopsis thaliana]

SEQ ID NO: 21822 - DNA, 1410 bp, Arabidopsis thaliana
  misc_feature (1)..(1410): Ceres Seq. ID no. 12348573
  misc_feature: MA Experiment ID: 108434 Result: Up-regulated in Transcription
  misc_feature: MA Experiment 108434 PARAMETER Experiment Name: At_Root_Tips_cDNA_P Parameter: Tissue Value: Root Tips
  misc_feature: MA Experiment ID: 108462 Result: Down-regulated in Transcription
  misc_feature: MA Experiment 108462 PARAMETER Experiment Name: At_Germinating_Seeds_cDNA_P Parameter: Age (day) Value: 2 vs. 0
  misc_feature: MA Experiment 108462 PARAMETER Experiment Name: At_Germinating_Seeds_cDNA_P Parameter: Tissue Value: Germinating Seeds
  misc_feature: MA Experiment ID: 108463 Result: Down-regulated in Transcription
  misc_feature: MA Experiment 108463 PARAMETER Experiment Name: At_Germinating_Seeds_cDNA_P Parameter: Age (day) Value: 3 vs. 0
  misc_feature: MA Experiment 108463 PARAMETER Experiment Name: At_Germinating_Seeds_cDNA_P Parameter: Tissue Value: Germinating Seeds
  misc_feature: MA Experiment ID: 108464 Result: Down-regulated in Transcription
  misc_feature: MA Experiment 108464 PARAMETER Experiment Name: At_Germinating_Seeds_cDNA_P Parameter: Age (day) Value: 4 vs. 0
  misc_feature: MA Experiment 108464 PARAMETER Experiment Name: At_Germinating_Seeds_cDNA_P Parameter: Tissue Value: Germinating Seeds
  misc_feature: MA Experiment ID: 108561 Result: Down-regulated in Transcription
  misc_feature: MA Experiment 108561 PARAMETER Experiment Name: At_100uM_ABA_cDNA_P Parameter: Timepoint (hr) Value: 6
  misc_feature: MA Experiment 108561 PARAMETER Experiment Name: At_100uM_ABA_cDNA_P Parameter: Tissue Value: Aerial
  misc_feature: MA Experiment 108561 PARAMETER Experiment Name: At_100uM_ABA_cDNA_P Parameter: Treatment Value: 100uM ABA vs. No Treatment
  misc_feature: MA Experiment ID: 108605 Result: Down-regulated in Transcription
  misc_feature: MA Experiment 108605 PARAMETER Experiment Name: At_100uM_ABA_cDNA_P Parameter: Timepoint (hr) Value: 6
  misc_feature: MA Experiment 108605 PARAMETER Experiment Name: At_100uM_ABA_cDNA_P Parameter: Tissue Value: Aerial
  misc_feature: MA Experiment 108605 PARAMETER Experiment Name: At_100uM_ABA_cDNA_P Parameter: Treatment Value: 100uM ABA vs. No Treatment
  misc_feature: MA Experiment ID: 20000069 Result: Down-regulated in Transcription
  misc_feature: MA Experiment 20000069 PARAMETER Experiment Name: At_100uM_ABA_Mutants_cDNA_P Parameter: Plant Line Value: CS23
  misc_feature: MA Experiment 20000069 PARAMETER Experiment Name: At_100uM_ABA_Mutants_cDNA_P Parameter: Timepoint (hr) Value: 6
  misc_feature: MA Experiment 20000069 PARAMETER Experiment Name: At_100uM_ABA_Mutants_cDNA_P Parameter: Tissue Value: Aerial
  misc_feature: MA Experiment 20000069 PARAMETER Experiment Name: At_100uM_ABA_Mutants_cDNA_P Parameter: Treatment Value: 100uM ABA vs. No Treatment
  misc_feature: MA Experiment ID: 20000117 Result: Down-regulated in Transcription
  misc_feature: MA Experiment 20000117 PARAMETER Experiment Name: At_100uM_ABA_Mutants_cDNA_P Parameter: Plant Line Value: Columbia
  misc_feature: MA Experiment 20000117 PARAMETER Experiment Name: At_100uM_ABA_Mutants_cDNA_P Parameter: Timepoint (hr) Value: 6
  misc_feature: MA Experiment 20000117 PARAMETER Experiment Name: At_100uM_ABA_Mutants_cDNA_P Parameter: Tissue Value: Aerial
  misc_feature: MA Experiment 20000117 PARAMETER Experiment Name: At_100uM_ABA_Mutants_cDNA_P Parameter: Treatment Value: 100uM ABA vs. No Treatment
  misc_feature: MA Experiment ID: 20001557 Result: Up-regulated in Transcription
  misc_feature: MA Experiment 20001557 PARAMETER Experiment Name: At_Drought_Soil_Dry_P Parameter: Age (day) Value: 27
  misc_feature: MA Experiment 20001557 PARAMETER Experiment Name: At_Drought_Soil_Dry_P Parameter: Organism Value: A. thaliana
  misc_feature: MA Experiment 20001557 PARAMETER Experiment Name: At_Drought_Soil_Dry_P Parameter: Plant Line Value: WS
  misc_feature: MA Experiment 20001557 PARAMETER Experiment Name: At_Drought_Soil_Dry_P Parameter: Post Timepoint (hr) Value: 3
  misc_feature: MA Experiment 20001557 PARAMETER Experiment Name: At_Drought_Soil_Dry_P Parameter: Post-Treatment Value: Re-Water vs. No Drought
  misc_feature: MA Experiment 20001557 PARAMETER Experiment Name: At_Drought_Soil_Dry_P Parameter: Timepoint (day) Value: 13
  misc_feature: MA Experiment 20001557 PARAMETER Experiment Name: At_Drought_Soil_Dry_P Parameter: Treatment Value: Drought vs. No Drought
aaaaaagctcttttaggtcactctctatttttcgctccctcgccggactttgctgacgccgccggttatatcttctagtctcattcgtcgacatgaagctcactgttaagactctcaagggtagccattttgagattagggttcttcccaccgacacgataatggcggtgaagaagaatattgaagattcacaaagcaaagacaactatccttgtgggcagcaattactgattcacaatggaaaggttttgaaagatgaaactaccttggtggagaacaaggttaccgaggagggttttcttgtcgtgatgcttagcaagagcaaaactgcaagttcagctggtccctcttctactcagcctacttctaccacgacatctaccatatcttcaaccacgcttgcagctccgtcgacaacccagtctattgctgtgccggcttcaaattctactcccgttcaagaacaaccaacggcacaaagtgacacctatggtcaagctgcttcaactttagttagtggcagtagtattgagcaaatggttcaacaaataatggaaatgggaggaggcagttgggacaaagaaacggttactcgtgcacttcgtgcagcatataacaaccctgagagagcagtggattatctatattctggaattcctgaaacagtaaccattccagcaactaatttatctggagtaggatctggtagagaacttactgctcctcctccctctggaggccctaattcatctcctctggatttgtttccccaggaagcagtttctgatgcagcaggtggagatcttggaacgcttgaattcctcagaggcaatgatcagttccaacaattacgctccatggtcaattccaacccccagattctgcagcctatgcttcaagagctcggaaagcagaacccccaacttctgaggctaattcaagagaaccaagccgaatttcttcagttactaaacgagccctacgaaggatctgacggggatgtggatatcttcgatcaacctgatcaagaaatgccccactcagtcaacgttacccctgaagagcaagaatcaattgaacggcttgaggcaatggggtttgatagagcaatagtcatagaagccttcctttcctgtgaccgtaacgaggaattggctgcaaactatctactagagcactcagcagattttgaagactgaattccgagccttttaacctgaacaaagcacaagattttgttttgtttctccaccccttttatctgaactgttactatgctcagagaatcaaatgattatatcttacacctccatatttaccttgaagaataatctgcgttttccacactgtaaacacaattcattgtgtttctctctactgaaatgattattaacaatatgatatggtttt

SEQ ID NO: 21823 - protein, 368 aa, Arabidopsis thaliana
  peptide (1)..(368): Ceres Seq. ID no. 12348574
  misc_feature (1)..(78): Pfam Name: Ubiquitin family Pfam Description: Ubiquitin family
  misc_feature (1)..(368): Homolog of NCBI NO: 15240922 NR Description: DNA repair protein RAD23 homolog
  misc_feature (1)..(249): Homolog of NCBI NO: 25518044 NR Description: T24D18.27 protein - Arabidopsis thaliana
  misc_feature (1)..(368): Homolog of NCBI NO: 7446460 NR Description: RAD23 protein, isoform II - carrot
  misc_feature (1)..(368): Homolog of NCBI NO: 25387250 NR Description: protein F20B17.8 [imported] - Arabidopsis
  misc_feature (1)..(368): Homolog of NCBI NO: 30409718 NR Description: RAD23-like protein [Arabidopsis thaliana]
  misc_feature (1)..(368): Homolog of NCBI NO: 30699439 NR Description: DNA repair protein RAD23 -related [Arabidopsis
  misc_feature (1)..(368): Homolog of NCBI NO: 30409720 NR Description: RAD23-like protein [Arabidopsis thaliana]
  misc_feature (1)..(368): Homolog of NCBI NO: 22330746 NR Description: DNA repair protein RAD23, putative
  misc_feature (1)..(368): Homolog of NCBI NO: 30409722 NR Description: RAD23-like protein [Arabidopsis thaliana]
  misc_feature (1)..(368): Homolog of NCBI NO: 15221013 NR Description: hypothetical protein; protein id: At1g16190.1
MKLTVKTLKGSHFEIRVLPTDTIMAVKKNIEDSQSKDNYPCGQQLLIHNGKVLKDETTLVENKVTEEGFLVVMLSKSKTASSAGPSSTQPTSTTTSTISSTTLAAPSTTQSIAVPASNSTPVQEQPTAQSDTYGQAASTLVSGSSIEQMVQQIMEMGGGSWDKETVTRALRAAYNNPERAVDYLYSGIPETVTIPATNLSGVGSGRELTAPPPSGGPNSSPLDLFPQEAVSDAAGGDLGTLEFLRGNDQFQQLRSMVNSNPQILQPMLQELGKQNPQLLRLIQENQAEFLQLLNEPYEGSDGDVDIFDQPDQEMPHSVNVTPEEQESIERLEAMGFDRAIVIEAFLSCDRNEELAANYLLEHSADFED

SEQ ID NO: 21824 - protein, 345 aa, Arabidopsis thaliana
  peptide (1)..(345): Ceres Seq. ID no. 12348575
  misc_feature (1)..(55): Pfam Name: Ubiquitin family Pfam Description: Ubiquitin family
  misc_feature (1)..(345): Homolog of NCBI NO: 15240922 NR Description: DNA repair protein RAD23 homolog
  misc_feature (1)..(226): Homolog of NCBI NO: 25518044 NR Description: T24D18.27 protein - Arabidopsis thaliana
  misc_feature (1)..(345): Homolog of NCBI NO: 7446460 NR Description: RAD23 protein, isoform II - carrot
  misc_feature (1)..(345): Homolog of NCBI NO: 25387250 NR Description: protein F20B17.8 [imported] - Arabidopsis
  misc_feature (1)..(345): Homolog of NCBI NO: 30409718 NR Description: RAD23-like protein [Arabidopsis thaliana]
  misc_feature (1)..(345): Homolog of NCBI NO: 30699439 NR Description: DNA repair protein RAD23 -related [Arabidopsis
  misc_feature (1)..(345): Homolog of NCBI NO: 30409720 NR Description: RAD23-like protein [Arabidopsis thaliana]
  misc_feature (1)..(345): Homolog of NCBI NO: 22330746 NR Description: DNA repair protein RAD23, putative
  misc_feature (1)..(345): Homolog of NCBI NO: 30409722 NR Description: RAD23-like protein [Arabidopsis thaliana]
  misc_feature (1)..(345): Homolog of NCBI NO: 15221013 NR Description: hypothetical protein; protein id: At1g16190.1
MAVKKNIEDSQSKDNYPCGQQLLIHNGKVLKDETTLVENKVTEEGFLVVMLSKSKTASSAGPSSTQPTSTTTSTISSTTLAAPSTTQSIAVPASNSTPVQEQPTAQSDTYGQAASTLVSGSSIEQMVQQIMEMGGGSWDKETVTRALRAAYNNPERAVDYLYSGIPETVTIPATNLSGVGSGRELTAPPPSGGPNSSPLDLFPQEAVSDAAGGDLGTLEFLRGNDQFQQLRSMVNSNPQILQPMLQELGKQNPQLLRLIQENQAEFLQLLNEPYEGSDGDVDIFDQPDQEMPHSVNVTPEEQESIERLEAMGFDRAIVIEAFLSCDRNEELAANYLLEHSADFED

SEQ ID NO: 21825 - protein, 296 aa, Arabidopsis thaliana
  peptide (1)..(296): Ceres Seq. ID no. 12348576
  misc_feature (73)..(115): Pfam Name: UBA/TS-N domain Pfam Description: UBA/TS-N domain
  misc_feature (1)..(296): Homolog of NCBI NO: 15240922 NR Description: DNA repair protein RAD23 homolog
  misc_feature (1)..(177): Homolog of NCBI NO: 25518044 NR Description: T24D18.27 protein - Arabidopsis thaliana
  misc_feature (1)..(296): Homolog of NCBI NO: 7446460 NR Description: RAD23 protein, isoform II - carrot
  misc_feature (1)..(296): Homolog of NCBI NO: 25387250 NR Description: protein F20B17.8 [imported] - Arabidopsis
  misc_feature (1)..(296): Homolog of NCBI NO: 30409718 NR Description: RAD23-like protein [Arabidopsis thaliana]
  misc_feature (1)..(296): Homolog of NCBI NO: 30699439 NR Description: DNA repair protein RAD23 -related [Arabidopsis
  misc_feature (1)..(296): Homolog of NCBI NO: 30409720 NR Description: RAD23-like protein [Arabidopsis thaliana]
  misc_feature (1)..(296): Homolog of NCBI NO: 22330746 NR Description: DNA repair protein RAD23, putative
  misc_feature (1)..(296): Homolog of NCBI NO: 30409722 NR Description: RAD23-like protein [Arabidopsis thaliana]
  misc_feature (1)..(296): Homolog of NCBI NO: 15221013 NR Description: hypothetical protein; protein id: At1g16190.1
MLSKSKTASSAGPSSTQPTSTTTSTISSTTLAAPSTTQSIAVPASNSTPVQEQPTAQSDTYGQAASTLVSGSSIEQMVQQIMEMGGGSWDKETVTRALRAAYNNPERAVDYLYSGIPETVTIPATNLSGVGSGRELTAPPPSGGPNSSPLDLFPQEAVSDAAGGDLGTLEFLRGNDQFQQLRSMVNSNPQILQPMLQELGKQNPQLLRLIQENQAEFLQLLNEPYEGSDGDVDIFDQPDQEMPHSVNVTPEEQESIERLEAMGFDRAIVIEAFLSCDRNEELAANYLLEHSADFED

SEQ ID NO: 21826 - DNA, 946 bp, Arabidopsis thaliana
  misc_feature (1)..(946): Ceres Seq. ID no. 13646022
  misc_feature: MA Experiment ID: 108435 Result: Down-regulated in Transcription
  misc_feature: MA Experiment 108435 PARAMETER Experiment Name: At_stm_Mutants_cDNA_P Parameter: Plant Line Value: wt Landsburg vs stm
  misc_feature: MA Experiment 108435 PARAMETER Experiment Name: At_stm_Mutants_cDNA_P Parameter: Tissue Value: Shoot Apical Meristem Region
  misc_feature: MA Experiment ID: 108463 Result: Up-regulated in Transcription
  misc_feature: MA Experiment 108463 PARAMETER Experiment Name: At_Germinating_Seeds_cDNA_P Parameter: Age (day) Value: 3 vs. 0
  misc_feature: MA Experiment 108463 PARAMETER Experiment Name: At_Germinating_Seeds_cDNA_P Parameter: Tissue Value: Germinating Seeds
  misc_feature: MA Experiment ID: 108464 Result: Up-regulated in Transcription
  misc_feature: MA Experiment 108464 PARAMETER Experiment Name: At_Germinating_Seeds_cDNA_P Parameter: Age (day) Value: 4 vs. 0
  misc_feature: MA Experiment 108464 PARAMETER Experiment Name: At_Germinating_Seeds_cDNA_P Parameter: Tissue Value: Germinating Seeds
  misc_feature: MA Experiment ID: 108488 Result: Up-regulated in Transcription
  misc_feature: MA Experiment ID: 108577 Result: Up-regulated in Transcription
  misc_feature: MA Experiment 108577 PARAMETER Experiment Name: At_42deg_Heat_cDNA_P Parameter: Temperature (deg C) Value: 42 vs. 22
  misc_feature: MA Experiment 108577 PARAMETER Experiment Name: At_42deg_Heat_cDNA_P Parameter: Timepoint (hr) Value: 6
  misc_feature: MA Experiment 108577 PARAMETER Experiment Name: At_42deg_Heat_cDNA_P Parameter: Tissue Value: Aerial
  misc_feature: MA Experiment ID: 108594 Result: Down-regulated in Transcription
  misc_feature: MA Experiment 108594 PARAMETER Experiment Name: At_Ler-rhl_Root_cDNA_P Parameter: Plant Line Value: null
  misc_feature: MA Experiment ID: 108595 Result: Down-regulated in Transcription
  misc_feature: MA Experiment 108595 PARAMETER Experiment Name: At_Ler-pi_Ovule_cDNA_P Parameter: Plant Line Value: null
  misc_feature: MA Experiment ID: 20000086 Result: Down-regulated in Transcription
  misc_feature: MA Experiment 20000086 PARAMETER Experiment Name: At_100uM_ABA_Mutants_cDNA_P Parameter: Plant Line Value: CS22
  misc_feature: MA Experiment 20000086 PARAMETER Experiment Name: At_100uM_ABA_Mutants_cDNA_P Parameter: Timepoint (hr) Value: 6
  misc_feature: MA Experiment 20000086 PARAMETER Experiment Name: At_100uM_ABA_Mutants_cDNA_P Parameter: Tissue Value: Aerial
  misc_feature: MA Experiment 20000086 PARAMETER Experiment Name: At_100uM_ABA_Mutants_cDNA_P Parameter: Treatment Value: 100uM ABA vs. No Treatment
  misc_feature: MA Experiment ID: 20000087 Result: Down-regulated in Transcription
  misc_feature: MA Experiment 20000087 PARAMETER Experiment Name: At_100uM_ABA_Mutants_cDNA_P Parameter: Plant Line Value: WS
  misc_feature: MA Experiment 20000087 PARAMETER Experiment Name: At_100uM_ABA_Mutants_cDNA_P Parameter: Timepoint (hr) Value: 6
  misc_feature: MA Experiment 20000087 PARAMETER Experiment Name: At_100uM_ABA_Mutants_cDNA_P Parameter: Tissue Value: Aerial
  misc_feature: MA Experiment 20000087 PARAMETER Experiment Name: At_100uM_ABA_Mutants_cDNA_P Parameter: Treatment Value: 100uM ABA vs. No Treatment
  misc_feature: MA Experiment ID: 20000090 Result: Down-regulated in Transcription
  misc_feature: MA Experiment ID: 20000185 Result: Down-regulated in Transcription
  misc_feature: MA Experiment 20000185 PARAMETER Experiment Name: At_Roots__P Parameter: Age (day) Value: 7 vs. 21
  misc_feature: MA Experiment 20000185 PARAMETER Experiment Name: At_Roots__P Parameter: Organism Value: A. thaliana
  misc_feature: MA Experiment 20000185 PARAMETER Experiment Name: At_Roots__P Parameter: Tissue Value: Roots vs. Whole Plant
  misc_feature: MA Experiment ID: 20000227 Result: Down-regulated in Transcription
  misc_feature: MA Experiment 20000227 PARAMETER Experiment Name: At_Root-Tips-vs-Tops_P Parameter: Tissue Value: Root Tips vs. Root Tops
  misc_feature: MA Experiment ID: 20000234 Result: Down-regulated in Transcription
  misc_feature: MA Experiment 20000234 PARAMETER Experiment Name: At_Siliques_P Parameter: Age (day) Value: 21
  misc_feature: MA Experiment 20000234 PARAMETER Experiment Name: At_Siliques_P Parameter: Organism Value: A. thaliana
  misc_feature: MA Experiment 20000234 PARAMETER Experiment Name: At_Siliques_P Parameter: Plant Line Value: WS
  misc_feature: MA Experiment 20000234 PARAMETER Experiment Name: At_Siliques_P Parameter: Tissue Value: Less Than 5mm Siliques vs. Whole Plant
  misc_feature: MA Experiment ID: 20000235 Result: Down-regulated in Transcription
  misc_feature: MA Experiment 20000235 PARAMETER Experiment Name: At_Siliques_P Parameter: Age (day) Value: 21
  misc_feature: MA Experiment 20000235 PARAMETER Experiment Name: At_Siliques_P Parameter: Organism Value: A. thaliana
  misc_feature: MA Experiment 20000235 PARAMETER Experiment Name: At_Siliques_P Parameter: Plant Line Value: WS
  misc_feature: MA Experiment 20000235 PARAMETER Experiment Name: At_Siliques_P Parameter: Tissue Value: 5-10mm Siliques vs. Whole Plant
  misc_feature: MA Experiment ID: 20000286 Result: Down-regulated in Transcription
  misc_feature: MA Experiment 20000286 PARAMETER Experiment Name: At_Open_Flower_P Parameter: Age (day) Value: 21
  misc_feature: MA Experiment 20000286 PARAMETER Experiment Name: At_Open_Flower_P Parameter: Plant Line Value: WS
  misc_feature: MA Experiment 20000286 PARAMETER Experiment Name: At_Open_Flower_P Parameter: Tissue Value: Half Open vs. Whole Plant
  misc_feature: MA Experiment ID: 20000308 Result: Down-regulated in Transcription
  misc_feature: MA Experiment 20000308 PARAMETER Experiment Name: At_100mM_NaCl__P Parameter: Age (day) Value: 17
  misc_feature: MA Experiment 20000308 PARAMETER Experiment Name: At_100mM_NaCl__P Parameter: Organism Value: A. thaliana
  misc_feature: MA Experiment 20000308 PARAMETER Experiment Name: At_100mM_NaCl__P Parameter: Plant Line Value: WS
  misc_feature: MA Experiment 20000308 PARAMETER Experiment Name: At_100mM_NaCl__P Parameter: Timepoint (hr) Value: 72
  misc_feature: MA Experiment 20000308 PARAMETER Experiment Name: At_100mM_NaCl__P Parameter: Tissue Value: Whole Plant
  misc_feature: MA Experiment 20000308 PARAMETER Experiment Name: At_100mM_NaCl__P Parameter: Treatment Value: 100mM NaCl vs. No Treatment
  misc_feature: MA Experiment ID: 20000438 Result: Up-regulated in Transcription
  misc_feature: MA Experiment 20000438 PARAMETER Experiment Name: At_Shoots__P Parameter: Age (day) Value: 14
  misc_feature: MA Experiment 20000438 PARAMETER Experiment Name: At_Shoots__P Parameter: Tissue Value: Shoots vs. Whole Plant
  misc_feature: MA Experiment ID: 20000439 Result: Down-regulated in Transcription
  misc_feature: MA Experiment 20000439 PARAMETER Experiment Name: At_Roots__P Parameter: Age (day) Value: 14 vs. 21
  misc_feature: MA Experiment 20000439 PARAMETER Experiment Name: At_Roots__P Parameter: Organism Value: A. thaliana
  misc_feature: MA Experiment 20000439 PARAMETER Experiment Name: At_Roots__P Parameter: Tissue Value: Roots vs. Whole Plant
  misc_feature: MA Experiment ID: 20000527 Result: Up-regulated in Transcription
  misc_feature: MA Experiment 20000527 PARAMETER Experiment Name: At_10percent_PEG_P Parameter: Age (day) Value: 20
  misc_feature: MA Experiment 20000527 PARAMETER Experiment Name: At_10percent_PEG_P Parameter: Organism Value: A. thaliana
  misc_feature: MA Experiment 20000527 PARAMETER Experiment Name: At_10percent_PEG_P Parameter: Plant Line Value: WS
  misc_feature: MA Experiment 20000527 PARAMETER Experiment Name: At_10percent_PEG_P Parameter: Timepoint (day) Value: 20
  misc_feature: MA Experiment 20000527 PARAMETER Experiment Name: At_10percent_PEG_P Parameter: Tissue Value: Whole Plant
  misc_feature: MA Experiment 20000527 PARAMETER Experiment Name: At_10percent_PEG_P Parameter: Treatment Value: 10percent PEG vs. No Treatment
  misc_feature: MA Experiment ID: 20001247 Result: Up-regulated in Transcription
  misc_feature: MA Experiment 20001247 PARAMETER Experiment Name: At_Far-red-induction_P Parameter: Age (day) Value: 7
  misc_feature: MA Experiment 20001247 PARAMETER Experiment Name: At_Far-red-induction_P Parameter: Light Value: Far-red vs. White
  misc_feature: MA Experiment 20001247 PARAMETER Experiment Name: At_Far-red-induction_P Parameter: Organism Value: A. thaliana
  misc_feature: MA Experiment 20001247 PARAMETER Experiment Name: At_Far-red-induction_P Parameter: Plant Line Value: Columbia
  misc_feature: MA Experiment 20001247 PARAMETER Experiment Name: At_Far-red-induction_P Parameter: Timepoint (hr) Value: 1
  misc_feature: MA Experiment 20001247 PARAMETER Experiment Name: At_Far-red-induction_P Parameter: Tissue Value: Whole Plant
  misc_feature: MA Experiment ID: 20001248 Result: Down-regulated in Transcription
  misc_feature: MA Experiment 20001248 PARAMETER Experiment Name: At_Far-red-induction_P Parameter: Age (day) Value: 7
  misc_feature: MA Experiment 20001248 PARAMETER Experiment Name: At_Far-red-induction_P Parameter: Light Value: Far-red vs. White
  misc_feature: MA Experiment 20001248 PARAMETER Experiment Name: At_Far-red-induction_P Parameter: Organism Value: A. thaliana
  misc_feature: MA Experiment 20001248 PARAMETER Experiment Name: At_Far-red-induction_P Parameter: Plant Line Value: Columbia
  misc_feature: MA Experiment 20001248 PARAMETER Experiment Name: At_Far-red-induction_P Parameter: Timepoint (hr) Value: 4
  misc_feature: MA Experiment 20001248 PARAMETER Experiment Name: At_Far-red-induction_P Parameter: Tissue Value: Whole Plant
  misc_feature: MA Experiment ID: 20001556 Result: Down-regulated in Transcription
  misc_feature: MA Experiment 20001556 PARAMETER Experiment Name: At_Drought_Soil_Dry_P Parameter: Age (day) Value: 26
  misc_feature: MA Experiment 20001556 PARAMETER Experiment Name: At_Drought_Soil_Dry_P Parameter: Organism Value: A. thaliana
  misc_feature: MA Experiment 20001556 PARAMETER Experiment Name: At_Drought_Soil_Dry_P Parameter: Plant Line Value: WS
  misc_feature: MA Experiment 20001556 PARAMETER Experiment Name: At_Drought_Soil_Dry_P Parameter: Post Timepoint (hr) Value: None
  misc_feature: MA Experiment 20001556 PARAMETER Experiment Name: At_Drought_Soil_Dry_P Parameter: Post-Treatment Value: None
  misc_feature: MA Experiment 20001556 PARAMETER Experiment Name: At_Drought_Soil_Dry_P Parameter: Timepoint (day) Value: 12
  misc_feature: MA Experiment 20001556 PARAMETER Experiment Name: At_Drought_Soil_Dry_P Parameter: Treatment Value: Drought vs. No Drought
  misc_feature: MA Experiment ID: 20001557 Result: Down-regulated in Transcription
  misc_feature: MA Experiment 20001557 PARAMETER Experiment Name: At_Drought_Soil_Dry_P Parameter: Age (day) Value: 27
  misc_feature: MA Experiment 20001557 PARAMETER Experiment Name: At_Drought_Soil_Dry_P Parameter: Organism Value: A. thaliana
  misc_feature: MA Experiment 20001557 PARAMETER Experiment Name: At_Drought_Soil_Dry_P Parameter: Plant Line Value: WS
  misc_feature: MA Experiment 20001557 PARAMETER Experiment Name: At_Drought_Soil_Dry_P Parameter: Post Timepoint (hr) Value: 3
  misc_feature: MA Experiment 20001557 PARAMETER Experiment Name: At_Drought_Soil_Dry_P Parameter: Post-Treatment Value: Re-Water vs. No Drought
  misc_feature: MA Experiment 20001557 PARAMETER Experiment Name: At_Drought_Soil_Dry_P Parameter: Timepoint (day) Value: 13
  misc_feature: MA Experiment 20001557 PARAMETER Experiment Name: At_Drought_Soil_Dry_P Parameter: Treatment Value: Drought vs. No Drought
  misc_feature: MA Experiment ID: 20001558 Result: Down-regulated in Transcription
  misc_feature: MA Experiment 20001558 PARAMETER Experiment Name: At_Drought_Soil_Dry_P Parameter: Age (day) Value: 27
  misc_feature: MA Experiment 20001558 PARAMETER Experiment Name: At_Drought_Soil_Dry_P Parameter: Organism Value: A. thaliana
  misc_feature: MA Experiment 20001558 PARAMETER Experiment Name: At_Drought_Soil_Dry_P Parameter: Plant Line Value: WS
  misc_feature: MA Experiment 20001558 PARAMETER Experiment Name: At_Drought_Soil_Dry_P Parameter: Post Timepoint (hr) Value: 6
  misc_feature: MA Experiment 20001558 PARAMETER Experiment Name: At_Drought_Soil_Dry_P Parameter: Post-Treatment Value: Re-Water vs. No Drought
  misc_feature: MA Experiment 20001558 PARAMETER Experiment Name: At_Drought_Soil_Dry_P Parameter: Timepoint (day) Value: 13
  misc_feature: MA Experiment 20001558 PARAMETER Experiment Name: At_Drought_Soil_Dry_P Parameter: Treatment Value: Drought vs. No Drought
  misc_feature: MA Experiment ID: 20001559 Result: Down-regulated in Transcription
  misc_feature: MA Experiment 20001559 PARAMETER Experiment Name: At_Drought_Soil_Dry_P Parameter: Age (day) Value: 28
  misc_feature: MA Experiment 20001559 PARAMETER Experiment Name: At_Drought_Soil_Dry_P Parameter: Organism Value: A. thaliana
  misc_feature: MA Experiment 20001559 PARAMETER Experiment Name: At_Drought_Soil_Dry_P Parameter: Plant Line Value: WS
  misc_feature: MA Experiment 20001559 PARAMETER Experiment Name: At_Drought_Soil_Dry_P Parameter: Post Timepoint (hr) Value: 29
  misc_feature: MA Experiment 20001559 PARAMETER Experiment Name: At_Drought_Soil_Dry_P Parameter: Post-Treatment Value: Re-Water vs. No Drought
  misc_feature: MA Experiment 20001559 PARAMETER Experiment Name: At_Drought_Soil_Dry_P Parameter: Timepoint (day) Value: 14
  misc_feature: MA Experiment 20001559 PARAMETER Experiment Name: At_Drought_Soil_Dry_P Parameter: Treatment Value: Drought vs. No Drought
  misc_feature: MA Experiment ID: 20001560 Result: Down-regulated in Transcription
  misc_feature: MA Experiment 20001560 PARAMETER Experiment Name: At_Drought_Soil_Dry_P Parameter: Age (day) Value: 28
  misc_feature: MA Experiment 20001560 PARAMETER Experiment Name: At_Drought_Soil_Dry_P Parameter: Organism Value: A. thaliana
  misc_feature: MA Experiment 20001560 PARAMETER Experiment Name: At_Drought_Soil_Dry_P Parameter: Plant Line Value: WS
  misc_feature: MA Experiment 20001560 PARAMETER Experiment Name: At_Drought_Soil_Dry_P Parameter: Post Timepoint (hr) Value: None
  misc_feature: MA Experiment 20001560 PARAMETER Experiment Name: At_Drought_Soil_Dry_P Parameter: Post-Treatment Value: None
  misc_feature: MA Experiment 20001560 PARAMETER Experiment Name: At_Drought_Soil_Dry_P Parameter: Timepoint (day) Value: 14
  misc_feature: MA Experiment 20001560 PARAMETER Experiment Name: At_Drought_Soil_Dry_P Parameter: Treatment Value: Drought vs. No Drought
  misc_feature: MA Experiment ID: 20001757 Result: Up-regulated in Transcription
  misc_feature: MA Experiment 20001757 PARAMETER Experiment Name: At_50mM_NH4NO3_L-to-H_P Parameter: Timepoint (hr) Value: 6
  misc_feature: MA Experiment 20001757 PARAMETER Experiment Name: At_50mM_NH4NO3_L-to-H_P Parameter: Tissue Value: Leaf
  misc_feature: MA Experiment 20001757 PARAMETER Experiment Name: At_50mM_NH4NO3_L-to-H_P Parameter: Treatment Value: 50mM NH4NO3 vs 100mM Mannitol
  misc_feature: MA Experiment ID: 20001904 Result: Down-regulated in Transcription
  misc_feature: MA Experiment 20001904 PARAMETER Experiment Name: At_Drought_Reproduction_P Parameter: Age (day) Value: 37
  misc_feature: MA Experiment 20001904 PARAMETER Experiment Name: At_Drought_Reproduction_P Parameter: Organism Value: A. thaliana
  misc_feature: MA Experiment 20001904 PARAMETER Experiment Name: At_Drought_Reproduction_P Parameter: Plant Line Value: WS
  misc_feature: MA Experiment 20001904 PARAMETER Experiment Name: At_Drought_Reproduction_P Parameter: Timepoint (day) Value: 7
  misc_feature: MA Experiment 20001904 PARAMETER Experiment Name: At_Drought_Reproduction_P Parameter: Tissue Value: Rosettes
  misc_feature: MA Experiment 20001904 PARAMETER Experiment Name: At_Drought_Reproduction_P Parameter: Treatment Value: Drought vs. No Drought
  misc_feature: MA Experiment ID: 20001905 Result: Down-regulated in Transcription
  misc_feature: MA Experiment 20001905 PARAMETER Experiment Name: At_Drought_Reproduction_P Parameter: Age (day) Value: 40
  misc_feature: MA Experiment 20001905 PARAMETER Experiment Name: At_Drought_Reproduction_P Parameter: Organism Value: A. thaliana
  misc_feature: MA Experiment 20001905 PARAMETER Experiment Name: At_Drought_Reproduction_P Parameter: Plant Line Value: WS
  misc_feature: MA Experiment 20001905 PARAMETER Experiment Name: At_Drought_Reproduction_P Parameter: Timepoint (day) Value: 10
  misc_feature: MA Experiment 20001905 PARAMETER Experiment Name: At_Drought_Reproduction_P Parameter: Tissue Value: Rosettes
  misc_feature: MA Experiment 20001905 PARAMETER Experiment Name: At_Drought_Reproduction_P Parameter: Treatment Value: Drought vs. No Drought
ctcggtttcactattgaacgtgtaacactggtcgaaagaagacgaacataaactcgtctccatgactacttcatcttcttcgtacggaacattctctacagtcttcaacagttctagacctaattcctcagcaacctttctcgtcccttccttgaaattctccaccggaatatcgaatttcgcgaatctgagtaatgggttttctctaaaatctccaattaatcctgggtttctcttcaagtctcgtcctttcactgtccaagctagagctgctgcagaaaaaaccgttcacgatttcaccgttaaggacattgatgggaaggatgttgctttgaacaaattcaaggggaaagttatgttgattgtcaatgttgcttcaagatgtggtttgacatcatcaaattactcagagctttcacatctgtacgagaaatacaaaactcaaggatttgagattctagcttttccctgcaatcagtttggtttccaagagcccgggtcaaactccgagatcaaacaattcgcttgcacccggtttaaagcagagttccctatatttgataaggttgacgtgaatggaccaagcacaagcgccgatctacgagttcttgaaatcaaacgcaggaggattcttgggtggtctcattaaatggaactttgagaagttcttgattgataaaaagggaaaggtcgttgagaggtaccctcccaccacatcccctttccaaatcgagaaagacatccagaagttgcttgccgcttaaaaacttttgctcatgagtgagcatatagagactgatggttaaagtaaccgtaaattgtgacataaagtttccggttattgcttgtataccttcttacattctaagttgtactaatcgcttaataatttgcgtataatggtaatgttatatacattatattataaaaatggtgttatatatgc

SEQ ID NO: 21827 - protein, 195 aa, Arabidopsis thaliana
  peptide (1)..(195): Ceres Seq. ID no. 13646023
  misc_feature (75)..(177): Pfam Name: Glutathione peroxidase Pfam Description: Glutathione peroxidase
  misc_feature (1)..(192): Homolog of NCBI NO: 15224678 NR Description: glutathione peroxidase, putative [Arabidopsis
  misc_feature (68)..(192): Homolog of NCBI NO: 38345591 NR Description: OSJNBb0012E24.9 [Oryza sativa (japonica
  misc_feature (68)..(192): Homolog of NCBI NO: 6179604 NR Description: glutathione peroxidase-like protein GPX54Hv
  misc_feature (68)..(192): Homolog of NCBI NO: 27544804 NR Description: phospholipid hydroperoxide glutathione
  misc_feature (7)..(192): Homolog of NCBI NO: 22329066 NR Description: glutathione peroxidase, putative [Arabidopsis
  misc_feature (7)..(192): Homolog of NCBI NO: 7433114 NR Description: glutathione peroxidase (EC 1.11.1.9) F11C18.70 -
  misc_feature (68)..(192): Homolog of NCBI NO: 22268405 NR Description: putative glutathione peroxidase [Zea mays]
  misc_feature (68)..(192): Homolog of NCBI NO: 21360380 NR Description: glutathione peroxidase 1 [Oryza sativa]
  misc_feature (18)..(192): Homolog of NCBI NO: 6179600 NR Description: GPX12Hv, glutathione peroxidase-like protein
  misc_feature (1)..(195): Homolog of NCBI NO: 2129599 NR Description: glutathione peroxidase (EC 1.11.1.9) precursor -
MTTSSSSYGTFSTVFNSSRPNSSATFLVPSLKFSTGISNFANLSNGFSLKSPINPGFLFKSRPFTVQARAAAEKTVHDFTVKDIDGKDVALNKFKGKVMLIVNVASRCGLTSSNYSELSHLYEKYKTQGFEILAFPCNQFGFQEPGSNSEIKQFACTRFKAEFPIFDKVDVNGPSTSADLRVLEIKRRRILGWSH

SEQ ID NO: 21828 - protein, 97 aa, Arabidopsis thaliana
  peptide (1)..(97): Ceres Seq. ID no. 13646024
  misc_feature (1)..(79): Pfam Name: Glutathione peroxidase Pfam Description: Glutathione peroxidase
  misc_feature (1)..(94): Homolog of NCBI NO: 38345591 NR Description: OSJNBb0012E24.9 [Oryza sativa (japonica
  misc_feature (1)..(94): Homolog of NCBI NO: 6179604 NR Description: glutathione peroxidase-like protein GPX54Hv
  misc_feature (1)..(94): Homolog of NCBI NO: 27544804 NR Description: phospholipid hydroperoxide glutathione
  misc_feature (1)..(94): Homolog of NCBI NO: 22329066 NR Description: glutathione peroxidase, putative [Arabidopsis
  misc_feature (1)..(94): Homolog of NCBI NO: 7433114 NR Description: glutathione peroxidase (EC 1.11.1.9) F11C18.70 -
  misc_feature (1)..(94): Homolog of NCBI NO: 22268405 NR Description: putative glutathione peroxidase [Zea mays]
  misc_feature (1)..(94): Homolog of NCBI NO: 21360380 NR Description: glutathione peroxidase 1 [Oryza sativa]
  misc_feature (1)..(94): Homolog of NCBI NO: 6179600 NR Description: GPX12Hv, glutathione peroxidase-like protein
  misc_feature (1)..(97): Homolog of NCBI NO: 2129599 NR Description: glutathione peroxidase (EC 1.11.1.9) precursor -
  misc_feature (1)..(94): Homolog of NCBI NO: 15224678 NR Description: glutathione peroxidase, putative [Arabidopsis
MLIVNVASRCGLTSSNYSELSHLYEKYKTQGFEILAFPCNQFGFQEPGSNSEIKQFACTRFKAEFPIFDKVDVNGPSTSADLRVLEIKRRRILGWSH

SEQ ID NO: 21829 - DNA, 1090 bp, Arabidopsis thaliana
  misc_feature (1)..(1090): Ceres Seq. ID no. 12394073
  misc_feature: MA Experiment ID: 108434 Result: Up-regulated in Transcription
  misc_feature: MA Experiment 108434 PARAMETER Experiment Name: At_Root_Tips_cDNA_P Parameter: Tissue Value: Root Tips
  misc_feature: MA Experiment ID: 20000180 Result: Up-regulated in Transcription
  misc_feature: MA Experiment 20000180 PARAMETER Experiment Name: At_Germinating_Seeds_P Parameter: Age (hr) Value: 24 vs. 0
  misc_feature: MA Experiment 20000180 PARAMETER Experiment Name: At_Germinating_Seeds_P Parameter: Tissue Value: Germinating Seeds
acaattactgcctctgcctgttacttgttctgctccgtcgctcagataggatctcaacaagacaccacaaaccctaaatttcgtcaactccacagcgactcgattcgatcaaggaaatggcgtacgcttctcgttttctctccagatctaagcagctacaggggggtctggtcattttgcagcagcaacatgctattccagtccgagcttttgctaaggaagctgctcgtccaacctttaaaggagatgagatgttgaagggtgtcttttttgatatcaagaacaaattccaggctgctgttgatattctccgtaaggaaaagatcacccttgatccagaggacccagctgccgtaaaacagtatgcaaatgtaatgaagaccatcaggcaaaaggcagacatgttctcagaatctcagcgcattaaacatgacattgatactgagactcaagacattccagatgctcgtgcatacttgttgaagttgcaggaaattcgcaccaggagggggcttactgatgagcttggtgctgaggccatgatgttcgaggctttggagaaagtcgagaaggacataaagaagcctctcctgagaagtgacaagaaaggaatggatcttttggttgcagagtttgagaaaggcaacaaaaagcttgggattaggaaagaagatcttcctaagtacgaagaaaatttggagctcagcatggccaaagcacagttggatgagctgaagagtgatgctgttgaagctatggaatctcagaaaaagaaggaggaattccaggatgaggaaatgccggacgtgaagtctctagacatccgtaacttcatctaaggtttgatccttagaaacatttgatttgttgtaagaaaaggcaaagatctctcacttgattgtctttgaaagagaagatcgttcccttgctgctgttttggtttggcgttcaataaggtctctcacctggatttgagtctaactctctctgtggttattacgcttgagattcttagacacaaacgttgtttcatgtttttttgataatggtgatcactggaatttgagataattaataaaagttgtgatgg

SEQ ID NO: 21830 - protein, 240 aa, Arabidopsis thaliana
  peptide (1)..(240): Ceres Seq. ID no. 12394074
  misc_feature (1)..(220): Homolog of NCBI NO: 30681554 NR Description: ATP synthase -related [Arabidopsis thaliana]
  misc_feature (1)..(240): Homolog of NCBI NO: 21592716 NR Description: putative ATP synthase [Arabidopsis thaliana]
  misc_feature (1)..(240): Homolog of NCBI NO: 15227104 NR Description: putative ATP synthase
MAYASRFLSRSKQLQGGLVILQQQHAIPVRAFAKEAARPTFKGDEMLKGVFFDIKNKFQAAVDILRKEKITLDPEDPAAVKQYANVMKTIRQKADMFSESQRIKHDIDTETQDIPDARAYLLKLQEIRTRRGLTDELGAEAMMFEALEKVEKDIKKPLLRSDKKGMDLLVAEFEKGNKKLGIRKEDLPKYEENLELSMAKAQLDELKSDAVEAMESQKKKEEFQDEEMPDVKSLDIRNFI

SEQ ID NO: 21831 - protein, 195 aa, Arabidopsis thaliana
  peptide (1)..(195): Ceres Seq. ID no. 12394075
  misc_feature (1)..(175): Homolog of NCBI NO: 30681554 NR Description: ATP synthase -related [Arabidopsis thaliana]
  misc_feature (1)..(195): Homolog of NCBI NO: 21592716 NR Description: putative ATP synthase [Arabidopsis thaliana]
  misc_feature (1)..(195): Homolog of NCBI NO: 15227104 NR Description: putative ATP synthase
MLKGVFFDIKNKFQAAVDILRKEKITLDPEDPAAVKQYANVMKTIRQKADMFSESQRIKHDIDTETQDIPDARAYLLKLQEIRTRRGLTDELGAEAMMFEALEKVEKDIKKPLLRSDKKGMDLLVAEFEKGNKKLGIRKEDLPKYEENLELSMAKAQLDELKSDAVEAMESQKKKEEFQDEEMPDVKSLDIRNFI

SEQ ID NO: 21832 - protein, 154 aa, Arabidopsis thaliana
  peptide (1)..(154): Ceres Seq. ID no. 12394076
  misc_feature (1)..(134): Homolog of NCBI NO: 30681554 NR Description: ATP synthase -related [Arabidopsis thaliana]
  misc_feature (1)..(154): Homolog of NCBI NO: 21592716 NR Description: putative ATP synthase [Arabidopsis thaliana]
  misc_feature (1)..(154): Homolog of NCBI NO: 15227104 NR Description: putative ATP synthase
MKTIRQKADMFSESQRIKHDIDTETQDIPDARAYLLKLQEIRTRRGLTDELGAEAMMFEALEKVEKDIKKPLLRSDKKGMDLLVAEFEKGNKKLGIRKEDLPKYEENLELSMAKAQLDELKSDAVEAMESQKKKEEFQDEEMPDVKSLDIRNFI

SEQ ID NO: 21833 - DNA, 625 bp, Arabidopsis thaliana
  misc_feature (1)..(625): Ceres Seq. ID no. 12331135
  misc_feature: MA Experiment ID: 108463 Result: Down-regulated in Transcription
  misc_feature: MA Experiment 108463 PARAMETER Experiment Name: At_Germinating_Seeds_cDNA_P Parameter: Age (day) Value: 3 vs. 0
  misc_feature: MA Experiment 108463 PARAMETER Experiment Name: At_Germinating_Seeds_cDNA_P Parameter: Tissue Value: Germinating Seeds
  misc_feature: MA Experiment ID: 108488 Result: Down-regulated in Transcription
  misc_feature: MA Experiment ID: 20000794 Result: Up-regulated in Transcription
  misc_feature: MA Experiment 20000794 PARAMETER Experiment Name: At_Petals_P Parameter: Age (day) Value: 23-25 days
  misc_feature: MA Experiment 20000794 PARAMETER Experiment Name: At_Petals_P Parameter: Plant Line Value: WS
  misc_feature: MA Experiment 20000794 PARAMETER Experiment Name: At_Petals_P Parameter: Tissue Value: Petals vs. Whole plant
  misc_feature: MA Experiment ID: 20001558 Result: Up-regulated in Transcription
  misc_feature: MA Experiment 20001558 PARAMETER Experiment Name: At_Drought_Soil_Dry_P Parameter: Age (day) Value: 27
  misc_feature: MA Experiment 20001558 PARAMETER Experiment Name: At_Drought_Soil_Dry_P Parameter: Organism Value: A. thaliana
  misc_feature: MA Experiment 20001558 PARAMETER Experiment Name: At_Drought_Soil_Dry_P Parameter: Plant Line Value: WS
  misc_feature: MA Experiment 20001558 PARAMETER Experiment Name: At_Drought_Soil_Dry_P Parameter: Post Timepoint (hr) Value: 6
  misc_feature: MA Experiment 20001558 PARAMETER Experiment Name: At_Drought_Soil_Dry_P Parameter: Post-Treatment Value: Re-Water vs. No Drought
  misc_feature: MA Experiment 20001558 PARAMETER Experiment Name: At_Drought_Soil_Dry_P Parameter: Timepoint (day) Value: 13
  misc_feature: MA Experiment 20001558 PARAMETER Experiment Name: At_Drought_Soil_Dry_P Parameter: Treatment Value: Drought vs. No Drought
  misc_feature: MA Experiment ID: 20001560 Result: Up-regulated in Transcription
  misc_feature: MA Experiment 20001560 PARAMETER Experiment Name: At_Drought_Soil_Dry_P Parameter: Age (day) Value: 28
  misc_feature: MA Experiment 20001560 PARAMETER Experiment Name: At_Drought_Soil_Dry_P Parameter: Organism Value: A. thaliana
  misc_feature: MA Experiment 20001560 PARAMETER Experiment Name: At_Drought_Soil_Dry_P Parameter: Plant Line Value: WS
  misc_feature: MA Experiment 20001560 PARAMETER Experiment Name: At_Drought_Soil_Dry_P Parameter: Post Timepoint (hr) Value: None
  misc_feature: MA Experiment 20001560 PARAMETER Experiment Name: At_Drought_Soil_Dry_P Parameter: Post-Treatment Value: None
  misc_feature: MA Experiment 20001560 PARAMETER Experiment Name: At_Drought_Soil_Dry_P Parameter: Timepoint (day) Value: 14
  misc_feature: MA Experiment 20001560 PARAMETER Experiment Name: At_Drought_Soil_Dry_P Parameter: Treatment Value: Drought vs. No Drought
  misc_feature: MA Experiment ID: 20001905 Result: Up-regulated in Transcription
  misc_feature: MA Experiment 20001905 PARAMETER Experiment Name: At_Drought_Reproduction_P Parameter: Age (day) Value: 40
  misc_feature: MA Experiment 20001905 PARAMETER Experiment Name: At_Drought_Reproduction_P Parameter: Organism Value: A. thaliana
  misc_feature: MA Experiment 20001905 PARAMETER Experiment Name: At_Drought_Reproduction_P Parameter: Plant Line Value: WS
  misc_feature: MA Experiment 20001905 PARAMETER Experiment Name: At_Drought_Reproduction_P Parameter: Timepoint (day) Value: 10
  misc_feature: MA Experiment 20001905 PARAMETER Experiment Name: At_Drought_Reproduction_P Parameter: Tissue Value: Rosettes
  misc_feature: MA Experiment 20001905 PARAMETER Experiment Name: At_Drought_Reproduction_P Parameter: Treatment Value: Drought vs. No Drought
aaaccctaaggaaacttcggcaagctccagagaaacgagagttccgtaatcattttctcttgttgttcctgatcgcgtagctcaagcgaaaaaaatggcgtcgtttgatgaagcaccaccaggaaacgccaaggccggtgagaagatcttcaggaccaagtgtgctcagtgtcacaccgtcgaagcaggcgccggtcacaaacaaggacccaatctaaacggtctatttggaagacaatctggtacaactgctggttactcttactctgctgctaacaagaacaaagctgtggaatgggaagagaaggccttgtacgattacttgctcaaccccaagaagtacataccaggtaccaagatggtgttccctgggctaaagaagccgcaagaccgtgctgatctcatcgcctacttgaaggaatctactgcgcctaagtgaatctgatggtggattgattctgagttgttaagtctctctcagatgaggcttttttactttgctatattcttttgccaaataaaatctcaaactttttttgtttatcatcaattacgttcttggtgggaatttggctgtaatgtgtgctgaggctcactttatcgagtacatttgattttctgaggc

SEQ ID NO: 21834 - protein, 114 aa, Arabidopsis thaliana [sequence omitted]

SEQ ID NO: 21835 - DNA, 1233 bp, Arabidopsis thaliana
  misc_feature (1)..(1233): Ceres Seq. ID no. 12394458
  misc_feature: MA Experiment ID: 108595 Result: Down-regulated in Transcription
  misc_feature: MA Experiment 108595 PARAMETER Experiment Name: At_Ler-pi_Ovule_cDNA_P Parameter: Plant Line Value: null
atgagattagttgtcagatagatattcgcgagacgagaagctccaattaaaaaccctagagctcatctctctctccaggtacggccttttcgtttttggctttcaccggcgtggatctccggtgacggggagattcggaatttcggagagattttagatcatgtatagagagagaggtatggttggatcgaagtcggaggtggtcgatcggaaacgaataaacgagattcacgataacaggccttcgcattcgatgtctcagcctgtcaatggaaaaggcaaggtaacatcgacctccgttttgatggggaagcagcaattgcatgataaggaatcttcacgttctggttctatctctaagactaacatttccgacgctgtggatatatcagacacagacagcgaagaatcagaggtcagtggttctgatggagaggacacctcgtggatatcttggttctgcaaccttcgtgggaacgagttcttctgtgaagttgatgatgattacatccaggatgactttaacttgtgtggactcagccatcaagttccttactacgactatgcccttgatttgattttggatgtggagtcttcgcatggtgagatgtttacagaggaacagaatgaattgatcgagtcagcagcagagatgctatatggaatgattcatgctcgtttcatattgactagcaaagggctggcttctatgttagacaaatacaaaaactatgactttggaagatgcccaagagtttattgttgtggccaaccttgtttaccagttggtcaatccgatatccctagagcaagcaccgtaaagatatactgcccaaaatgtgaagatgtctattacccacgatcaaaataccaaggaaacatagatggagcttactttgggacaacgtttccacatctgttcttgatgacgtacgggcatctgaagccacaaaaggcatcacaaagctacactcaaagagtgtttgggttcaagctacacaagccgtgaaggaaacaaggaagaagaaatgcacccttgggttttgagaaacaagaaatgtgtgtaaacaaaacaaaaagaaaaagaccatttgtatcacagaaggtgaaactagttccatctctctctctctctctctttctttgtttttggtattgtgtttaggtttagataaaacattagcagcatggactggtgaactgaaatcccatattattgtaatactttacctt

SEQ ID NO: 21836 - protein, 282 aa, Arabidopsis thaliana
  peptide (1)..(282): Ceres Seq. ID no. 12394459
  misc_feature (92)..(270): Pfam Name: Casein kinase II regulatory subunit Pfam Description: Casein kinase II regulatory subunit
  misc_feature (15)..(282): Homolog of NCBI NO: 11527002 NR Description: protein kinase CK2 regulatory subunit CK2B2 [Zea
  misc_feature (1)..(280): Homolog of NCBI NO: 15224934 NR Description: putative casein kinase II beta subunit
  misc_feature (60)..(282): Homolog of NCBI NO: 29367573 NR Description: possible protein kinase CK2 regulatory subunit
  misc_feature (1)..(282): Homolog of NCBI NO: 11527000 NR Description: protein kinase CK2 regulatory subunit CK2B1 [Zea
  misc_feature (15)..(282): Homolog of NCBI NO: 34901776 NR Description: OJ1058_B11.17 [Oryza sativa (japonica
  misc_feature (2)..(281): Homolog of NCBI NO: 37536920 NR Description: putative casein kinase II beta subunit
  misc_feature (1)..(282): Homolog of NCBI NO: 11527004 NR Description: protein kinase CK2 regulatory subunit CK2B3 [Zea
  misc_feature (1)..(281): Homolog of NCBI NO: 21261784 NR Description: protein kinase Ck2 regulatory subunit 2
  misc_feature (1)..(282): Homolog of NCBI NO: 15238013 NR Description: casein kinase II beta chain
  misc_feature (1)..(282): Homolog of NCBI NO: 15236597 NR Description: casein kinase II beta chain CKB2
MYRERGMVGSKSEVVDRKRINEIHDNRPSHSMSQPVNGKGKVTSTSVLMGKQQLHDKESSRSGSISKTNISDAVDISDTDSEESEVSGSDGEDTSWISWFCNLRGNEFFCEVDDDYIQDDFNLCGLSHQVPYYDYALDLILDVESSHGEMFTEEQNELIESAAEMLYGMIHARFILTSKGLASMLDKYKNYDFGRCPRVYCCGQPCLPVGQSDIPRASTVKIYCPKCEDVYYPRSKYQGNIDGAYFGTTFPHLFLMTYGHLKPQKASQSYTQRVFGFKLHKP

SEQ ID NO: 21837 - protein, 276 aa, Arabidopsis thaliana
  peptide (1)..(276): Ceres Seq. ID no. 12394460
  misc_feature (86)..(264): Pfam Name: Casein kinase II regulatory subunit Pfam Description: Casein kinase II regulatory subunit
  misc_feature (9)..(276): Homolog of NCBI NO: 11527002 NR Description: protein kinase CK2 regulatory subunit CK2B2 [Zea
  misc_feature (1)..(274): Homolog of NCBI NO: 15224934 NR Description: putative casein kinase II beta subunit
  misc_feature (54)..(276): Homolog of NCBI NO: 29367573 NR Description: possible protein kinase CK2 regulatory subunit
  misc_feature (1)..(276): Homolog of NCBI NO: 11527000 NR Description: protein kinase CK2 regulatory subunit CK2B1 [Zea
  misc_feature (9)..(276): Homolog of NCBI NO: 34901776 NR Description: OJ1058_B11.17 [Oryza sativa (japonica
  misc_feature (1)..(275): Homolog of NCBI NO: 37536920 NR Description: putative casein kinase II beta subunit
  misc_feature (1)..(276): Homolog of NCBI NO: 11527004 NR Description: protein kinase CK2 regulatory subunit CK2B3 [Zea
  misc_feature (1)..(275): Homolog of NCBI NO: 21261784 NR Description: protein kinase Ck2 regulatory subunit 2
  misc_feature (1)..(276): Homolog of NCBI NO: 15238013 NR Description: casein kinase II beta chain
  misc_feature (1)..(276): Homolog of NCBI NO: 15236597 NR Description: casein kinase II beta chain CKB2
MVGSKSEVVDRKRINEIHDNRPSHSMSQPVNGKGKVTSTSVLMGKQQLHDKESSRSGSISKTNISDAVDISDTDSEESEVSGSDGEDTSWISWFCNLRGNEFFCEVDDDYIQDDFNLCGLSHQVPYYDYALDLILDVESSHGEMFTEEQNELIESAAEMLYGMIHARFILTSKGLASMLDKYKNYDFGRCPRVYCCGQPCLPVGQSDIPRASTVKIYCPKCEDVYYPRSKYQGNIDGAYFGTTFPHLFLMTYGHLKPQKASQSYTQRVFGFKLHKP

SEQ ID NO: 21838 - protein, 251 aa, Arabidopsis thaliana
  peptide (1)..(251): Ceres Seq. ID no. 12394461
  misc_feature (61)..(239): Pfam Name: Casein kinase II regulatory subunit Pfam Description: Casein kinase II regulatory subunit
  misc_feature (1)..(251): Homolog of NCBI NO: 11527002 NR Description: protein kinase CK2 regulatory subunit CK2B2 [Zea
  misc_feature (1)..(249): Homolog of NCBI NO: 15224934 NR Description: putative casein kinase II beta subunit
  misc_feature (29)..(251): Homolog of NCBI NO: 29367573 NR Description: possible protein kinase CK2 regulatory subunit
  misc_feature (1)..(251): Homolog of NCBI NO: 11527000 NR Description: protein kinase CK2 regulatory subunit CK2B1 [Zea
  misc_feature (1)..(251): Homolog of NCBI NO: 34901776 NR Description: OJ1058_B11.17 [Oryza sativa (japonica
  misc_feature (1)..(250): Homolog of NCBI NO: 37536920 NR Description: putative casein kinase II beta subunit
  misc_feature (1)..(251): Homolog of NCBI NO: 11527004 NR Description: protein kinase CK2 regulatory subunit CK2B3 [Zea
  misc_feature (1)..(250): Homolog of NCBI NO: 21261784 NR Description: protein kinase Ck2 regulatory subunit 2
  misc_feature (1)..(251): Homolog of NCBI NO: 15238013 NR Description: casein kinase II beta chain
  misc_feature (1)..(251): Homolog of NCBI NO: 15236597 NR Description: casein kinase II beta chain CKB2
MSQPVNGKGKVTSTSVLMGKQQLHDKESSRSGSISKTNISDAVDISDTDSEESEVSGSDGEDTSWISWFCNLRGNEFFCEVDDDYIQDDFNLCGLSHQVPYYDYALDLILDVESSHGEMFTEEQNELIESAAEMLYGMIHARFILTSKGLASMLDKYKNYDFGRCPRVYCCGQPCLPVGQSDIPRASTVKIYCPKCEDVYYPRSKYQGNIDGAYFGTTFPHLFLMTYGHLKPQKASQSYTQRVFGFKLHKP

SEQ ID NO: 21839 - DNA, 851 bp, Arabidopsis thaliana
  misc_feature (1)..(851): Ceres Seq. ID no. 12329604
  misc_feature: MA Experiment ID: 20000173 Result: Up-regulated in Transcription
  misc_feature: MA Experiment 20000173 PARAMETER Experiment Name: At_42deg_Heat_P Parameter: Age (day) Value: 14
  misc_feature: MA Experiment 20000173 PARAMETER Experiment Name: At_42deg_Heat_P Parameter: Organism Value: A. thaliana
  misc_feature: MA Experiment 20000173 PARAMETER Experiment Name: At_42deg_Heat_P Parameter: Plant Line Value: WS
  misc_feature: MA Experiment 20000173 PARAMETER Experiment Name: At_42deg_Heat_P Parameter: Temperature (deg C) Value: 42 vs. 22
  misc_feature: MA Experiment 20000173 PARAMETER Experiment Name: At_42deg_Heat_P Parameter: Timepoint (hr) Value: 6
  misc_feature: MA Experiment 20000173 PARAMETER Experiment Name: At_42deg_Heat_P Parameter: Tissue Value: Aerial
  misc_feature: MA Experiment ID: 20001247 Result: Up-regulated in Transcription
  misc_feature: MA Experiment 20001247 PARAMETER Experiment Name: At_Far-red-induction_P Parameter: Age (day) Value: 7
  misc_feature: MA Experiment 20001247 PARAMETER Experiment Name: At_Far-red-induction_P Parameter: Light Value: Far-red vs. White
  misc_feature: MA Experiment 20001247 PARAMETER Experiment Name: At_Far-red-induction_P Parameter: Organism Value: A. thaliana
  misc_feature: MA Experiment 20001247 PARAMETER Experiment Name: At_Far-red-induction_P Parameter: Plant Line Value: Columbia
  misc_feature: MA Experiment 20001247 PARAMETER Experiment Name: At_Far-red-induction_P Parameter: Timepoint (hr) Value: 1
  misc_feature: MA Experiment 20001247 PARAMETER Experiment Name: At_Far-red-induction_P Parameter: Tissue Value: Whole Plant
  misc_feature: MA Experiment ID: 20001248 Result: Up-regulated in Transcription
  misc_feature: MA Experiment 20001248 PARAMETER Experiment Name: At_Far-red-induction_P Parameter: Age (day) Value: 7
  misc_feature: MA Experiment 20001248 PARAMETER Experiment Name: At_Far-red-induction_P Parameter: Light Value: Far-red vs. White
  misc_feature: MA Experiment 20001248 PARAMETER Experiment Name: At_Far-red-induction_P Parameter: Organism Value: A. thaliana
  misc_feature: MA Experiment 20001248 PARAMETER Experiment Name: At_Far-red-induction_P Parameter: Plant Line Value: Columbia
  misc_feature: MA Experiment 20001248 PARAMETER Experiment Name: At_Far-red-induction_P Parameter: Timepoint (hr) Value: 4
  misc_feature: MA Experiment 20001248 PARAMETER Experiment Name: At_Far-red-induction_P Parameter: Tissue Value: Whole Plant
  misc_feature: MA Experiment ID: 20001450 Result: Up-regulated in Transcription
  misc_feature: MA Experiment 20001450 PARAMETER Experiment Name: At_Far-red-induction_P Parameter: Age (day) Value: 7
  misc_feature: MA Experiment 20001450 PARAMETER Experiment Name: At_Far-red-induction_P Parameter: Light Value: Far-red vs. White
  misc_feature: MA Experiment 20001450 PARAMETER Experiment Name: At_Far-red-induction_P Parameter: Organism Value: A. thaliana
  misc_feature: MA Experiment 20001450 PARAMETER Experiment Name: At_Far-red-induction_P Parameter: Plant Line Value: Columbia
  misc_feature: MA Experiment 20001450 PARAMETER Experiment Name: At_Far-red-induction_P Parameter: Timepoint (hr) Value: 8
  misc_feature: MA Experiment 20001450 PARAMETER Experiment Name: At_Far-red-induction_P Parameter: Tissue Value: Whole Plant
  misc_feature: MA Experiment ID: 20001451 Result: Up-regulated in Transcription
  misc_feature: MA Experiment 20001451 PARAMETER Experiment Name: At_Far-red-induction_P Parameter: Age (day) Value: 7
  misc_feature: MA Experiment 20001451 PARAMETER Experiment Name: At_Far-red-induction_P Parameter: Light Value: Far-red vs. White
  misc_feature: MA Experiment 20001451 PARAMETER Experiment Name: At_Far-red-induction_P Parameter: Organism Value: A. thaliana
  misc_feature: MA Experiment 20001451 PARAMETER Experiment Name: At_Far-red-induction_P Parameter: Plant Line Value: Columbia
  misc_feature: MA Experiment 20001451 PARAMETER Experiment Name: At_Far-red-induction_P Parameter: Timepoint (hr) Value: 24
  misc_feature: MA Experiment 20001451 PARAMETER Experiment Name: At_Far-red-induction_P Parameter: Tissue Value: Whole Plant
  misc_feature: MA Experiment ID: 20001555 Result: Down-regulated in Transcription
  misc_feature: MA Experiment 20001555 PARAMETER Experiment Name: At_Drought_Soil_Dry_P Parameter: Age (day) Value: 24
  misc_feature: MA Experiment 20001555 PARAMETER Experiment Name: At_Drought_Soil_Dry_P Parameter: Organism Value: A. thaliana
  misc_feature: MA Experiment 20001555 PARAMETER Experiment Name: At_Drought_Soil_Dry_P Parameter: Plant Line Value: WS
  misc_feature: MA Experiment 20001555 PARAMETER Experiment Name: At_Drought_Soil_Dry_P Parameter: Post Timepoint (hr) Value: None
  misc_feature: MA Experiment 20001555 PARAMETER Experiment Name: At_Drought_Soil_Dry_P Parameter: Post-Treatment Value: None
  misc_feature: MA Experiment 20001555 PARAMETER Experiment Name: At_Drought_Soil_Dry_P Parameter: Timepoint (day) Value: 10
  misc_feature: MA Experiment 20001555 PARAMETER Experiment Name: At_Drought_Soil_Dry_P Parameter: Treatment Value: Drought vs. No Drought
  misc_feature: MA Experiment ID: 20001556 Result: Down-regulated in Transcription
  misc_feature: MA Experiment 20001556 PARAMETER Experiment Name: At_Drought_Soil_Dry_P Parameter: Age (day) Value: 26
  misc_feature: MA Experiment 20001556 PARAMETER Experiment Name: At_Drought_Soil_Dry_P Parameter: Organism Value: A. thaliana
  misc_feature: MA Experiment 20001556 PARAMETER Experiment Name: At_Drought_Soil_Dry_P Parameter: Plant Line Value: WS
  misc_feature: MA Experiment 20001556 PARAMETER Experiment Name: At_Drought_Soil_Dry_P Parameter: Post Timepoint (hr) Value: None
  misc_feature: MA Experiment 20001556 PARAMETER Experiment Name: At_Drought_Soil_Dry_P Parameter: Post-Treatment Value: None
  misc_feature: MA Experiment 20001556 PARAMETER Experiment Name: At_Drought_Soil_Dry_P Parameter: Timepoint (day) Value: 12
  misc_feature: MA Experiment 20001556 PARAMETER Experiment Name: At_Drought_Soil_Dry_P Parameter: Treatment Value: Drought vs. No Drought
  misc_feature: MA Experiment ID: 20001904 Result: Down-regulated in Transcription
  misc_feature: MA Experiment 20001904 PARAMETER Experiment Name: At_Drought_Reproduction_P Parameter: Age (day) Value: 37
  misc_feature: MA Experiment 20001904 PARAMETER Experiment Name: At_Drought_Reproduction_P Parameter: Organism Value: A. thaliana
  misc_feature: MA Experiment 20001904 PARAMETER Experiment Name: At_Drought_Reproduction_P Parameter: Plant Line Value: WS
  misc_feature: MA Experiment 20001904 PARAMETER Experiment Name: At_Drought_Reproduction_P Parameter: Timepoint (day) Value: 7
  misc_feature: MA Experiment 20001904 PARAMETER Experiment Name: At_Drought_Reproduction_P Parameter: Tissue Value: Rosettes
  misc_feature: MA Experiment 20001904 PARAMETER Experiment Name: At_Drought_Reproduction_P Parameter: Treatment Value: Drought vs. No Drought
  misc_feature: MA Experiment ID: 20001906 Result: Down-regulated in Transcription
  misc_feature: MA Experiment 20001906 PARAMETER Experiment Name: At_Drought_Reproduction_P Parameter: Age (day) Value: 35
  misc_feature: MA Experiment 20001906 PARAMETER Experiment Name: At_Drought_Reproduction_P Parameter: Organism Value: A. thaliana
  misc_feature: MA Experiment 20001906 PARAMETER Experiment Name: At_Drought_Reproduction_P Parameter: Plant Line Value: WS
  misc_feature: MA Experiment 20001906 PARAMETER Experiment Name: At_Drought_Reproduction_P Parameter: Timepoint (day) Value: 5
  misc_feature: MA Experiment 20001906 PARAMETER Experiment Name: At_Drought_Reproduction_P Parameter: Tissue Value: Siliques
  misc_feature: MA Experiment 20001906 PARAMETER Experiment Name: At_Drought_Reproduction_P Parameter: Treatment Value: Drought vs. No Drought
  misc_feature: MA Experiment ID: 20001907 Result: Down-regulated in Transcription
  misc_feature: MA Experiment 20001907 PARAMETER Experiment Name: At_Drought_Reproduction_P Parameter: Age (day) Value: 37
  misc_feature: MA Experiment 20001907 PARAMETER Experiment Name: At_Drought_Reproduction_P Parameter: Organism Value: A. thaliana
  misc_feature: MA Experiment 20001907 PARAMETER Experiment Name: At_Drought_Reproduction_P Parameter: Plant Line Value: WS
  misc_feature: MA Experiment 20001907 PARAMETER Experiment Name: At_Drought_Reproduction_P Parameter: Timepoint (day) Value: 7
  misc_feature: MA Experiment 20001907 PARAMETER Experiment Name: At_Drought_Reproduction_P Parameter: Tissue Value: Siliques
  misc_feature: MA Experiment 20001907 PARAMETER Experiment Name: At_Drought_Reproduction_P Parameter: Treatment Value: Drought vs. No Drought
ctctttccctctctctctctctccaaaccagtcctacttctctctctagaaacctagggaagaagaagaagacggtgaagcgagcgatgtcttcggacgacgaaggaagagaggagtatctcttcaagattgttgttatcggcgactctgccgtcggtaaatctaatcttctatctcgttacgcacgtaacgagttcagcgctaactccaaggcgacgatcggagtcgagtttcagacgcagagcatggagattgaaggtaaagaggtcaaggctcagatttgggacactgctggtcaggagcgtttccgtgccgtcacttccgcttattaccgtggcgctgtcggtgccctcgtcgtttacgacattacccgccgcaccactttcgaaagcgttggacgttggctcgatgagcttaagatccattcggatacgacggtggcgagaatgctggtggggaacaagtgtgatctagaaaacataagagcagtgagcgtggaggaaggaaaggctctagccgaagaggaaggactcttctttgtggaaacatcggctcttgattcgactaatgttaaaacagctttcgagatggtgatacttgatatctacaataacgtgagccgtaagcaactcaactcagatacttataaagacgaactcaccgtgaatcgggtaagtcttgttaaggatgataactctgcctccaaacaaagctctggtttctcttgttgttcttccacttgatgatataccacaccaaaataatccttttttatttctcacaactgtaactttattatataaatttttgtttttttctttgactcatggaagaaaagaaattcatgaact

SEQ ID NO: 21840 - protein, 246 aa, Arabidopsis thaliana
  peptide (1)..(246): Ceres Seq. ID no. 12329605
  misc_feature (42)..(203): Pfam Name: Ras family Pfam Description: Ras family
  misc_feature (30)..(245): Homolog of NCBI NO: 1370154 NR Description: RAB11G [Lotus japonicus]
  misc_feature (29)..(244): Homolog of NCBI NO: 15224226 NR Description: Ras-related GTP-binding protein (ARA-4)
  misc_feature (29)..(246): Homolog of NCBI NO: 1076457 NR Description: GTP-binding protein bra - rape
  misc_feature (29)..(246): Homolog of NCBI NO: 21553627 NR Description: putative RAS superfamily GTP-binding protein
  misc_feature (29)..(246): Homolog of NCBI NO: 15225121 NR Description: GTP-binding protein, putative
  misc_feature (29)..(246): Homolog of NCBI NO: 17380746 NR Description: putative RAS-related protein ARA-1 [Arabidopsis
  misc_feature (29)..(246): Homolog of NCBI NO: 18390575 NR Description: RAS-related GTP-binding protein (ARA-1)
  misc_feature (1)..(246): Homolog of NCBI NO: 29893534 NR Description: putative RAS-related protein ARA-1 [Arabidopsis
LSLSLSLQTSPTSLSRNLGKKKKTVKRAMSSDDEGREEYLFKIVVIGDSAVGKSNLLSRYARNEFSANSKATIGVEFQTQSMEIEGKEVKAQIWDTAGQERFRAVTSAYYRGAVGALVVYDITRRTTFESVGRWLDELKIHSDTTVARMLVGNKCDLENIRAVSVEEGKALAEEEGLFFVETSALDSTNVKTAFEMVILDIYNNVSRKQLNSDTYKDELTVNRVSLVKDDNSASKQSSGFSCCSST

SEQ ID NO: 21841 - protein, 218 aa, Arabidopsis thaliana
  peptide (1)..(218): Ceres Seq. ID no. 12329606
  misc_feature (14)..(175): Pfam Name: Ras family Pfam Description: Ras family
  misc_feature (2)..(217): Homolog of NCBI NO: 1370154 NR Description: RAB11G [Lotus japonicus]
  misc_feature (1)..(216): Homolog of NCBI NO: 15224226 NR Description: Ras-related GTP-binding protein (ARA-4)
  misc_feature (1)..(218): Homolog of NCBI NO: 1076457 NR Description: GTP-binding protein bra - rape
  misc_feature (1)..(218): Homolog of NCBI NO: 21553627 NR Description: putative RAS superfamily GTP-binding protein
  misc_feature (1)..(218): Homolog of NCBI NO: 15225121 NR Description: GTP-binding protein, putative
  misc_feature (1)..(218): Homolog of NCBI NO: 17380746 NR Description: putative RAS-related protein ARA-1 [Arabidopsis
  misc_feature (1)..(218): Homolog of NCBI NO: 18390575 NR Description: RAS-related GTP-binding protein (ARA-1)
  misc_feature (1)..(218): Homolog of NCBI NO: 29893534 NR Description: putative RAS-related protein ARA-1 [Arabidopsis
MSSDDEGREEYLFKIVVIGDSAVGKSNLLSRYARNEFSANSKATIGVEFQTQSMEIEGKEVKAQIWDTAGQERFRAVTSAYYRGAVGALVVYDITRRTTFESVGRWLDELKIHSDTTVARMLVGNKCDLENIRAVSVEEGKALAEEEGLFFVETSALDSTNVKTAFEMVILDIYNNVSRKQLNSDTYKDELTVNRVSLVKDDNSASKQSSGFSCCSST

SEQ ID NO: 21842 - protein, 165 aa, Arabidopsis thaliana
  peptide (1)..(165): Ceres Seq. ID no. 12329607
  misc_feature (1)..(122): Pfam Name: Ras family Pfam Description: Ras family
  misc_feature (1)..(165): Homolog of NCBI NO: 1076457 NR Description: GTP-binding protein bra - rape
  misc_feature (1)..(165): Homolog of NCBI NO: 21553627 NR Description: putative RAS superfamily GTP-binding protein
  misc_feature (1)..(165): Homolog of NCBI NO: 15225121 NR Description: GTP-binding protein, putative
  misc_feature (1)..(164): Homolog of NCBI NO: 1370154 NR Description: RAB11G [Lotus japonicus]
  misc_feature (1)..(163): Homolog of NCBI NO: 15224226 NR Description: Ras-related GTP-binding protein (ARA-4)
  misc_feature (1)..(165): Homolog of NCBI NO: 17380746 NR Description: putative RAS-related protein ARA-1 [Arabidopsis
  misc_feature (1)..(165): Homolog of NCBI NO: 18390575 NR Description: RAS-related GTP-binding protein (ARA-1)
  misc_feature (1)..(165): Homolog of NCBI NO: 29893534 NR Description: putative RAS-related protein ARA-1 [Arabidopsis
MEIEGKEVKAQIWDTAGQERFRAVTSAYYRGAVGALVVYDITRRTTFESVGRWLDELKIHSDTTVARMLVGNKCDLENIRAVSVEEGKALAEEEGLFFVETSALDSTNVKTAFEMVILDIYNNVSRKQLNSDTYKDELTVNRVSLVKDDNSASKQSSGFSCCSST

SEQ ID NO: 21843 - DNA, 730 bp, Arabidopsis thaliana
  misc_feature (1)..(730): Ceres Seq. ID no. 12329736
  misc_feature: MA Experiment ID: 108473 Result: Down-regulated in Transcription
  misc_feature: MA Experiment 108473 PARAMETER Experiment Name: At_Drought_Flowers_cDNA_P Parameter: Timepoint (hr) Value: 7 d
  misc_feature: MA Experiment 108473 PARAMETER Experiment Name: At_Drought_Flowers_cDNA_P Parameter: Tissue Value: Flower
  misc_feature: MA Experiment 108473 PARAMETER Experiment Name: At_Drought_Flowers_cDNA_P Parameter: Treatment Value: Drought vs. No Drought
  misc_feature: MA Experiment ID: 108501 Result: Down-regulated in Transcription
  misc_feature: MA Experiment 108501 PARAMETER Experiment Name: At_ap2_floral_buds_cDNA_P Parameter: Plant Line Value: ap2 (Ler.)
  misc_feature: MA Experiment 108501 PARAMETER Experiment Name: At_ap2_floral_buds_cDNA_P Parameter: Tissue Value: Closed Flower
  misc_feature: MA Experiment ID: 108595 Result: Up-regulated in Transcription
  misc_feature: MA Experiment 108595 PARAMETER Experiment Name: At_Ler-pi_Ovule_cDNA_P Parameter: Plant Line Value: null
  misc_feature: MA Experiment ID: 108607 Result: Up-regulated in Transcription
  misc_feature: MA Experiment 108607 PARAMETER Experiment Name: At_100uM_ABA_cDNA_P Parameter: Timepoint (hr) Value: 4
  misc_feature: MA Experiment 108607 PARAMETER Experiment Name: At_100uM_ABA_cDNA_P Parameter: Tissue Value: Aerial
  misc_feature: MA Experiment 108607 PARAMETER Experiment Name: At_100uM_ABA_cDNA_P Parameter: Treatment Value: 100uM ABA vs. No Treatment
  misc_feature: MA Experiment ID: 20000087 Result: Up-regulated in Transcription
  misc_feature: MA Experiment 20000087 PARAMETER Experiment Name: At_100uM_ABA_Mutants_cDNA_P Parameter: Plant Line Value: WS
  misc_feature: MA Experiment 20000087 PARAMETER Experiment Name: At_100uM_ABA_Mutants_cDNA_P Parameter: Timepoint (hr) Value: 6
  misc_feature: MA Experiment 20000087 PARAMETER Experiment Name: At_100uM_ABA_Mutants_cDNA_P Parameter: Tissue Value: Aerial
  misc_feature: MA Experiment 20000087 PARAMETER Experiment Name: At_100uM_ABA_Mutants_cDNA_P Parameter: Treatment Value: 100uM ABA vs. No Treatment
  misc_feature: MA Experiment ID: 20000169 Result: Up-regulated in Transcription
  misc_feature: MA Experiment 20000169 PARAMETER Experiment Name: At_100uM_ABA_P Parameter: Age (day) Value: 14
  misc_feature: MA Experiment 20000169 PARAMETER Experiment Name: At_100uM_ABA_P Parameter: Organism Value: A. thaliana
  misc_feature: MA Experiment 20000169 PARAMETER Experiment Name: At_100uM_ABA_P Parameter: Plant Line Value: WS
  misc_feature: MA Experiment 20000169 PARAMETER Experiment Name: At_100uM_ABA_P Parameter: Timepoint (hr) Value: 6
  misc_feature: MA Experiment 20000169 PARAMETER Experiment Name: At_100uM_ABA_P Parameter: Tissue Value: Aerial
  misc_feature: MA Experiment 20000169 PARAMETER Experiment Name: At_100uM_ABA_P Parameter: Treatment Value: 100uM ABA vs. No Treatment
  misc_feature: MA Experiment ID: 20000182 Result: Up-regulated in Transcription
  misc_feature: MA Experiment 20000182 PARAMETER Experiment Name: At_2mM_SA_P Parameter: Age (day) Value: 14
  misc_feature: MA Experiment 20000182 PARAMETER Experiment Name: At_2mM_SA_P Parameter: Organism Value: A. thaliana
  misc_feature: MA Experiment 20000182 PARAMETER Experiment Name: At_2mM_SA_P Parameter: Plant Line Value: WS
  misc_feature: MA Experiment 20000182 PARAMETER Experiment Name: At_2mM_SA_P Parameter: Timepoint (hr) Value: 6
  misc_feature: MA Experiment 20000182 PARAMETER Experiment Name: At_2mM_SA_P Parameter: Tissue Value: Aerial
  misc_feature: MA Experiment 20000182 PARAMETER Experiment Name: At_2mM_SA_P Parameter: Treatment Value: 2mM SA vs. No Treatment
  misc_feature: MA Experiment ID: 20000235 Result: Down-regulated in Transcription
  misc_feature: MA Experiment 20000235 PARAMETER Experiment Name: At_Siliques_P Parameter: Age (day) Value: 21
  misc_feature: MA Experiment 20000235 PARAMETER Experiment Name: At_Siliques_P Parameter: Organism Value: A. thaliana
  misc_feature: MA Experiment 20000235 PARAMETER Experiment Name: At_Siliques_P Parameter: Plant Line Value: WS
  misc_feature: MA Experiment 20000235 PARAMETER Experiment Name: At_Siliques_P Parameter: Tissue Value: 5-10mm Siliques vs. Whole Plant
  misc_feature: MA Experiment ID: 20000265 Result: Up-regulated in Transcription
  misc_feature: MA Experiment 20000265 PARAMETER Experiment Name: At_Open_Flower_P Parameter: Age (day) Value: 21
  misc_feature: MA Experiment 20000265 PARAMETER Experiment Name: At_Open_Flower_P Parameter: Plant Line Value: WS
  misc_feature: MA Experiment 20000265 PARAMETER Experiment Name: At_Open_Flower_P Parameter: Tissue Value: Closed Flower vs. Whole Plant
  misc_feature: MA Experiment ID: 20000267 Result: Up-regulated in Transcription
  misc_feature: MA Experiment 20000267 PARAMETER Experiment Name: At_Drought_P Parameter: Age (day) Value: 7
  misc_feature: MA Experiment 20000267 PARAMETER Experiment Name: At_Drought_P Parameter: Organism Value: A. thaliana
  misc_feature: MA Experiment 20000267 PARAMETER Experiment Name: At_Drought_P Parameter: Plant Line Value: WS
  misc_feature: MA Experiment 20000267 PARAMETER Experiment Name: At_Drought_P Parameter: Timepoint (hr) Value: 6
  misc_feature: MA Experiment 20000267 PARAMETER Experiment Name: At_Drought_P Parameter: Tissue Value: Whole Plant
  misc_feature: MA Experiment 20000267 PARAMETER Experiment Name: At_Drought_P Parameter: Treatment Value: Drought vs. No Drought
  misc_feature: MA Experiment ID: 20000286 Result: Up-regulated in Transcription
  misc_feature: MA Experiment 20000286 PARAMETER Experiment Name: At_Open_Flower_P Parameter: Age (day) Value: 21
  misc_feature: MA Experiment 20000286 PARAMETER Experiment Name: At_Open_Flower_P Parameter: Plant Line Value: WS
  misc_feature: MA Experiment 20000286 PARAMETER Experiment Name: At_Open_Flower_P Parameter: Tissue Value: Half Open vs. Whole Plant
  misc_feature: MA Experiment ID: 20000436 Result: Up-regulated in Transcription
  misc_feature: MA Experiment 20000436 PARAMETER Experiment Name: At_Drought_P Parameter: Age (day) Value: 7
  misc_feature: MA Experiment 20000436 PARAMETER Experiment Name: At_Drought_P Parameter: Organism Value: A. thaliana
  misc_feature: MA Experiment 20000436 PARAMETER Experiment Name: At_Drought_P Parameter: Plant Line Value: WS
  misc_feature: MA Experiment 20000436 PARAMETER Experiment Name: At_Drought_P Parameter: Timepoint (hr) Value: 12
  misc_feature: MA Experiment 20000436 PARAMETER Experiment Name: At_Drought_P Parameter: Tissue Value: Whole Plant
  misc_feature: MA Experiment 20000436 PARAMETER Experiment Name: At_Drought_P Parameter: Treatment Value: Drought vs. No Drought
  misc_feature: MA Experiment ID: 20000437 Result: Up-regulated in Transcription
  misc_feature: MA Experiment 20000437 PARAMETER Experiment Name: At_Drought_P Parameter: Age (day) Value: 8
  misc_feature: MA Experiment 20000437 PARAMETER Experiment Name: At_Drought_P Parameter: Organism Value: A. thaliana
  misc_feature: MA Experiment 20000437 PARAMETER Experiment Name: At_Drought_P Parameter: Plant Line Value: WS
  misc_feature: MA Experiment 20000437 PARAMETER Experiment Name: At_Drought_P Parameter: Timepoint (hr) Value: 24
  misc_feature: MA Experiment 20000437 PARAMETER Experiment Name: At_Drought_P Parameter: Tissue Value: Whole Plant
  misc_feature: MA Experiment 20000437 PARAMETER Experiment Name: At_Drought_P Parameter: Treatment Value: Drought vs. No Drought
  misc_feature: MA Experiment ID: 20001904 Result: Up-regulated in Transcription
  misc_feature: MA Experiment 20001904 PARAMETER Experiment Name: At_Drought_Reproduction_P Parameter: Age (day) Value: 37
  misc_feature: MA Experiment 20001904 PARAMETER Experiment Name: At_Drought_Reproduction_P Parameter: Organism Value: A. thaliana
  misc_feature: MA Experiment 20001904 PARAMETER Experiment Name: At_Drought_Reproduction_P Parameter: Plant Line Value: WS
  misc_feature: MA Experiment 20001904 PARAMETER Experiment Name: At_Drought_Reproduction_P Parameter: Timepoint (day) Value: 7
  misc_feature: MA Experiment 20001904 PARAMETER Experiment Name: At_Drought_Reproduction_P Parameter: Tissue Value: Rosettes
  misc_feature: MA Experiment 20001904 PARAMETER Experiment Name: At_Drought_Reproduction_P Parameter: Treatment Value: Drought vs. No Drought
  misc_feature: MA Experiment ID: 20001910 Result: Down-regulated in Transcription
  misc_feature: MA Experiment 20001910 PARAMETER Experiment Name: At_Drought_Reproduction_P Parameter: Age (day) Value: 37
  misc_feature: MA Experiment 20001910 PARAMETER Experiment Name: At_Drought_Reproduction_P Parameter: Organism Value: A. thaliana
  misc_feature: MA Experiment 20001910 PARAMETER Experiment Name: At_Drought_Reproduction_P Parameter: Plant Line Value: WS
  misc_feature: MA Experiment 20001910 PARAMETER Experiment Name: At_Drought_Reproduction_P Parameter: Timepoint (day) Value: 7
  misc_feature: MA Experiment 20001910 PARAMETER Experiment Name: At_Drought_Reproduction_P Parameter: Tissue Value: Flowers
  misc_feature: MA Experiment 20001910 PARAMETER Experiment Name: At_Drought_Reproduction_P Parameter: Treatment Value: Drought vs. No Drought
acaaaccattaatcgatcaaacaactaaattaaaaaaaaatcttgagagattcttggaacacaagaaaaacatgaaacctagaatgtgtttaatcttgtttattgctttaatgagagtaatgtcgattgtttctgctcagtcgagttgcacaaatgttctaatcagcatggcgccgtgtctcagcttcatcactcaaaacacttctctcccgtctcaacaatgttgtaaccagttggctcatgttgtccggtattcttctgagtgtttgtgtcaggttctcgatggtggaggttctcagcttgggatcaatgttaatgagacacaagctcttgctttgcctaaagcttgtcatgttcaaactcctcctgctagtcgctgccatagtggttcttcggttaattcacattcagaacatggaaatggatcaaaaacaatcccaagagaaaagtcatcatctgatggttctattaagttctcattccctcttctcgccatcctattcacagcttcttacattacattaatctacgcaaaatactgacttattttaccaataaagcttttggcctctttgaagaacatattcatttttagtctctattaaatcgcggtgtattgtggtgaagtattttgtgctctaaatccctactttctaggtgatattggtttgtagtccaaagagtgtgattgtatatctttgatttatgcaataaacattattttctagcc

SEQ ID NO: 21844 - protein, 179 aa, Arabidopsis thaliana
  peptide (1)..(179): Ceres Seq. ID no. 12329737
  misc_feature (49)..(126): Pfam Name: Protease inhibitor/seed storage/LTP family Pfam Description: Protease inhibitor/seed storage/LTP family
  misc_feature (29)..(128): Homolog of NCBI NO: 28269454 NR Description: putative protease inhibitor
  misc_feature (44)..(146): Homolog of NCBI NO: 25553602 NR Description: OJ1656_E11.34 [Oryza sativa (japonica
  misc_feature (27)..(130): Homolog of NCBI NO: 21592774 NR Description: unknown [Arabidopsis thaliana]
  misc_feature (27)..(130): Homolog of NCBI NO: 18407534 NR Description: expressed protein
  misc_feature (31)..(177): Homolog of NCBI NO: 25553595 NR Description: OJ1656_E11.26 [Oryza sativa (japonica
  misc_feature (28)..(174): Homolog of NCBI NO: 24417478 NR Description: unknown [Arabidopsis thaliana]
  misc_feature (28)..(174): Homolog of NCBI NO: 21554014 NR Description: unknown [Arabidopsis thaliana]
  misc_feature (24)..(174): Homolog of NCBI NO: 18403453 NR Description: expressed protein
  misc_feature (24)..(179): Homolog of NCBI NO: 18414320 NR Description: Expressed protein
  misc_feature (24)..(179): Homolog of NCBI NO: 21592722 NR Description: unknown [Arabidopsis thaliana]
KPLIDQTTKLKKNLERFLEHKKNMKPRMCLILFIALMRVMSIVSAQSSCTNVLISMAPCLSFITQNTSLPSQQCCNQLAHVVRYSSECLCQVLDGGGSQLGINVNETQALALPKACHVQTPPASRCHSGSSVNSHSEHGNGSKTIPREKSSSDGSIKFSFPLLAILFTASYITLIYAKY

SEQ ID NO: 21845 - protein, 156 aa, Arabidopsis thaliana
  peptide (1)..(156): Ceres Seq. ID no. 12329738
  misc_feature (26)..(103): Pfam Name: Protease inhibitor/seed storage/LTP family Pfam Description: Protease inhibitor/seed storage/LTP family
  misc_feature (6)..(105): Homolog of NCBI NO: 28269454 NR Description: putative protease inhibitor
  misc_feature (21)..(123): Homolog of NCBI NO: 25553602 NR Description: OJ1656_E11.34 [Oryza sativa (japonica
  misc_feature (4)..(107): Homolog of NCBI NO: 21592774 NR Description: unknown [Arabidopsis thaliana]
  misc_feature (4)..(107): Homolog of NCBI NO: 18407534 NR Description: expressed protein
  misc_feature (8)..(154): Homolog of NCBI NO: 25553595 NR Description: OJ1656_E11.26 [Oryza sativa (japonica
  misc_feature (5)..(151): Homolog of NCBI NO: 24417478 NR Description: unknown [Arabidopsis thaliana]
  misc_feature (5)..(151): Homolog of NCBI NO: 21554014 NR Description: unknown [Arabidopsis thaliana]
  misc_feature (1)..(151): Homolog of NCBI NO: 18403453 NR Description: expressed protein
  misc_feature (1)..(156): Homolog of NCBI NO: 18414320 NR Description: Expressed protein
  misc_feature (1)..(156): Homolog of NCBI NO: 21592722 NR Description: unknown [Arabidopsis thaliana]
MKPRMCLILFIALMRVMSIVSAQSSCTNVLISMAPCLSFITQNTSLPSQQCCNQLAHVVRYSSECLCQVLDGGGSQLGINVNETQALALPKACHVQTPPASRCHSGSSVNSHSEHGNGSKTIPREKSSSDGSIKFSFPLLAILFTASYITLIYAKY

SEQ ID NO: 21846 - protein, 152 aa, Arabidopsis thaliana
  peptide (1)..(152): Ceres Seq. ID no. 12329739
  misc_feature (22)..(99): Pfam Name: Protease inhibitor/seed storage/LTP family Pfam Description: Protease inhibitor/seed storage/LTP family
  misc_feature (2)..(101): Homolog of NCBI NO: 28269454 NR Description: putative protease inhibitor
  misc_feature (17)..(119): Homolog of NCBI NO: 25553602 NR Description: OJ1656_E11.34 [Oryza sativa (japonica
  misc_feature (1)..(103): Homolog of NCBI NO: 21592774 NR Description: unknown [Arabidopsis thaliana]
  misc_feature (1)..(103): Homolog of NCBI NO: 18407534 NR Description: expressed protein
  misc_feature (4)..(150): Homolog of NCBI NO: 25553595 NR Description: OJ1656_E11.26 [Oryza sativa (japonica
  misc_feature (1)..(147): Homolog of NCBI NO: 24417478 NR Description: unknown [Arabidopsis thaliana]
  misc_feature (1)..(147): Homolog of NCBI NO: 21554014 NR Description: unknown [Arabidopsis thaliana]
  misc_feature (1)..(147): Homolog of NCBI NO: 18403453 NR Description: expressed protein
  misc_feature (1)..(152): Homolog of NCBI NO: 18414320 NR Description: Expressed protein
  misc_feature (1)..(152): Homolog of NCBI NO: 21592722 NR Description: unknown [Arabidopsis thaliana]
MCLILFIALMRVMSIVSAQSSCTNVLISMAPCLSFITQNTSLPSQQCCNQLAHVVRYSSECLCQVLDGGGSQLGINVNETQALALPKACHVQTPPASRCHSGSSVNSHSEHGNGSKTIPREKSSSDGSIKFSFPLLAILFTASYITLIYAKY

SEQ ID NO: 21847 - DNA, 1004 bp, Arabidopsis thaliana
  misc_feature (1)..(1004): Ceres Seq. ID no. 13487085
  misc_feature: MA Experiment ID: 108434 Result: Up-regulated in Transcription
  misc_feature: MA Experiment 108434 PARAMETER Experiment Name: At_Root_Tips_cDNA_P Parameter: Tissue Value: Root Tips
  misc_feature: MA Experiment ID: 108462 Result: Down-regulated in Transcription
  misc_feature: MA Experiment 108462 PARAMETER Experiment Name: At_Germinating_Seeds_cDNA_P Parameter: Age (day) Value: 2 vs. 0
  misc_feature: MA Experiment 108462 PARAMETER Experiment Name: At_Germinating_Seeds_cDNA_P Parameter: Tissue Value: Germinating Seeds
  misc_feature: MA Experiment ID: 108463 Result: Down-regulated in Transcription
  misc_feature: MA Experiment 108463 PARAMETER Experiment Name: At_Germinating_Seeds_cDNA_P Parameter: Age (day) Value: 3 vs. 0
  misc_feature: MA Experiment 108463 PARAMETER Experiment Name: At_Germinating_Seeds_cDNA_P Parameter: Tissue Value: Germinating Seeds
  misc_feature: MA Experiment ID: 108464 Result: Down-regulated in Transcription
  misc_feature: MA Experiment 108464 PARAMETER Experiment Name: At_Germinating_Seeds_cDNA_P Parameter: Age (day) Value: 4 vs. 0
  misc_feature: MA Experiment 108464 PARAMETER Experiment Name: At_Germinating_Seeds_cDNA_P Parameter: Tissue Value: Germinating Seeds
  misc_feature: MA Experiment ID: 20000111 Result: Up-regulated in Transcription
  misc_feature: MA Experiment 20000111 PARAMETER Experiment Name: At_42deg_Heat_cDNA_P Parameter: Temperature (deg C) Value: 42 vs. 22
  misc_feature: MA Experiment 20000111 PARAMETER Experiment Name: At_42deg_Heat_cDNA_P Parameter: Timepoint (hr) Value: 6
  misc_feature: MA Experiment 20000111 PARAMETER Experiment Name: At_42deg_Heat_cDNA_P Parameter: Tissue Value: Aerial
  misc_feature: MA Experiment ID: 20000113 Result: Up-regulated in Transcription
  misc_feature: MA Experiment 20000113 PARAMETER Experiment Name: At_42deg_Heat_cDNA_P Parameter: Temperature (deg C) Value: 42 vs. 22
  misc_feature: MA Experiment 20000113 PARAMETER Experiment Name: At_42deg_Heat_cDNA_P Parameter: Timepoint (hr) Value: 8
  misc_feature: MA Experiment 20000113 PARAMETER Experiment Name: At_42deg_Heat_cDNA_P Parameter: Tissue Value: Aerial
tgggggaagaaaatttacagtgttgaaattggttaaaccctgacactagcaccttcctcagtcgcatcaccaccatgtcagagcgcgaccgccgcgaacgagagagggataaggaccgtgaaccagaccgtgatagacgccgaggtagagacgaccgtgaccgtgaccgtgatcgagaccgggaaagagatagagagcgcgaccgtgaccgagggcttagaaacaaaaaatcccgatctcgtactccagaccaccacgctcgtgctcgccacgtgcgctctccggagaggtatcgctctcgttcccgctcgattgaccgtgaccgggaccgggaccgtcaacgacaccacaggcgcaggtctccttctccagatgctccgtcgcgaaaacggcctcgccagggttcagtagacgatgagaaagaaaggaatcgcaaaagagtagtgactgattccgttgacgagaatgcgtctactattactaagaagaaggataaacaaccaagtgatgctgctgataatggcggaggcgaagatgaagaaggaatggatgtgaatgagattgagatgatgaagatgttagggattcctactggatttgattccacaaaaggcaaaccagttgctggtgctgatgttagtggtattagagctgtaactaagcgtcagccaagacagtacatgaaccgtcgcggtggatttaaccgtcctctaccggccgagcgtaatcgctagtcttctcaaggtccctctaacgctgtcttgaacactagtcaaaaagatgagggctagagctgcatttcccagatagtagttactagttactccaattcttccccagactctgttctgatgtcttatagagaacaaacttgtactctctgaatttggttggaaacaactcgtgagttatttctttttcgagatttaaaaatgttaatgtttgtgtgtaatctcccggctctaactgtcagactatggttcatttgaaatcaggcttattct

SEQ ID NO: 21848 - protein, 219 aa, Arabidopsis thaliana
  peptide (1)..(219): Ceres Seq. ID no. 13487086
  misc_feature (1)..(169): Pfam Name: SART-1 family Pfam Description: SART-1 family
  misc_feature (3)..(157): Homolog of NCBI NO: 23482058 NR Description: hypothetical protein [Plasmodium yoelii yoelii]
  misc_feature (44)..(213): Homolog of NCBI NO: 7513213 NR Description: nucleic acid binding protein - human (fragment)
  misc_feature (49)..(213): Homolog of NCBI NO: 34856367 NR Description: similar to putative nucleic acid binding protein
  misc_feature (3)..(163): Homolog of NCBI NO: 23508822 NR Description: eukaryotic translation initiation factor 3
  misc_feature (2)..(122): Homolog of NCBI NO: 23508822 NR Description: eukaryotic translation initiation factor 3
  misc_feature (3)..(142): Homolog of NCBI NO: 23508822 NR Description: eukaryotic translation initiation factor 3
  misc_feature (2)..(217): Homolog of NCBI NO: 40738944 NR Description: hypothetical protein AN6605.2 [Aspergillus
  misc_feature (1)..(215): Homolog of NCBI NO: 23478750 NR Description: cyclophilin-RNA interacting protein [Plasmodium
  misc_feature (1)..(219): Homolog of NCBI NO: 21592725 NR Description: unknown [Arabidopsis thaliana]
  misc_feature (1)..(219): Homolog of NCBI NO: 18423973 NR Description: expressed protein [Arabidopsis thaliana]
MSERDRRERERDKDREPDRDRRRGRDDRDRDRDRDRERDRERDRDRGLRNKKSRSRTPDHHARARHVRSPERYRSRSRSIDRDRDRDRQRHHRRRSPSPDAPSRKRPRQGSVDDEKERNRKRVVTDSVDENASTITKKKDKQPSDAADNGGGEDEEGMDVNEIEMMKMLGIPTGFDSTKGKPVAGADVSGIRAVTKRQPRQYMNRRGGFNRPLPAERNR

SEQ ID NO: 21849 - DNA, 1287 bp, Arabidopsis thaliana
  misc_feature (1)..(1287): Ceres Seq. ID no. 12338075
  misc_feature: MA Experiment ID: 20000179 Result: Up-regulated in Transcription
  misc_feature: MA Experiment 20000179 PARAMETER Experiment Name: At_Germinating_Seeds_P Parameter: Age (hr) Value: 6 vs. 0
  misc_feature: MA Experiment 20000179 PARAMETER Experiment Name: At_Germinating_Seeds_P Parameter: Tissue Value: Germinating Seeds
  misc_feature: MA Experiment ID: 20000184 Result: Down-regulated in Transcription
  misc_feature: MA Experiment 20000184 PARAMETER Experiment Name: At_Shoots__P Parameter: Age (day) Value: 7
  misc_feature: MA Experiment 20000184 PARAMETER Experiment Name: At_Shoots__P Parameter: Tissue Value: Shoots vs. Whole Plant
  misc_feature: MA Experiment ID: 20000264 Result: Down-regulated in Transcription
  misc_feature: MA Experiment 20000264 PARAMETER Experiment Name: At_Open_Flower_P Parameter: Age (day) Value: 21
  misc_feature: MA Experiment 20000264 PARAMETER Experiment Name: At_Open_Flower_P Parameter: Plant Line Value: WS
  misc_feature: MA Experiment 20000264 PARAMETER Experiment Name: At_Open_Flower_P Parameter: Tissue Value: Open Flower vs. Whole Plant
  misc_feature: MA Experiment ID: 20000265 Result: Down-regulated in Transcription
  misc_feature: MA Experiment 20000265 PARAMETER Experiment Name: At_Open_Flower_P Parameter: Age (day) Value: 21
  misc_feature: MA Experiment 20000265 PARAMETER Experiment Name: At_Open_Flower_P Parameter: Plant Line Value: WS
  misc_feature: MA Experiment 20000265 PARAMETER Experiment Name: At_Open_Flower_P Parameter: Tissue Value: Closed Flower vs. Whole Plant
  misc_feature: MA Experiment ID: 20000286 Result: Down-regulated in Transcription
  misc_feature: MA Experiment 20000286 PARAMETER Experiment Name: At_Open_Flower_P Parameter: Age (day) Value: 21
  misc_feature: MA Experiment 20000286 PARAMETER Experiment Name: At_Open_Flower_P Parameter: Plant Line Value: WS
  misc_feature: MA Experiment 20000286 PARAMETER Experiment Name: At_Open_Flower_P Parameter: Tissue Value: Half Open vs. Whole Plant
  misc_feature: MA Experiment ID: 20000438 Result: Down-regulated in Transcription
  misc_feature: MA Experiment 20000438 PARAMETER Experiment Name: At_Shoots__P Parameter: Age (day) Value: 14
  misc_feature: MA Experiment 20000438 PARAMETER Experiment Name: At_Shoots__P Parameter: Tissue Value: Shoots vs. Whole Plant
  misc_feature: MA Experiment ID: 20000794 Result: Down-regulated in Transcription
  misc_feature: MA Experiment 20000794 PARAMETER Experiment Name: At_Petals_P Parameter: Age (day) Value: 23-25 days
  misc_feature: MA Experiment 20000794 PARAMETER Experiment Name: At_Petals_P Parameter: Plant Line Value: WS
  misc_feature: MA Experiment 20000794 PARAMETER Experiment Name: At_Petals_P Parameter: Tissue Value: Petals vs. Whole plant
  misc_feature: MA Experiment ID: 20001451 Result: Down-regulated in Transcription
  misc_feature: MA Experiment 20001451 PARAMETER Experiment Name: At_Far-red-induction_P Parameter: Age (day) Value: 7
  misc_feature: MA Experiment 20001451 PARAMETER Experiment Name: At_Far-red-induction_P Parameter: Light Value: Far-red vs. White
  misc_feature: MA Experiment 20001451 PARAMETER Experiment Name: At_Far-red-induction_P Parameter: Organism Value: A. thaliana
  misc_feature: MA Experiment 20001451 PARAMETER Experiment Name: At_Far-red-induction_P Parameter: Plant Line Value: Columbia
  misc_feature: MA Experiment 20001451 PARAMETER Experiment Name: At_Far-red-induction_P Parameter: Timepoint (hr) Value: 24
  misc_feature: MA Experiment 20001451 PARAMETER Experiment Name: At_Far-red-induction_P Parameter: Tissue Value: Whole Plant
  misc_feature: MA Experiment ID: 20001905 Result: Up-regulated in Transcription
  misc_feature: MA Experiment 20001905 PARAMETER Experiment Name: At_Drought_Reproduction_P Parameter: Age (day) Value: 40
  misc_feature: MA Experiment 20001905 PARAMETER Experiment Name: At_Drought_Reproduction_P Parameter: Organism Value: A. thaliana
  misc_feature: MA Experiment 20001905 PARAMETER Experiment Name: At_Drought_Reproduction_P Parameter: Plant Line Value: WS
  misc_feature: MA Experiment 20001905 PARAMETER Experiment Name: At_Drought_Reproduction_P Parameter: Timepoint (day) Value: 10
  misc_feature: MA Experiment 20001905 PARAMETER Experiment Name: At_Drought_Reproduction_P Parameter: Tissue Value: Rosettes
  misc_feature: MA Experiment 20001905 PARAMETER Experiment Name: At_Drought_Reproduction_P Parameter: Treatment Value: Drought vs. No Drought
acaaagttttcgtttttagggttctctcatcgatctcggtttgtgatcttcttcttcatcaatggcgtctagtgataaacaaacaagcccaaagcctccaccttcaccgtctcctctccgtaattccaagttttgtcagtcaaatatgagaattttgatctcaggaggagctggattcattggctctcaccttgttgataagctgatggaaaacgaaaagaatgaggtgattgttgctgataactatttcaccggttcaaaggacaatctcaagaagtggattggtcatccgagatttgagcttatccgtcatgatgtcacagagccacttctgatcgaggttgatcagatttaccatcttgcatgtcctgcttctcctatcttctacaagtacaaccctgtgaagacaatcaagaccaatgtcattggcacactgaacatgctaggtcttgccaagcgtgttggagcaaggattttgcttacctcaacctcggaggtatatggagatcctcttatccatccccagcccgagagctattggggaaatgtcaacccaattggtgttaggagctgttatgatgaaggcaagcgtgttgctgagaccttgatgtttgactaccacaggcagcatggaattgaaatccgcattgccagaatcttcaacacttatggtccacgcatgaacattgatgatggacgtgttgtaagcaacttcattgctcaagcactccgtggtgaggcattgactgttcagaaaccagggacacagactcgcagtttctgttatgtatctgacatggttgatggacttatgcgcctcatggaaggagatgacactggtcccatcaacatcggtaacccaggtgagtttacaatggtggagttggctgagacagtgaaagagctgattaacccgagcatagagataaagatggttgagaacacaccggatgatccaagacagaggaagccagacatcacaaaggctaaagaagttttgggatgggaaccaaaggtgaagcttcgtgaaggcctgccccttatggaagaagacttcaggctaaggctcggagtccacaagaactaaaactccatcaccgatgatcacacgcaaacgtgaatgcactacataacccagttctacacttttcatattccttggtgcaagtggtttgtttcataaaatatgtttctactttccacagtcagaaattattcctagagaaaaataaagattatgaacgaatgctttttatatttaaggaagataaaaattactttcttgcc

SEQ ID NO: 21850 - protein, 341 aa, Arabidopsis thaliana
  peptide (1)..(341): Ceres Seq. ID no. 12338076
  misc_feature (31)..(337): Pfam Name: NAD dependent epimerase/dehydratase family Pfam Description: NAD dependent epimerase/dehydratase family
  misc_feature (29)..(341): Homolog of NCBI NO: 15227109 NR Description: putative dTDP-glucose 4-6-dehydratase; protein
  misc_feature (78)..(341): Homolog of NCBI NO: 2351580 NR Description: thymidine diphospho-glucose 4-6-dehydratase
  misc_feature (3)..(340): Homolog of NCBI NO: 11121508 NR Description: d-TDP-glucose dehydratase [Phragmites australis]
  misc_feature (3)..(340): Homolog of NCBI NO: 18447934 NR Description: UDP-glucuronic acid decarboxylase
  misc_feature (1)..(340): Homolog of NCBI NO: 11270075 NR Description: dTDPglucose 4,6-dehydratase (EC 4.2.1.46)
  misc_feature (1)..(341): Homolog of NCBI NO: 13591616 NR Description: UDP-D-glucuronate carboxy-lyase [Pisum sativum]
  misc_feature (3)..(340): Homolog of NCBI NO: 15226950 NR Description: putative nucleotide-sugar dehydratase
  misc_feature (2)..(341): Homolog of NCBI NO: 14030703 NR Description: AT5g59290/mnc17_180 [Arabidopsis thaliana]
  misc_feature (2)..(341): Homolog of NCBI NO: 15237853 NR Description: dTDP-glucose 4-6-dehydratase - like protein
  misc_feature (1)..(341): Homolog of NCBI NO: 15231432 NR Description: dTDP-glucose 4-6-dehydratases-like protein
MASSDKQTSPKPPPSPSPLRNSKFCQSNMRILISGGAGFIGSHLVDKLMENEKNEVIVADNYFTGSKDNLKKWIGHPRFELIRHDVTEPLLIEVDQIYHLACPASPIFYKYNPVKTIKTNVIGTLNMLGLAKRVGARILLTSTSEVYGDPLIHPQPESYWGNVNPIGVRSCYDEGKRVAETLMFDYHRQHGIEIRIARIFNTYGPRMNIDDGRVVSNFIAQALRGEALTVQKPGTQTRSFCYVSDMVDGLMRLMEGDDTGPINIGNPGEFTMVELAETVKELINPSIEIKMVENTPDDPRQRKPDITKAKEVLGWEPKVKLREGLPLMEEDFRLRLGVHKN

SEQ ID NO: 21851 - protein, 313 aa, Arabidopsis thaliana
  peptide (1)..(313): Ceres Seq. ID no. 12338077
  misc_feature (3)..(309): Pfam Name: NAD dependent epimerase/dehydratase family Pfam Description: NAD dependent epimerase/dehydratase family
  misc_feature (1)..(313): Homolog of NCBI NO: 15227109 NR Description: putative dTDP-glucose 4-6-dehydratase; protein
  misc_feature (50)..(313): Homolog of NCBI NO: 2351580 NR Description: thymidine diphospho-glucose 4-6-dehydratase
  misc_feature (1)..(312): Homolog of NCBI NO: 11121508 NR Description: d-TDP-glucose dehydratase [Phragmites australis]
  misc_feature (1)..(312): Homolog of NCBI NO: 18447934 NR Description: UDP-glucuronic acid decarboxylase
  misc_feature (1)..(312): Homolog of NCBI NO: 11270075 NR Description: dTDPglucose 4,6-dehydratase (EC 4.2.1.46)
  misc_feature (1)..(313): Homolog of NCBI NO: 13591616 NR Description: UDP-D-glucuronate carboxy-lyase [Pisum sativum]
  misc_feature (1)..(312): Homolog of NCBI NO: 15226950 NR Description: putative nucleotide-sugar dehydratase
  misc_feature (1)..(313): Homolog of NCBI NO: 14030703 NR Description: AT5g59290/mnc17_180 [Arabidopsis thaliana]
  misc_feature (1)..(313): Homolog of NCBI NO: 15237853 NR Description: dTDP-glucose 4-6-dehydratase - like protein
  misc_feature (1)..(313): Homolog of NCBI NO: 15231432 NR Description: dTDP-glucose 4-6-dehydratases-like protein
MRILISGGAGFIGSHLVDKLMENEKNEVIVADNYFTGSKDNLKKWIGHPRFELIRHDVTEPLLIEVDQIYHLACPASPIFYKYNPVKTIKTNVIGTLNMLGLAKRVGARILLTSTSEVYGDPLIHPQPESYWGNVNPIGVRSCYDEGKRVAETLMFDYHRQHGIEIRIARIFNTYGPRMNIDDGRVVSNFIAQALRGEALTVQKPGTQTRSFCYVSDMVDGLMRLMEGDDTGPINIGNPGEFTMVELAETVKELINPSIEIKMVENTPDDPRQRKPDITKAKEVLGWEPKVKLREGLPLMEEDFRLRLGVHKN

SEQ ID NO: 21852 - protein, 293 aa, Arabidopsis thaliana
  peptide (1)..(293): Ceres Seq. ID no. 12338078
  misc_feature (1)..(289): Pfam Name: NAD dependent epimerase/dehydratase family Pfam Description: NAD dependent epimerase/dehydratase family
  misc_feature (1)..(293): Homolog of NCBI NO: 15227109 NR Description: putative dTDP-glucose 4-6-dehydratase; protein
  misc_feature (30)..(293): Homolog of NCBI NO: 2351580 NR Description: thymidine diphospho-glucose 4-6-dehydratase
  misc_feature (1)..(292): Homolog of NCBI NO: 11121508 NR Description: d-TDP-glucose dehydratase [Phragmites australis]
  misc_feature (1)..(292): Homolog of NCBI NO: 18447934 NR Description: UDP-glucuronic acid decarboxylase
  misc_feature (1)..(292): Homolog of NCBI NO: 11270075 NR Description: dTDPglucose 4,6-dehydratase (EC 4.2.1.46)
  misc_feature (1)..(293): Homolog of NCBI NO: 13591616 NR Description: UDP-D-glucuronate carboxy-lyase [Pisum sativum]
  misc_feature (1)..(292): Homolog of NCBI NO: 15226950 NR Description: putative nucleotide-sugar dehydratase
  misc_feature (1)..(293): Homolog of NCBI NO: 14030703 NR Description: AT5g59290/mnc17_180 [Arabidopsis thaliana]
  misc_feature (1)..(293): Homolog of NCBI NO: 15237853 NR Description: dTDP-glucose 4-6-dehydratase - like protein
  misc_feature (1)..(293): Homolog of NCBI NO: 15231432 NR Description: dTDP-glucose 4-6-dehydratases-like protein
MENEKNEVIVADNYFTGSKDNLKKWIGHPRFELIRHDVTEPLLIEVDQIYHLACPASPIFYKYNPVKTIKTNVIGTLNMLGLAKRVGARILLTSTSEVYGDPLIHPQPESYWGNVNPIGVRSCYDEGKRVAETLMFDYHRQHGIEIRIARIFNTYGPRMNIDDGRVVSNFIAQALRGEALTVQKPGTQTRSFCYVSDMVDGLMRLMEGDDTGPINIGNPGEFTMVELAETVKELINPSIEIKMVENTPDDPRQRKPDITKAKEVLGWEPKVKLREGLPLMEEDFRLRLGVHKN

SEQ ID NO: 21853 - DNA, 782 bp, Arabidopsis thaliana
  misc_feature (1)..(782): Ceres Seq. ID no. 12330117
  misc_feature: MA Experiment ID: 108434 Result: Down-regulated in Transcription
  misc_feature: MA Experiment 108434 PARAMETER Experiment Name: At_Root_Tips_cDNA_P Parameter: Tissue Value: Root Tips
  misc_feature: MA Experiment ID: 108561 Result: Up-regulated in Transcription
  misc_feature: MA Experiment 108561 PARAMETER Experiment Name: At_100uM_ABA_cDNA_P Parameter: Timepoint (hr) Value: 6
  misc_feature: MA Experiment 108561 PARAMETER Experiment Name: At_100uM_ABA_cDNA_P Parameter: Tissue Value: Aerial
  misc_feature: MA Experiment 108561 PARAMETER Experiment Name: At_100uM_ABA_cDNA_P Parameter: Treatment Value: 100uM ABA vs. No Treatment
  misc_feature: MA Experiment ID: 108595 Result: Down-regulated in Transcription
  misc_feature: MA Experiment 108595 PARAMETER Experiment Name: At_Ler-pi_Ovule_cDNA_P Parameter: Plant Line Value: null
  misc_feature: MA Experiment ID: 108668 Result: Up-regulated in Transcription
  misc_feature: MA Experiment 108668 PARAMETER Experiment Name: At_2mM_SA_cDNA_P Parameter: Plant Line Value: WS
  misc_feature: MA Experiment 108668 PARAMETER Experiment Name: At_2mM_SA_cDNA_P Parameter: Timepoint (hr) Value: 6
  misc_feature: MA Experiment 108668 PARAMETER Experiment Name: At_2mM_SA_cDNA_P Parameter: Treatment Value: 2mM SA vs. No Treatment
  misc_feature: MA Experiment ID: 20000069 Result: Up-regulated in Transcription
  misc_feature: MA Experiment 20000069 PARAMETER Experiment Name: At_100uM_ABA_Mutants_cDNA_P Parameter: Plant Line Value: CS23
  misc_feature: MA Experiment 20000069 PARAMETER Experiment Name: At_100uM_ABA_Mutants_cDNA_P Parameter: Timepoint (hr) Value: 6
  misc_feature: MA Experiment 20000069 PARAMETER Experiment Name: At_100uM_ABA_Mutants_cDNA_P Parameter: Tissue Value: Aerial
  misc_feature: MA Experiment 20000069 PARAMETER Experiment Name: At_100uM_ABA_Mutants_cDNA_P Parameter: Treatment Value: 100uM ABA vs. No Treatment
  misc_feature: MA Experiment ID: 20000071 Result: Up-regulated in Transcription
  misc_feature: MA Experiment 20000071 PARAMETER Experiment Name: At_100uM_ABA_Mutants_cDNA_P Parameter: Plant Line Value: CS8104
  misc_feature: MA Experiment 20000071 PARAMETER Experiment Name: At_100uM_ABA_Mutants_cDNA_P Parameter: Timepoint (hr) Value: 6
  misc_feature: MA Experiment 20000071 PARAMETER Experiment Name: At_100uM_ABA_Mutants_cDNA_P Parameter: Tissue Value: Aerial
  misc_feature: MA Experiment 20000071 PARAMETER Experiment Name: At_100uM_ABA_Mutants_cDNA_P Parameter: Treatment Value: 100uM ABA vs. No Treatment
  misc_feature: MA Experiment ID: 20000087 Result: Up-regulated in Transcription
  misc_feature: MA Experiment 20000087 PARAMETER Experiment Name: At_100uM_ABA_Mutants_cDNA_P Parameter: Plant Line Value: WS
  misc_feature: MA Experiment 20000087 PARAMETER Experiment Name: At_100uM_ABA_Mutants_cDNA_P Parameter: Timepoint (hr) Value: 6
  misc_feature: MA Experiment 20000087 PARAMETER Experiment Name: At_100uM_ABA_Mutants_cDNA_P Parameter: Tissue Value: Aerial
  misc_feature: MA Experiment 20000087 PARAMETER Experiment Name: At_100uM_ABA_Mutants_cDNA_P Parameter: Treatment Value: 100uM ABA vs. No Treatment
  misc_feature: MA Experiment ID: 20000089 Result: Up-regulated in Transcription
  misc_feature: MA Experiment ID: 20000090 Result: Up-regulated in Transcription
  misc_feature: MA Experiment ID: 20000117 Result: Up-regulated in Transcription
  misc_feature: MA Experiment 20000117 PARAMETER Experiment Name: At_100uM_ABA_Mutants_cDNA_P Parameter: Plant Line Value: Columbia
  misc_feature: MA Experiment 20000117 PARAMETER Experiment Name: At_100uM_ABA_Mutants_cDNA_P Parameter: Timepoint (hr) Value: 6
  misc_feature: MA Experiment 20000117 PARAMETER Experiment Name: At_100uM_ABA_Mutants_cDNA_P Parameter: Tissue Value: Aerial
  misc_feature: MA Experiment 20000117 PARAMETER Experiment Name: At_100uM_ABA_Mutants_cDNA_P Parameter: Treatment Value: 100uM ABA vs. No Treatment
  misc_feature: MA Experiment ID: 20000180 Result: Down-regulated in Transcription
  misc_feature: MA Experiment 20000180 PARAMETER Experiment Name: At_Germinating_Seeds_P Parameter: Age (hr) Value: 24 vs. 0
  misc_feature: MA Experiment 20000180 PARAMETER Experiment Name: At_Germinating_Seeds_P Parameter: Tissue Value: Germinating Seeds
  misc_feature: MA Experiment ID: 20000182 Result: Up-regulated in Transcription
  misc_feature: MA Experiment 20000182 PARAMETER Experiment Name: At_2mM_SA_P Parameter: Age (day) Value: 14
  misc_feature: MA Experiment 20000182 PARAMETER Experiment Name: At_2mM_SA_P Parameter: Organism Value: A. thaliana
  misc_feature: MA Experiment 20000182 PARAMETER Experiment Name: At_2mM_SA_P Parameter: Plant Line Value: WS
  misc_feature: MA Experiment 20000182 PARAMETER Experiment Name: At_2mM_SA_P Parameter: Timepoint (hr) Value: 6
  misc_feature: MA Experiment 20000182 PARAMETER Experiment Name: At_2mM_SA_P Parameter: Tissue Value: Aerial
  misc_feature: MA Experiment 20000182 PARAMETER Experiment Name: At_2mM_SA_P Parameter: Treatment Value: 2mM SA vs. No Treatment
  misc_feature: MA Experiment ID: 20000184 Result: Down-regulated in Transcription
  misc_feature: MA Experiment 20000184 PARAMETER Experiment Name: At_Shoots__P Parameter: Age (day) Value: 7
  misc_feature: MA Experiment 20000184 PARAMETER Experiment Name: At_Shoots__P Parameter: Tissue Value: Shoots vs. Whole Plant
  misc_feature: MA Experiment ID: 20000437 Result: Up-regulated in Transcription
  misc_feature: MA Experiment 20000437 PARAMETER Experiment Name: At_Drought_P Parameter: Age (day) Value: 8
  misc_feature: MA Experiment 20000437 PARAMETER Experiment Name: At_Drought_P Parameter: Organism Value: A. thaliana
  misc_feature: MA Experiment 20000437 PARAMETER Experiment Name: At_Drought_P Parameter: Plant Line Value: WS
  misc_feature: MA Experiment 20000437 PARAMETER Experiment Name: At_Drought_P Parameter: Timepoint (hr) Value: 24
  misc_feature: MA Experiment 20000437 PARAMETER Experiment Name: At_Drought_P Parameter: Tissue Value: Whole Plant
  misc_feature: MA Experiment 20000437 PARAMETER Experiment Name: At_Drought_P Parameter: Treatment Value: Drought vs. No Drought
  misc_feature: MA Experiment ID: 20000438 Result: Down-regulated in Transcription
  misc_feature: MA Experiment 20000438 PARAMETER Experiment Name: At_Shoots__P Parameter: Age (day) Value: 14
  misc_feature: MA Experiment 20000438 PARAMETER Experiment Name: At_Shoots__P Parameter: Tissue Value: Shoots vs. Whole Plant
  misc_feature: MA Experiment ID: 20001247 Result: Down-regulated in Transcription
  misc_feature: MA Experiment 20001247 PARAMETER Experiment Name: At_Far-red-induction_P Parameter: Age (day) Value: 7
  misc_feature: MA Experiment 20001247 PARAMETER Experiment Name: At_Far-red-induction_P Parameter: Light Value: Far-red vs. White
  misc_feature: MA Experiment 20001247 PARAMETER Experiment Name: At_Far-red-induction_P Parameter: Organism Value: A. thaliana
  misc_feature: MA Experiment 20001247 PARAMETER Experiment Name: At_Far-red-induction_P Parameter: Plant Line Value: Columbia
  misc_feature: MA Experiment 20001247 PARAMETER Experiment Name: At_Far-red-induction_P Parameter: Timepoint (hr) Value: 1
  misc_feature: MA Experiment 20001247 PARAMETER Experiment Name: At_Far-red-induction_P Parameter: Tissue Value: Whole Plant
  misc_feature: MA Experiment ID: 20001451 Result: Down-regulated in Transcription
  misc_feature: MA Experiment 20001451 PARAMETER Experiment Name: At_Far-red-induction_P Parameter: Age (day) Value: 7
  misc_feature: MA Experiment 20001451 PARAMETER Experiment Name: At_Far-red-induction_P Parameter: Light Value: Far-red vs. White
  misc_feature: MA Experiment 20001451 PARAMETER Experiment Name: At_Far-red-induction_P Parameter: Organism Value: A. thaliana
  misc_feature: MA Experiment 20001451 PARAMETER Experiment Name: At_Far-red-induction_P Parameter: Plant Line Value: Columbia
  misc_feature: MA Experiment 20001451 PARAMETER Experiment Name: At_Far-red-induction_P Parameter: Timepoint (hr) Value: 24
  misc_feature: MA Experiment 20001451 PARAMETER Experiment Name: At_Far-red-induction_P Parameter: Tissue Value: Whole Plant
  misc_feature: MA Experiment ID: 20001904 Result: Up-regulated in Transcription
  misc_feature: MA Experiment 20001904 PARAMETER Experiment Name: At_Drought_Reproduction_P Parameter: Age (day) Value: 37
  misc_feature: MA Experiment 20001904 PARAMETER Experiment Name: At_Drought_Reproduction_P Parameter: Organism Value: A. thaliana
  misc_feature: MA Experiment 20001904 PARAMETER Experiment Name: At_Drought_Reproduction_P Parameter: Plant Line Value: WS
  misc_feature: MA Experiment 20001904 PARAMETER Experiment Name: At_Drought_Reproduction_P Parameter: Timepoint (day) Value: 7
  misc_feature: MA Experiment 20001904 PARAMETER Experiment Name: At_Drought_Reproduction_P Parameter: Tissue Value: Rosettes
  misc_feature: MA Experiment 20001904 PARAMETER Experiment Name: At_Drought_Reproduction_P Parameter: Treatment Value: Drought vs. No Drought
ttaacttcggtttagaaaaaaaaaaggagacgtcgtcgtcttctagcttctgattaagtctgataaattatgcccctaaatctgtaattctccaaggattcggattcgatcgatgaaagcttctcaagttttggcggctgcagcggcgagggttggaccggcgttaaggaagcaagtattaaccttaacggacgaagctgcttctagggttcaccatctcttgcaacagcgtcaaaaaccttttctccgattaggcgttaaggctcgtggctgcaacggcttgtcgtacactctcaattacgccgatgagaaaggtaaatttgacgagttggtagaagagaaaggtgtgaggatccttgttgaaccaaaggccttaatgcatgtgattggaacaaagatggattttgtagatgataaactcagatcagagtttgtgtttatcaatcctaactcacaaggacaatgcgggtgtggtgaatcgtttatgacaacatctacctctagtgctaagcagagtgctagttaacacacagtgatgcgtttacatttgtgattacactcatatattatactgttactggaattggcgttaatgagaaacaaatactttttaataagaattgagttttatgtttgtgcgctactttcaggcattagattggtcactttattgcatatacacattagaagctcatgttgttgcttagagatatttctgaagctatgtatttagtggaacggataatcttgagattaattaatgtattccttatccccaaagt

SEQ ID NO: 21854 - protein, 137 aa, Arabidopsis thaliana
  peptide (1)..(137): Ceres Seq. ID no. 12330118
  misc_feature (22)..(125): Pfam Name: HesB-like domain Pfam Description: HesB-like domain
  misc_feature (19)..(125): Homolog of NCBI NO: 6323001 NR Description: Iron Sulfur Assembly -- IscA/NifA homolog; Isa1p
  misc_feature (20)..(124): Homolog of NCBI NO: 15604345 NR Description: HESB PROTEIN (hesB2) [Rickettsia prowazekii]
  misc_feature (20)..(124): Homolog of NCBI NO: 25146411 NR Description: Protein Neurospora crassa like [Caenorhabditis
  misc_feature (20)..(124): Homolog of NCBI NO: 15892651 NR Description: hesB protein [Rickettsia conorii]
  misc_feature (23)..(124): Homolog of NCBI NO: 23013039 NR Description: hypothetical protein [Magnetospirillum
  misc_feature (1)..(126): Homolog of NCBI NO: 16798390 NR Description: iron-sulfur cluster assembly protein IscA
  misc_feature (18)..(127): Homolog of NCBI NO: 21805702 NR Description: hypothetical protein [Arabidopsis thaliana]
  misc_feature (18)..(127): Homolog of NCBI NO: 15227614 NR Description: hypothetical protein; protein id: At2g36260.1
  misc_feature (1)..(137): Homolog of NCBI NO: 15227287 NR Description: putative HesB-like protein
  misc_feature (1)..(137): Homolog of NCBI NO: 21592728 NR Description: putative HesB-like protein [Arabidopsis thaliana]
MKASQVLAAAAARVGPALRKQVLTLTDEAASRVHHLLQQRQKPFLRLGVKARGCNGLSYTLNYADEKGKFDELVEEKGVRILVEPKALMHVIGTKMDFVDDKLRSEFVFINPNSQGQCGCGESFMTTSTSSAKQSAS

SEQ ID NO: 21855 - DNA, 867 bp, Arabidopsis thaliana
  misc_feature (1)..(867): Ceres Seq. ID no. 4998681
  misc_feature: MA Experiment ID: 108434 Result: Up-regulated in Transcription
  misc_feature: MA Experiment 108434 PARAMETER Experiment Name: At_Root_Tips_cDNA_P Parameter: Tissue Value: Root Tips
  misc_feature: MA Experiment ID: 108462 Result: Down-regulated in Transcription
  misc_feature: MA Experiment 108462 PARAMETER Experiment Name: At_Germinating_Seeds_cDNA_P Parameter: Age (day) Value: 2 vs. 0
  misc_feature: MA Experiment 108462 PARAMETER Experiment Name: At_Germinating_Seeds_cDNA_P Parameter: Tissue Value: Germinating Seeds
  misc_feature: MA Experiment ID: 108463 Result: Down-regulated in Transcription
  misc_feature: MA Experiment 108463 PARAMETER Experiment Name: At_Germinating_Seeds_cDNA_P Parameter: Age (day) Value: 3 vs. 0
  misc_feature: MA Experiment 108463 PARAMETER Experiment Name: At_Germinating_Seeds_cDNA_P Parameter: Tissue Value: Germinating Seeds
agacagaaattagggttcattcatacatactcaaaaattaatagacgggaatggaactagagttcaagtgttccgatgttggagtatggaaggaggctctgtcttcgtacgattcccgaatcgaatcactgaacaaaccagaactcgtctctctcgaccaattctaccgcatcaaactcccttgtcttcttcacgaccgagaccctaacccttacctcactacttccgagctttctcaactcatgaaatggaagctctctcgtggaaaatggcggccgcgtctgctggacttcgtgtcgtctctagacgattcagtggtgaaatctgcttctgagaaagcttttaaatcgcttcctgacatctccaaggctgtgaaagagctcactgtgcttaagggcgttggtgctgccaccgcatccgccgttcttgctgcttacgcccctgacattgcaccatttatgtccgacgaggcaatggaggtggctcttgggaactcaaaggattactctttgaaacaatacttgttgtttgcaactaagctacaagataaagcaaaggaattaaagttgaagggagagtgggatgggccttcagatattgaaagagctctatggagttgtactgtgcgtgcaaagtcacagccagagaagagctcttccgggaagaaaagaaaacggtaggtgataatatttctatccagttcaccttccatccatttttaagatcaaccatatgtcagcagctcttctggaagtcatatccgtaattgttcaactgtagtaagtgttctcgaatgttttatcaaaatgctgagtatttagcggaatcatataacttgaagggaaaaaatggatactttacattttc

SEQ ID NO: 21856 - protein, 209 aa, Arabidopsis thaliana
  peptide (1)..(209): Ceres Seq. ID no. 4998682
  misc_feature (29)..(199): Homolog of NCBI NO: 20129011 NR Description: CG2446-PC [Drosophila melanogaster]
  misc_feature (1)..(140): Homolog of NCBI NO: 30682101 NR Description: expressed protein [Arabidopsis thaliana]
  misc_feature (1)..(209): Homolog of NCBI NO: 18399536 NR Description: expressed protein
  misc_feature (1)..(209): Homolog of NCBI NO: 15795142 NR Description: gb|AAF48080.1~gene_id:MQC3.4~similar to unknown
  misc_feature (43)..(185): Homolog of NCBI NO: 32422713 NR Description: hypothetical protein [Neurospora crassa]
  misc_feature (31)..(206): Homolog of NCBI NO: 40746364 NR Description: hypothetical protein AN1337.2 [Aspergillus
  misc_feature (31)..(182): Homolog of NCBI NO: 31209185 NR Description: ENSANGP00000014029 [Anopheles gambiae]
MELEFKCSDVGVWKEALSSYDSRIESLNKPELVSLDQFYRIKLPCLLHDRDPNPYLTTSELSQLMKWKLSRGKWRPRLLDFVSSLDDSVVKSASEKAFKSLPDISKAVKELTVLKGVGAATASAVLAAYAPDIAPFMSDEAMEVALGNSKDYSLKQYLLFATKLQDKAKELKLKGEWDGPSDIERALWSCTVRAKSQPEKSSSGKKRKR

SEQ ID NO: 21857 - protein, 145 aa, Arabidopsis thaliana
  peptide (1)..(145): Ceres Seq. ID no. 4998683
  misc_feature (1)..(121): Homolog of NCBI NO: 32422713 NR Description: hypothetical protein [Neurospora crassa]
  misc_feature (1)..(142): Homolog of NCBI NO: 40746364 NR Description: hypothetical protein AN1337.2 [Aspergillus
  misc_feature (1)..(118): Homolog of NCBI NO: 31209185 NR Description: ENSANGP00000014029 [Anopheles gambiae]
  misc_feature (1)..(135): Homolog of NCBI NO: 20129011 NR Description: CG2446-PC [Drosophila melanogaster]
  misc_feature (1)..(76): Homolog of NCBI NO: 30682101 NR Description: expressed protein [Arabidopsis thaliana]
  misc_feature (1)..(145): Homolog of NCBI NO: 18399536 NR Description: expressed protein
  misc_feature (1)..(145): Homolog of NCBI NO: 15795142 NR Description: gb|AAF48080.1~gene_id:MQC3.4~similar to unknown
MKWKLSRGKWRPRLLDFVSSLDDSVVKSASEKAFKSLPDISKAVKELTVLKGVGAATASAVLAAYAPDIAPFMSDEAMEVALGNSKDYSLKQYLLFATKLQDKAKELKLKGEWDGPSDIERALWSCTVRAKSQPEKSSSGKKRKR

SEQ ID NO: 21858 - DNA, 728 bp, Arabidopsis thaliana
  misc_feature (1)..(728): Ceres Seq. ID no. 13496884
  misc_feature: MA Experiment ID: 20000184 Result: Up-regulated in Transcription
  misc_feature: MA Experiment 20000184 PARAMETER Experiment Name: At_Shoots__P Parameter: Age (day) Value: 7
  misc_feature: MA Experiment 20000184 PARAMETER Experiment Name: At_Shoots__P Parameter: Tissue Value: Shoots vs. Whole Plant
  misc_feature: MA Experiment ID: 20000234 Result: Up-regulated in Transcription
  misc_feature: MA Experiment 20000234 PARAMETER Experiment Name: At_Siliques_P Parameter: Age (day) Value: 21
  misc_feature: MA Experiment 20000234 PARAMETER Experiment Name: At_Siliques_P Parameter: Organism Value: A. thaliana
  misc_feature: MA Experiment 20000234 PARAMETER Experiment Name: At_Siliques_P Parameter: Plant Line Value: WS
  misc_feature: MA Experiment 20000234 PARAMETER Experiment Name: At_Siliques_P Parameter: Tissue Value: Less Than 5mm Siliques vs. Whole Plant
  misc_feature: MA Experiment ID: 20000439 Result: Up-regulated in Transcription
  misc_feature: MA Experiment 20000439 PARAMETER Experiment Name: At_Roots__P Parameter: Age (day) Value: 14 vs. 21
  misc_feature: MA Experiment 20000439 PARAMETER Experiment Name: At_Roots__P Parameter: Organism Value: A. thaliana
  misc_feature: MA Experiment 20000439 PARAMETER Experiment Name: At_Roots__P Parameter: Tissue Value: Roots vs. Whole Plant
aacgttcccttcgttgttcatcggaatccctagaacactcgatttcagcaaaatcaaatcggattcagtgatcaaaagtcaatttggtcgagaagaaattgagcgttgaagatgacggaggcgatgataagaaataagccaggaatggcgagtgtgaaggatatgccgctgcttcaggatggtccgccaccgggtgggttcgcaccggtccgatatgcccgccggatatccaatacgggtcctagtgcaatggccatgttccttgccgtttctggtgcctttgcttggggaatgtaccaggtcggccagggaaacaaaatccgcagggcattgaaggaagagaaatatgctgctcgtagaacaatacttcccattcttcaagcagaagaagatgaaaggtttgtgtctgagtggaaaaagtatctggaatatgaggctgatgtaatgaaagatgttccgggatggaaagttggcgagaatgtgtacaattctggtcgctggatgcctccggctactggggaactccgtcctgatgtgtggtgatttcctagtttctctcaaatgcatatgatgatgatgaatgatgtttcgctgaggattgatatgttcttgttatatctttttttcttcgggtaataagagaatgattcaacagacagtattcttcttgtattggttttctcttaagtgtttcaatcgtaatatgaggcaaaaacagtttcatgatt

SEQ ID NO: 21859 - protein, 143 aa, Arabidopsis thaliana
  peptide (1)..(143): Ceres Seq. ID no. 13496885
  misc_feature (16)..(141): Pfam Name: GRIM-19 protein Pfam Description: GRIM-19 protein
  misc_feature (13)..(138): Homolog of NCBI NO: 34809544 NR Description: GRIM19 protein [Homo sapiens]
  misc_feature (22)..(138): Homolog of NCBI NO: 28603804 NR Description: cell death-regulatory protein GRIM19 [Bos taurus]
  misc_feature (1)..(138): Homolog of NCBI NO: 21361822 NR Description: cell death-regulatory protein GRIM19; CGI-39
  misc_feature (1)..(140): Homolog of NCBI NO: 34334020 NR Description: NADH:ubiquinone oxidoreductase B16.6 subunit
  misc_feature (1)..(72): Homolog of NCBI NO: 26451954 NR Description: unknown protein [Arabidopsis thaliana]
  misc_feature (1)..(139): Homolog of NCBI NO: 16973316 NR Description: F6 [Gossypium hirsutum]
  misc_feature (1)..(143): Homolog of NCBI NO: 18403216 NR Description: expressed protein [Arabidopsis thaliana]
  misc_feature (1)..(142): Homolog of NCBI NO: 15219769 NR Description: expressed protein [Arabidopsis thaliana]
  misc_feature (1)..(141): Homolog of NCBI NO: 25406799 NR Description: hypothetical protein [imported] - Arabidopsis
  misc_feature (1)..(143): Homolog of NCBI NO: 20260652 NR Description: unknown protein [Arabidopsis thaliana]
MTEAMIRNKPGMASVKDMPLLQDGPPPGGFAPVRYARRISNTGPSAMAMFLAVSGAFAWGMYQVGQGNKIRRALKEEKYAARRTILPILQAEEDERFVSEWKKYLEYEADVMKDVPGWKVGENVYNSGRWMPPATGELRPDVW

SEQ ID NO: 21860 - protein, 139 aa, Arabidopsis thaliana
  peptide (1)..(139): Ceres Seq. ID no. 13496886
  misc_feature (12)..(137): Pfam Name: GRIM-19 protein Pfam Description: GRIM-19 protein
  misc_feature (9)..(134): Homolog of NCBI NO: 34809544 NR Description: GRIM19 protein [Homo sapiens]
  misc_feature (18)..(134): Homolog of NCBI NO: 28603804 NR Description: cell death-regulatory protein GRIM19 [Bos taurus]
  misc_feature (1)..(134): Homolog of NCBI NO: 21361822 NR Description: cell death-regulatory protein GRIM19; CGI-39
  misc_feature (1)..(136): Homolog of NCBI NO: 34334020 NR Description: NADH:ubiquinone oxidoreductase B16.6 subunit
  misc_feature (1)..(68): Homolog of NCBI NO: 26451954 NR Description: unknown protein [Arabidopsis thaliana]
  misc_feature (1)..(135): Homolog of NCBI NO: 16973316 NR Description: F6 [Gossypium hirsutum]
  misc_feature (1)..(139): Homolog of NCBI NO: 18403216 NR Description: expressed protein [Arabidopsis thaliana]
  misc_feature (1)..(138): Homolog of NCBI NO: 15219769 NR Description: expressed protein [Arabidopsis thaliana]
  misc_feature (1)..(137): Homolog of NCBI NO: 25406799 NR Description: hypothetical protein [imported] - Arabidopsis
  misc_feature (1)..(139): Homolog of NCBI NO: 20260652 NR Description: unknown protein [Arabidopsis thaliana]
MIRNKPGMASVKDMPLLQDGPPPGGFAPVRYARRISNTGPSAMAMFLAVSGAFAWGMYQVGQGNKIRRALKEEKYAARRTILPILQAEEDERFVSEWKKYLEYEADVMKDVPGWKVGENVYNSGRWMPPATGELRPDVW

SEQ ID NO: 21861 - protein, 132 aa, Arabidopsis thaliana
  peptide (1)..(132): Ceres Seq. ID no. 13496887
  misc_feature (5)..(130): Pfam Name: GRIM-19 protein Pfam Description: GRIM-19 protein
  misc_feature (2)..(127): Homolog of NCBI NO: 34809544 NR Description: GRIM19 protein [Homo sapiens]
  misc_feature (11)..(127): Homolog of NCBI NO: 28603804 NR Description: cell death-regulatory protein GRIM19 [Bos taurus]
  misc_feature (1)..(127): Homolog of NCBI NO: 21361822 NR Description: cell death-regulatory protein GRIM19; CGI-39
  misc_feature (1)..(129): Homolog of NCBI NO: 34334020 NR Description: NADH:ubiquinone oxidoreductase B16.6 subunit
  misc_feature (1)..(61): Homolog of NCBI NO: 26451954 NR Description: unknown protein [Arabidopsis thaliana]
  misc_feature (1)..(128): Homolog of NCBI NO: 16973316 NR Description: F6 [Gossypium hirsutum]
  misc_feature (1)..(132): Homolog of NCBI NO: 18403216 NR Description: expressed protein [Arabidopsis thaliana]
  misc_feature (1)..(131): Homolog of NCBI NO: 15219769 NR Description: expressed protein [Arabidopsis thaliana]
  misc_feature (1)..(130): Homolog of NCBI NO: 25406799 NR Description: hypothetical protein [imported] - Arabidopsis
  misc_feature (1)..(132): Homolog of NCBI NO: 20260652 NR Description: unknown protein [Arabidopsis thaliana]
MASVKDMPLLQDGPPPGGFAPVRYARRISNTGPSAMAMFLAVSGAFAWGMYQVGQGNKIRRALKEEKYAARRTILPILQAEEDERFVSEWKKYLEYEADVMKDVPGWKVGENVYNSGRWMPPATGELRPDVW

SEQ ID NO: 21862 - DNA, 577 bp, Arabidopsis thaliana
  misc_feature (1)..(577): Ceres Seq. ID no. 12339058
  misc_feature: MA Experiment ID: 20000185 Result: Down-regulated in Transcription
  misc_feature: MA Experiment 20000185 PARAMETER Experiment Name: At_Roots__P Parameter: Age (day) Value: 7 vs. 21
  misc_feature: MA Experiment 20000185 PARAMETER Experiment Name: At_Roots__P Parameter: Organism Value: A. thaliana
  misc_feature: MA Experiment 20000185 PARAMETER Experiment Name: At_Roots__P Parameter: Tissue Value: Roots vs. Whole Plant
  misc_feature: MA Experiment ID: 20000234 Result: Up-regulated in Transcription
  misc_feature: MA Experiment 20000234 PARAMETER Experiment Name: At_Siliques_P Parameter: Age (day) Value: 21
  misc_feature: MA Experiment 20000234 PARAMETER Experiment Name: At_Siliques_P Parameter: Organism Value: A. thaliana
  misc_feature: MA Experiment 20000234 PARAMETER Experiment Name: At_Siliques_P Parameter: Plant Line Value: WS
  misc_feature: MA Experiment 20000234 PARAMETER Experiment Name: At_Siliques_P Parameter: Tissue Value: Less Than 5mm Siliques vs. Whole Plant
  misc_feature: MA Experiment ID: 20000264 Result: Up-regulated in Transcription
  misc_feature: MA Experiment 20000264 PARAMETER Experiment Name: At_Open_Flower_P Parameter: Age (day) Value: 21
  misc_feature: MA Experiment 20000264 PARAMETER Experiment Name: At_Open_Flower_P Parameter: Plant Line Value: WS
  misc_feature: MA Experiment 20000264 PARAMETER Experiment Name: At_Open_Flower_P Parameter: Tissue Value: Open Flower vs. Whole Plant
  misc_feature: MA Experiment ID: 20000286 Result: Up-regulated in Transcription
  misc_feature: MA Experiment 20000286 PARAMETER Experiment Name: At_Open_Flower_P Parameter: Age (day) Value: 21
  misc_feature: MA Experiment 20000286 PARAMETER Experiment Name: At_Open_Flower_P Parameter: Plant Line Value: WS
  misc_feature: MA Experiment 20000286 PARAMETER Experiment Name: At_Open_Flower_P Parameter: Tissue Value: Half Open vs. Whole Plant
  misc_feature: MA Experiment ID: 20000794 Result: Up-regulated in Transcription
  misc_feature: MA Experiment 20000794 PARAMETER Experiment Name: At_Petals_P Parameter: Age (day) Value: 23-25 days
  misc_feature: MA Experiment 20000794 PARAMETER Experiment Name: At_Petals_P Parameter: Plant Line Value: WS
  misc_feature: MA Experiment 20000794 PARAMETER Experiment Name: At_Petals_P Parameter: Tissue Value: Petals vs. Whole plant
  misc_feature: MA Experiment ID: 20001757 Result: Down-regulated in Transcription
  misc_feature: MA Experiment 20001757 PARAMETER Experiment Name: At_50mM_NH4NO3_L-to-H_P Parameter: Timepoint (hr) Value: 6
  misc_feature: MA Experiment 20001757 PARAMETER Experiment Name: At_50mM_NH4NO3_L-to-H_P Parameter: Tissue Value: Leaf
  misc_feature: MA Experiment 20001757 PARAMETER Experiment Name: At_50mM_NH4NO3_L-to-H_P Parameter: Treatment Value: 50mM NH4NO3 vs 100mM Mannitol
  misc_feature: MA Experiment ID: 20001905 Result: Up-regulated in Transcription
  misc_feature: MA Experiment 20001905 PARAMETER Experiment Name: At_Drought_Reproduction_P Parameter: Age (day) Value: 40
  misc_feature: MA Experiment 20001905 PARAMETER Experiment Name: At_Drought_Reproduction_P Parameter: Organism Value: A. thaliana
  misc_feature: MA Experiment 20001905 PARAMETER Experiment Name: At_Drought_Reproduction_P Parameter: Plant Line Value: WS
  misc_feature: MA Experiment 20001905 PARAMETER Experiment Name: At_Drought_Reproduction_P Parameter: Timepoint (day) Value: 10
  misc_feature: MA Experiment 20001905 PARAMETER Experiment Name: At_Drought_Reproduction_P Parameter: Tissue Value: Rosettes
  misc_feature: MA Experiment 20001905 PARAMETER Experiment Name: At_Drought_Reproduction_P Parameter: Treatment Value: Drought vs. No Drought
aatcacaatcaataaacctcaaaccctaaaataaattaaacgagttctacgtaagaaggagagagagaagaatgggtcgccaaaacattgtcgtcgtggttgccctcgtcttcatggccatccttggccttgccgcagctgcctcctctccatctccttcagcgtctccctccaaagctccagctgcctccaaaaccgatcatgtcgaggctccagtcaccgatgaccaaatcggaaccaccgatgacgatgcagctcctactcctggtgacggtgacgttgcagtggctggtcctctaggaagtgactcctcgtacgacaatgcgcctacaggctctgctgattctgccaaaagcggtgcggcagctcttggcgtctctgcggtcgtcgttggtgttacatccattgctggttctttcttgttactctaagttgggcattgttttatgataagaaggttattttaaacgaagattatttatatgtaatgatgattgtgatgatcttgttgtaatttgtttctcctttgttaggagaaacgttgtctttgtaataatactgaaaaaaaaaacttttc

SEQ ID NO: 21863 - protein, 119 aa, Arabidopsis thaliana
  peptide (1)..(119): Ceres Seq. ID no. 12339059
  misc_feature (1)..(115): Homolog of NCBI NO: 21536506 NR Description: unknown [Arabidopsis thaliana]
  misc_feature (1)..(115): Homolog of NCBI NO: 18404806 NR Description: expressed protein
  misc_feature (1)..(119): Homolog of NCBI NO: 486757 NR Description: anther-specific protein (clone Bgp1) - field
  misc_feature (1)..(117): Homolog of NCBI NO: 1168619 NR Description: ANTHER-SPECIFIC PROTEIN BCP1
  misc_feature (1)..(119): Homolog of NCBI NO: 25355278 NR Description: protein F21J9.18 [imported] - Arabidopsis
  misc_feature (1)..(119): Homolog of NCBI NO: 21592730 NR Description: putative agp1 [Arabidopsis thaliana]
  misc_feature (1)..(112): Homolog of NCBI NO: 780177 NR Description: agp1 [Arabidopsis thaliana]
  misc_feature (1)..(109): Homolog of NCBI NO: 15221772 NR Description: putative agp1; protein id: At1g24520.1, supported
MGRQNIVVVVALVFMAILGLAAAASSPSPSASPSKAPAASKTDHVEAPVTDDQIGTTDDDAAPTPGDGDVAVAGPLGSDSSYDNAPTGSADSAKSGAAALGVSAVVVGVTSIAGSFLLL

SEQ ID NO: 21864 - protein, 105 aa, Arabidopsis thaliana
  peptide (1)..(105): Ceres Seq. ID no. 12339060
  misc_feature (1)..(101): Homolog of NCBI NO: 21536506 NR Description: unknown [Arabidopsis thaliana]
  misc_feature (1)..(101): Homolog of NCBI NO: 18404806 NR Description: expressed protein
  misc_feature (1)..(105): Homolog of NCBI NO: 486757 NR Description: anther-specific protein (clone Bgp1) - field
  misc_feature (1)..(103): Homolog of NCBI NO: 1168619 NR Description: ANTHER-SPECIFIC PROTEIN BCP1
  misc_feature (1)..(105): Homolog of NCBI NO: 25355278 NR Description: protein F21J9.18 [imported] - Arabidopsis
  misc_feature (1)..(105): Homolog of NCBI NO: 21592730 NR Description: putative agp1 [Arabidopsis thaliana]
  misc_feature (1)..(98): Homolog of NCBI NO: 780177 NR Description: agp1 [Arabidopsis thaliana]
  misc_feature (1)..(95): Homolog of NCBI NO: 15221772 NR Description: putative agp1; protein id: At1g24520.1, supported
MAILGLAAAASSPSPSASPSKAPAASKTDHVEAPVTDDQIGTTDDDAAPTPGDGDVAVAGPLGSDSSYDNAPTGSADSAKSGAAALGVSAVVVGVTSIAGSFLLL

SEQ ID NO: 21865 - DNA, 974 bp, Arabidopsis thaliana
  misc_feature (1)..(974): Ceres Seq. ID no. 13489807
  misc_feature: MA Experiment ID: 108434 Result: Up-regulated in Transcription
  misc_feature: MA Experiment 108434 PARAMETER Experiment Name: At_Root_Tips_cDNA_P Parameter: Tissue Value: Root Tips
  misc_feature: MA Experiment ID: 108461 Result: Up-regulated in Transcription
  misc_feature: MA Experiment 108461 PARAMETER Experiment Name: At_Germinating_Seeds_cDNA_P Parameter: Age (day) Value: 1 vs. 0
  misc_feature: MA Experiment 108461 PARAMETER Experiment Name: At_Germinating_Seeds_cDNA_P Parameter: Tissue Value: Germinating Seeds
  misc_feature: MA Experiment ID: 108462 Result: Up-regulated in Transcription
  misc_feature: MA Experiment 108462 PARAMETER Experiment Name: At_Germinating_Seeds_cDNA_P Parameter: Age (day) Value: 2 vs. 0
  misc_feature: MA Experiment 108462 PARAMETER Experiment Name: At_Germinating_Seeds_cDNA_P Parameter: Tissue Value: Germinating Seeds
  misc_feature: MA Experiment ID: 108463 Result: Up-regulated in Transcription
  misc_feature: MA Experiment 108463 PARAMETER Experiment Name: At_Germinating_Seeds_cDNA_P Parameter: Age (day) Value: 3 vs. 0
  misc_feature: MA Experiment 108463 PARAMETER Experiment Name: At_Germinating_Seeds_cDNA_P Parameter: Tissue Value: Germinating Seeds
  misc_feature: MA Experiment ID: 108464 Result: Up-regulated in Transcription
  misc_feature: MA Experiment 108464 PARAMETER Experiment Name: At_Germinating_Seeds_cDNA_P Parameter: Age (day) Value: 4 vs. 0
  misc_feature: MA Experiment 108464 PARAMETER Experiment Name: At_Germinating_Seeds_cDNA_P Parameter: Tissue Value: Germinating Seeds
  misc_feature: MA Experiment ID: 108572 Result: Up-regulated in Transcription
  misc_feature: MA Experiment 108572 PARAMETER Experiment Name: At_Drought_cDNA_P Parameter: Timepoint (hr) Value: 1
  misc_feature: MA Experiment 108572 PARAMETER Experiment Name: At_Drought_cDNA_P Parameter: Tissue Value: Aerial
  misc_feature: MA Experiment 108572 PARAMETER Experiment Name: At_Drought_cDNA_P Parameter: Treatment Value: Drought vs. No Drought
  misc_feature: MA Experiment ID: 108573 Result: Up-regulated in Transcription
  misc_feature: MA Experiment 108573 PARAMETER Experiment Name: At_Drought_cDNA_P Parameter: Timepoint (hr) Value: 6
  misc_feature: MA Experiment 108573 PARAMETER Experiment Name: At_Drought_cDNA_P Parameter: Tissue Value: Aerial
  misc_feature: MA Experiment 108573 PARAMETER Experiment Name: At_Drought_cDNA_P Parameter: Treatment Value: Drought vs. No Drought
  misc_feature: MA Experiment ID: 108605 Result: Up-regulated in Transcription
  misc_feature: MA Experiment 108605 PARAMETER Experiment Name: At_100uM_ABA_cDNA_P Parameter: Timepoint (hr) Value: 6
  misc_feature: MA Experiment 108605 PARAMETER Experiment Name: At_100uM_ABA_cDNA_P Parameter: Tissue Value: Aerial
  misc_feature: MA Experiment 108605 PARAMETER Experiment Name: At_100uM_ABA_cDNA_P Parameter: Treatment Value: 100uM ABA vs. No Treatment
  misc_feature: MA Experiment ID: 108607 Result: Up-regulated in Transcription
  misc_feature: MA Experiment 108607 PARAMETER Experiment Name: At_100uM_ABA_cDNA_P Parameter: Timepoint (hr) Value: 4
  misc_feature: MA Experiment 108607 PARAMETER Experiment Name: At_100uM_ABA_cDNA_P Parameter: Tissue Value: Aerial
  misc_feature: MA Experiment 108607 PARAMETER Experiment Name: At_100uM_ABA_cDNA_P Parameter: Treatment Value: 100uM ABA vs. No Treatment
  misc_feature: MA Experiment ID: 20000111 Result: Down-regulated in Transcription
  misc_feature: MA Experiment 20000111 PARAMETER Experiment Name: At_42deg_Heat_cDNA_P Parameter: Temperature (deg C) Value: 42 vs. 22
  misc_feature: MA Experiment 20000111 PARAMETER Experiment Name: At_42deg_Heat_cDNA_P Parameter: Timepoint (hr) Value: 6
  misc_feature: MA Experiment 20000111 PARAMETER Experiment Name: At_42deg_Heat_cDNA_P Parameter: Tissue Value: Aerial
  misc_feature: MA Experiment ID: 20000112 Result: Down-regulated in Transcription
  misc_feature: MA Experiment 20000112 PARAMETER Experiment Name: At_42deg_Heat_cDNA_P Parameter: Temperature (deg C) Value: 42 vs. 22
  misc_feature: MA Experiment 20000112 PARAMETER Experiment Name: At_42deg_Heat_cDNA_P Parameter: Timepoint (hr) Value: 2
  misc_feature: MA Experiment 20000112 PARAMETER Experiment Name: At_42deg_Heat_cDNA_P Parameter: Tissue Value: Aerial
  misc_feature: MA Experiment ID: 20000144 Result: Down-regulated in Transcription
  misc_feature: MA Experiment 20000144 PARAMETER Experiment Name: At_42deg_Heat_cDNA_P Parameter: Temperature (deg C) Value: 42 vs. 22
  misc_feature: MA Experiment 20000144 PARAMETER Experiment Name: At_42deg_Heat_cDNA_P Parameter: Timepoint (hr) Value: 1
  misc_feature: MA Experiment 20000144 PARAMETER Experiment Name: At_42deg_Heat_cDNA_P Parameter: Tissue Value: Aerial
  misc_feature: MA Experiment ID: 20000169 Result: Up-regulated in Transcription
  misc_feature: MA Experiment 20000169 PARAMETER Experiment Name: At_100uM_ABA_P Parameter: Age (day) Value: 14
  misc_feature: MA Experiment 20000169 PARAMETER Experiment Name: At_100uM_ABA_P Parameter: Organism Value: A. thaliana
  misc_feature: MA Experiment 20000169 PARAMETER Experiment Name: At_100uM_ABA_P Parameter: Plant Line Value: WS
  misc_feature: MA Experiment 20000169 PARAMETER Experiment Name: At_100uM_ABA_P Parameter: Timepoint (hr) Value: 6
  misc_feature: MA Experiment 20000169 PARAMETER Experiment Name: At_100uM_ABA_P Parameter: Tissue Value: Aerial
  misc_feature: MA Experiment 20000169 PARAMETER Experiment Name: At_100uM_ABA_P Parameter: Treatment Value: 100uM ABA vs. No Treatment
  misc_feature: MA Experiment ID: 20000180 Result: Up-regulated in Transcription
  misc_feature: MA Experiment 20000180 PARAMETER Experiment Name: At_Germinating_Seeds_P Parameter: Age (hr) Value: 24 vs. 0
  misc_feature: MA Experiment 20000180 PARAMETER Experiment Name: At_Germinating_Seeds_P Parameter: Tissue Value: Germinating Seeds
  misc_feature: MA Experiment ID: 20000184 Result: Up-regulated in Transcription
  misc_feature: MA Experiment 20000184 PARAMETER Experiment Name: At_Shoots__P Parameter: Age (day) Value: 7
  misc_feature: MA Experiment 20000184 PARAMETER Experiment Name: At_Shoots__P Parameter: Tissue Value: Shoots vs. Whole Plant
  misc_feature: MA Experiment ID: 20000185 Result: Up-regulated in Transcription
  misc_feature: MA Experiment 20000185 PARAMETER Experiment Name: At_Roots__P Parameter: Age (day) Value: 7 vs. 21
  misc_feature: MA Experiment 20000185 PARAMETER Experiment Name: At_Roots__P Parameter: Organism Value: A. thaliana
  misc_feature: MA Experiment 20000185 PARAMETER Experiment Name: At_Roots__P Parameter: Tissue Value: Roots vs. Whole Plant
  misc_feature: MA Experiment ID: 20000234 Result: Up-regulated in Transcription
  misc_feature: MA Experiment 20000234 PARAMETER Experiment Name: At_Siliques_P Parameter: Age (day) Value: 21
  misc_feature: MA Experiment 20000234 PARAMETER Experiment Name: At_Siliques_P Parameter: Organism Value: A. thaliana
  misc_feature: MA Experiment 20000234 PARAMETER Experiment Name: At_Siliques_P Parameter: Plant Line Value: WS
  misc_feature: MA Experiment 20000234 PARAMETER Experiment Name: At_Siliques_P Parameter: Tissue Value: Less Than 5mm Siliques vs. Whole Plant
  misc_feature: MA Experiment ID: 20000264 Result: Up-regulated in Transcription
  misc_feature: MA Experiment 20000264 PARAMETER Experiment Name: At_Open_Flower_P Parameter: Age (day) Value: 21
  misc_feature: MA Experiment 20000264 PARAMETER Experiment Name: At_Open_Flower_P Parameter: Plant Line Value: WS
  misc_feature: MA Experiment 20000264 PARAMETER Experiment Name: At_Open_Flower_P Parameter: Tissue Value: Open Flower vs. Whole Plant
  misc_feature: MA Experiment ID: 20000265 Result: Up-regulated in Transcription
  misc_feature: MA Experiment 20000265 PARAMETER Experiment Name: At_Open_Flower_P Parameter: Age (day) Value: 21
  misc_feature: MA Experiment 20000265 PARAMETER Experiment Name: At_Open_Flower_P Parameter: Plant Line Value: WS
  misc_feature: MA Experiment 20000265 PARAMETER Experiment Name: At_Open_Flower_P Parameter: Tissue Value: Closed Flower vs. Whole Plant
  misc_feature: MA Experiment ID: 20000286 Result: Up-regulated in Transcription
  misc_feature: MA Experiment 20000286 PARAMETER Experiment Name: At_Open_Flower_P Parameter: Age (day) Value: 21
  misc_feature: MA Experiment 20000286 PARAMETER Experiment Name: At_Open_Flower_P Parameter: Plant Line Value: WS
  misc_feature: MA Experiment 20000286 PARAMETER Experiment Name: At_Open_Flower_P Parameter: Tissue Value: Half Open vs. Whole Plant
  misc_feature: MA Experiment ID: 20000438 Result: Up-regulated in Transcription
  misc_feature: MA Experiment 20000438 PARAMETER Experiment Name: At_Shoots__P Parameter: Age (day) Value: 14
  misc_feature: MA Experiment 20000438 PARAMETER Experiment Name: At_Shoots__P Parameter: Tissue Value: Shoots vs. Whole Plant
  misc_feature: MA Experiment ID: 20000794 Result: Down-regulated in Transcription
  misc_feature: MA Experiment 20000794 PARAMETER Experiment Name: At_Petals_P Parameter: Age (day) Value: 23-25 days
  misc_feature: MA Experiment 20000794 PARAMETER Experiment Name: At_Petals_P Parameter: Plant Line Value: WS
  misc_feature: MA Experiment 20000794 PARAMETER Experiment Name: At_Petals_P Parameter: Tissue Value: Petals vs. Whole plant
  misc_feature: MA Experiment ID: 20001905 Result: Up-regulated in Transcription
  misc_feature: MA Experiment 20001905 PARAMETER Experiment Name: At_Drought_Reproduction_P Parameter: Age (day) Value: 40
  misc_feature: MA Experiment 20001905 PARAMETER Experiment Name: At_Drought_Reproduction_P Parameter: Organism Value: A. thaliana
  misc_feature: MA Experiment 20001905 PARAMETER Experiment Name: At_Drought_Reproduction_P Parameter: Plant Line Value: WS
  misc_feature: MA Experiment 20001905 PARAMETER Experiment Name: At_Drought_Reproduction_P Parameter: Timepoint (day) Value: 10
  misc_feature: MA Experiment 20001905 PARAMETER Experiment Name: At_Drought_Reproduction_P Parameter: Tissue Value: Rosettes
  misc_feature: MA Experiment 20001905 PARAMETER Experiment Name: At_Drought_Reproduction_P Parameter: Treatment Value: Drought vs. No Drought
ataaatgctcttctcctccgatctctccgccataaaatctactctttcttcttctgggtgttcaaagaattagtcgttctcgcgtattcactttccatggcgggctttctctccgttgtccggcgcgtgtacctcactctctacaattggatcgtctttgctggatgggctcaggttttgtacttagcgataacgacgttgaaggaaacgggttatgagaatgtctatgacgccattgagaagcctctccagcttgctcagactgccgccgttctcgagattcttcatggattagtaggtttggtcagatctcctgtttctgcaactctgccacagataggttcaaggctatttctcacttggggcatcctatacagttttccagaggtccgatctcattttcttgttacgtcgctggtcataagctggtctatcacagagattattcgctactcattcttcggctttaaggaagctctaggctttgcaccttcatggcacttgtggctcagatacagcagctttttattgctataccctaccggtatcaccagcgaagttggtcttatctaccttgccttaccacacatcaagacatcggagatgtacagcgttaggatgcctaacatattgaacttctcatttgacttcttctatgcaacgatactcgtccttgcaatctatgtcccaggtagcccacacatgtacaggtacatgcttggtcagcgaaagagagctctctccaaatccaagagggaataaaagaaaagatttagaaagagacgaaaaagctcatcaactgttttctcctcttgtcttgttcgttcatgtactactagtctactactacaacttgtcttttgtttagcttgtttgagcttttacttcctcggcgattacttgaacttacatgcagcaggatactattaagtgtaatgtggtttctaaattaataagaaaatcattggttcctt

SEQ ID NO: 21866 - protein, 253 aa, Arabidopsis thaliana
  peptide (1)..(253): Ceres Seq. ID no. 13489808
  misc_feature (87)..(251): Pfam Name: Protein tyrosine phosphatase-like protein, PTPLA Pfam Description: Protein tyrosine phosphatase-like protein, PTPLA
  misc_feature (37)..(247): Homolog of NCBI NO: 7305421 NR Description: protein tyrosine phosphatase-like (proline
  misc_feature (40)..(253): Homolog of NCBI NO: 20892371 NR Description: similar to protein tyrosine phosphatase-like
  misc_feature (40)..(253): Homolog of NCBI NO: 34869216 NR Description: similar to protein tyrosine phosphatase-like
  misc_feature (33)..(226): Homolog of NCBI NO: 34895854 NR Description: P0009G03.6 [Oryza sativa (japonica
  misc_feature (33)..(234): Homolog of NCBI NO: 34895856 NR Description: P0009G03.7 [Oryza sativa (japonica
  misc_feature (91)..(251): Homolog of NCBI NO: 34895852 NR Description: P0009G03.5 [Oryza sativa (japonica
  misc_feature (38)..(251): Homolog of NCBI NO: 34895862 NR Description: P0009G03.11 [Oryza sativa (japonica
  misc_feature (33)..(253): Homolog of NCBI NO: 11358666 NR Description: probable protein phosphatase - Arabidopsis
  misc_feature (33)..(251): Homolog of NCBI NO: 38344078 NR Description: OSJNBb0056F09.1 [Oryza sativa (japonica
  misc_feature (33)..(253): Homolog of NCBI NO: 22326707 NR Description: protein phosphatase -related [Arabidopsis
INALLLRSLRHKIYSFFFWVFKELVVLAYSLSMAGFLSVVRRVYLTLYNWIVFAGWAQVLYLAITTLKETGYENVYDAIEKPLQLAQTAAVLEILHGLVGLVRSPVSATLPQIGSRLFLTWGILYSFPEVRSHFLVTSLVISWSITEIIRYSFFGFKEALGFAPSWHLWLRYSSFLLLYPTGITSEVGLIYLALPHIKTSEMYSVRMPNILNFSFDFFYATILVLAIYVPGSPHMYRYMLGQRKRALSKSKRE

SEQ ID NO: 21867 - protein, 221 aa, Arabidopsis thaliana
  peptide (1)..(221): Ceres Seq. ID no. 13489809
  misc_feature (55)..(219): Pfam Name: Protein tyrosine phosphatase-like protein, PTPLA Pfam Description: Protein tyrosine phosphatase-like protein, PTPLA
  misc_feature (5)..(215): Homolog of NCBI NO: 7305421 NR Description: protein tyrosine phosphatase-like (proline
  misc_feature (8)..(221): Homolog of NCBI NO: 20892371 NR Description: similar to protein tyrosine phosphatase-like
  misc_feature (8)..(221): Homolog of NCBI NO: 34869216 NR Description: similar to protein tyrosine phosphatase-like
  misc_feature (1)..(194): Homolog of NCBI NO: 34895854 NR Description: P0009G03.6 [Oryza sativa (japonica
  misc_feature (1)..(202): Homolog of NCBI NO: 34895856 NR Description: P0009G03.7 [Oryza sativa (japonica
  misc_feature (59)..(219): Homolog of NCBI NO: 34895852 NR Description: P0009G03.5 [Oryza sativa (japonica
  misc_feature (6)..(219): Homolog of NCBI NO: 34895862 NR Description: P0009G03.11 [Oryza sativa (japonica
  misc_feature (1)..(221): Homolog of NCBI NO: 11358666 NR Description: probable protein phosphatase - Arabidopsis
  misc_feature (1)..(219): Homolog of NCBI NO: 38344078 NR Description: OSJNBb0056F09.1 [Oryza sativa (japonica
  misc_feature (1)..(221): Homolog of NCBI NO: 22326707 NR Description: protein phosphatase -related [Arabidopsis
MAGFLSVVRRVYLTLYNWIVFAGWAQVLYLAITTLKETGYENVYDAIEKPLQLAQTAAVLEILHGLVGLVRSPVSATLPQIGSRLFLTWGILYSFPEVRSHFLVTSLVISWSITEIIRYSFFGFKEALGFAPSWHLWLRYSSFLLLYPTGITSEVGLIYLALPHIKTSEMYSVRMPNILNFSFDFFYATILVLAIYVPGSPHMYRYMLGQRKRALSKSKRE

SEQ ID NO: 21868 - DNA, 1039 bp, Arabidopsis thaliana
  misc_feature (1)..(1039): Ceres Seq. ID no. 13496997
  misc_feature: MA Experiment ID: 108434 Result: Up-regulated in Transcription
  misc_feature: MA Experiment 108434 PARAMETER Experiment Name: At_Root_Tips_cDNA_P Parameter: Tissue Value: Root Tips
  misc_feature: MA Experiment ID: 108461 Result: Up-regulated in Transcription
  misc_feature: MA Experiment 108461 PARAMETER Experiment Name: At_Germinating_Seeds_cDNA_P Parameter: Age (day) Value: 1 vs. 0
  misc_feature: MA Experiment 108461 PARAMETER Experiment Name: At_Germinating_Seeds_cDNA_P Parameter: Tissue Value: Germinating Seeds
  misc_feature: MA Experiment ID: 20000180 Result: Up-regulated in Transcription
  misc_feature: MA Experiment 20000180 PARAMETER Experiment Name: At_Germinating_Seeds_P Parameter: Age (hr) Value: 24 vs. 0
  misc_feature: MA Experiment 20000180 PARAMETER Experiment Name: At_Germinating_Seeds_P Parameter: Tissue Value: Germinating Seeds
  misc_feature: MA Experiment ID: 20000184 Result: Up-regulated in Transcription
  misc_feature: MA Experiment 20000184 PARAMETER Experiment Name: At_Shoots__P Parameter: Age (day) Value: 7
  misc_feature: MA Experiment 20000184 PARAMETER Experiment Name: At_Shoots__P Parameter: Tissue Value: Shoots vs. Whole Plant
  misc_feature: MA Experiment ID: 20000185 Result: Up-regulated in Transcription
  misc_feature: MA Experiment 20000185 PARAMETER Experiment Name: At_Roots__P Parameter: Age (day) Value: 7 vs. 21
  misc_feature: MA Experiment 20000185 PARAMETER Experiment Name: At_Roots__P Parameter: Organism Value: A. thaliana
  misc_feature: MA Experiment 20000185 PARAMETER Experiment Name: At_Roots__P Parameter: Tissue Value: Roots vs. Whole Plant
actctctctcttttcctctttgcaaatccttgaagaaatccaaaatccatagcaatggcgacttcgatagctcgattgtctcggagaggagtcacttctaacctgatccgtcgttgcttcgctgcggaagcggcgttggcgaggaagacagagttacctaaaccgcaattcacggtgtcgccgtcgacggatcgtgtgaaatgggactacagaggccaacgacagatcattcctttgggacagtggcttccgaaggtagccgttgatgcttacgtggcacccaacgttgtgctggctggtcaggtcacagtctgggacggctcgtctgtttggaacggtgccgttttgcgcggcgatctcaacaaaatcactgttggattctgctcgaatgtacagggacggtgtgttgttcatgccgcctggtcttccccaacaggattaccagcagcgacaataatcgacaggtatgtgacagtaggtgcctacagtcttctgagatcatgtaccatcgaaccagagtgcatcatcggtcaacactcaatactaatggaaggctcactggttgagacccggtcaatcttggaagcgggttcagttgtgccgccaggaagaaggatcccatcaggtgaactatggggaggcaatccagcaagattcattagaaccctaaccaacgaagaaaccctagagatcccaaaactcgctgtagccatcaaccacttaagcggagattacttctctgagttcctaccttactcaactgtctacttagaggtagagaagttcaagaagtcccttgggatcgccgtttagaagcttcatctttttcgtgattcactttcatgtgtttatctatcatatgaggtctttctctctgcatattgcaataagtagctgatgaacatcaaaacaagtccggctctcttttttggttctaaaacgtttgtcatttcgttttttgggttctttgtaaaattccatttaaaactgattttggctgaatattgtctgaatgataatggcgacgacttctggtttt

SEQ ID NO: 21869 - protein, 252 aa, Arabidopsis thaliana
  peptide (1)..(252): Ceres Seq. ID no. 13496998
  misc_feature (66)..(243): Homolog of NCBI NO: 15220153 NR Description: transferase hexapeptide repeat family
  misc_feature (66)..(248): Homolog of NCBI NO: 18425082 NR Description: transferase hexapeptide repeat family
  misc_feature (66)..(248): Homolog of NCBI NO: 10177532 NR Description: ferripyochelin-binding protein-like [Arabidopsis
  misc_feature (66)..(252): Homolog of NCBI NO: 18394761 NR Description: transferase hexapeptide repeat family
  misc_feature (66)..(252): Homolog of NCBI NO: 8778427 NR Description: F18O14.34 [Arabidopsis thaliana]
  misc_feature (66)..(252): Homolog of NCBI NO: 21537242 NR Description: unknown [Arabidopsis thaliana]
  misc_feature (1)..(252): Homolog of NCBI NO: 15228424 NR Description: transferase hexapeptide repeat family
  misc_feature (1)..(252): Homolog of NCBI NO: 21592733 NR Description: unknown [Arabidopsis thaliana]
  misc_feature (1)..(252): Homolog of NCBI NO: 15242792 NR Description: transferase hexapeptide repeat family
  misc_feature (1)..(252): Homolog of NCBI NO: 15451014 NR Description: Unknown protein [Arabidopsis thaliana]
MATSIARLSRRGVTSNLIRRCFAAEAALARKTELPKPQFTVSPSTDRVKWDYRGQRQIIPLGQWLPKVAVDAYVAPNVVLAGQVTVWDGSSVWNGAVLRGDLNKITVGFCSNVQGRCVVHAAWSSPTGLPAATIIDRYVTVGAYSLLRSCTIEPECIIGQHSILMEGSLVETRSILEAGSVVPPGRRIPSGELWGGNPARFIRTLTNEETLEIPKLAVAINHLSGDYFSEFLPYSTVYLEVEKFKKSLGIAV

SEQ ID NO: 21870 - DNA, 570 bp, Arabidopsis thaliana
  misc_feature (1)..(570): Ceres Seq. ID no. 12393486
  misc_feature: MA Experiment ID: 108434 Result: Up-regulated in Transcription
  misc_feature: MA Experiment 108434 PARAMETER Experiment Name: At_Root_Tips_cDNA_P Parameter: Tissue Value: Root Tips
  misc_feature: MA Experiment ID: 108488 Result: Down-regulated in Transcription
  misc_feature: MA Experiment ID: 20000093 Result: Down-regulated in Transcription
  misc_feature: MA Experiment 20000093 PARAMETER Experiment Name: At_42deg_Heat_cDNA_P Parameter: Temperature (deg C) Value: 42 vs. 22
  misc_feature: MA Experiment 20000093 PARAMETER Experiment Name: At_42deg_Heat_cDNA_P Parameter: Timepoint (hr) Value: 0.5
  misc_feature: MA Experiment 20000093 PARAMETER Experiment Name: At_42deg_Heat_cDNA_P Parameter: Tissue Value: Aerial
  misc_feature: MA Experiment ID: 20000224 Result: Down-regulated in Transcription
  misc_feature: MA Experiment ID: 20000227 Result: Up-regulated in Transcription
  misc_feature: MA Experiment 20000227 PARAMETER Experiment Name: At_Root-Tips-vs-Tops_P Parameter: Tissue Value: Root Tips vs. Root Tops
  misc_feature: MA Experiment ID: 20000445 Result: Down-regulated in Transcription
  misc_feature: MA Experiment 20000445 PARAMETER Experiment Name: At_100uM_NAA__P Parameter: Age (day) Value: 14
  misc_feature: MA Experiment 20000445 PARAMETER Experiment Name: At_100uM_NAA__P Parameter: Organism Value: A. thaliana
  misc_feature: MA Experiment 20000445 PARAMETER Experiment Name: At_100uM_NAA__P Parameter: Plant Line Value: WS
  misc_feature: MA Experiment 20000445 PARAMETER Experiment Name: At_100uM_NAA__P Parameter: Timepoint (hr) Value: 6
  misc_feature: MA Experiment 20000445 PARAMETER Experiment Name: At_100uM_NAA__P Parameter: Tissue Value: Aerial
  misc_feature: MA Experiment 20000445 PARAMETER Experiment Name: At_100uM_NAA__P Parameter: Treatment Value: 100uM NAA vs. No Treatment
acgcgtctctcaattctcacattctcaaaatcactaaaatcaaactcaattttcatcaaatatctctaatggcgccgaaagcagcggagaagaaaccggcagagaagaaaccagccggtaaagctccggcggagaaactcccaaaggcggagaagaaaatcagcaaagacgccggaggaagcgagaagaagaagaagaaatcgaagaagagcgtcgagacttacaagatctacatcttcaaggttctgaaacaagttcatccagatgttggaatctctgggaaagctatggggattatgaacagtttcatcaatgacatcttcgagaaacttgctcaggaatcgtcaaagctcgctaggtacaataagaagccgacgattacatcgagggagattcaaaccgctgtgagacttgtgttgcctggagaactcgctaaacatgcggtttctgaaggcacgaaggcggttaccaaattcaccagttagggttttcctgtaaatttccggttaagtgtttggtttagactcggtttgtttagatgttttgagtttcgtgaattgtttgatgatc

SEQ ID NO: 21871 - protein, 160 aa, Arabidopsis thaliana
  peptide (1)..(160): Ceres Seq. ID no. 12393487
  misc_feature (33)..(160): Pfam Name: Core histone H2A/H2B/H3/H4 Pfam Description: Core histone H2A/H2B/H3/H4
  misc_feature (23)..(160): Homolog of NCBI NO: 15231854 NR Description: histone H2B - like protein; protein id:
  misc_feature (23)..(160): Homolog of NCBI NO: 30024116 NR Description: putative histone H4 [Pinus pinaster]
  misc_feature (23)..(160): Homolog of NCBI NO: 7439756 NR Description: histone H2B - tomato
  misc_feature (23)..(160): Homolog of NCBI NO: 15238563 NR Description: histone H2B - like protein
  misc_feature (26)..(160): Homolog of NCBI NO: 7439754 NR Description: histone H2B-3 - tomato (fragment)
  misc_feature (23)..(160): Homolog of NCBI NO: 15231313 NR Description: histone H2B -like protein
  misc_feature (23)..(160): Homolog of NCBI NO: 7387727 NR Description: Histone H2B (CaH2B)
  misc_feature (24)..(160): Homolog of NCBI NO: 7439753 NR Description: histone H2B-2 - tomato (fragment)
  misc_feature (23)..(160): Homolog of NCBI NO: 7635498 NR Description: histone H2B [Cicer arietinum]
  misc_feature (23)..(160): Homolog of NCBI NO: 15224292 NR Description: putative histone H2B
ASLNSHILKITKIKLNFHQISLMAPKAAEKKPAEKKPAGKAPAEKLPKAEKKISKDAGGSEKKKKKSKKSVETYKIYIFKVLKQVHPDVGISGKAMGIMNSFINDIFEKLAQESSKLARYNKKPTITSREIQTAVRLVLPGELAKHAVSEGTKAVTKFTS

SEQ ID NO: 21872 - protein, 138 aa, Arabidopsis thaliana
  peptide (1)..(138): Ceres Seq. ID no. 12393488
  misc_feature (11)..(138): Pfam Name: Core histone H2A/H2B/H3/H4 Pfam Description: Core histone H2A/H2B/H3/H4
  misc_feature (1)..(138): Homolog of NCBI NO: 7439756 NR Description: histone H2B - tomato
  misc_feature (2)..(138): Homolog of NCBI NO: 7439753 NR Description: histone H2B-2 - tomato (fragment)
  misc_feature (1)..(138): Homolog of NCBI NO: 15238563 NR Description: histone H2B - like protein
  misc_feature (1)..(138): Homolog of NCBI NO: 7387727 NR Description: Histone H2B (CaH2B)
  misc_feature (4)..(138): Homolog of NCBI NO: 7439754 NR Description: histone H2B-3 - tomato (fragment)
  misc_feature (1)..(138): Homolog of NCBI NO: 15231313 NR Description: histone H2B -like protein
  misc_feature (1)..(138): Homolog of NCBI NO: 30024116 NR Description: putative histone H4 [Pinus pinaster]
  misc_feature (1)..(138): Homolog of NCBI NO: 7635498 NR Description: histone H2B [Cicer arietinum]
  misc_feature (1)..(138): Homolog of NCBI NO: 15231854 NR Description: histone H2B - like protein; protein id:
  misc_feature (1)..(138): Homolog of NCBI NO: 15224292 NR Description: putative histone H2B
MAPKAAEKKPAEKKPAGKAPAEKLPKAEKKISKDAGGSEKKKKKSKKSVETYKIYIFKVLKQVHPDVGISGKAMGIMNSFINDIFEKLAQESSKLARYNKKPTITSREIQTAVRLVLPGELAKHAVSEGTKAVTKFTS

SEQ ID NO: 21873 - DNA, 2021 bp, Arabidopsis thaliana
  misc_feature (1)..(2021): Ceres Seq. ID no. 13491821
  misc_feature: MA Experiment ID: 108434 Result: Up-regulated in Transcription
  misc_feature: MA Experiment 108434 PARAMETER Experiment Name: At_Root_Tips_cDNA_P Parameter: Tissue Value: Root Tips
  misc_feature: MA Experiment ID: 108573 Result: Down-regulated in Transcription
  misc_feature: MA Experiment 108573 PARAMETER Experiment Name: At_Drought_cDNA_P Parameter: Timepoint (hr) Value: 6
  misc_feature: MA Experiment 108573 PARAMETER Experiment Name: At_Drought_cDNA_P Parameter: Tissue Value: Aerial
  misc_feature: MA Experiment 108573 PARAMETER Experiment Name: At_Drought_cDNA_P Parameter: Treatment Value: Drought vs. No Drought
  misc_feature: MA Experiment ID: 108585 Result: Down-regulated in Transcription
  misc_feature: MA Experiment 108585 PARAMETER Experiment Name: At_5mM_NaNP_cDNA_P Parameter: Timepoint (hr) Value: 6
  misc_feature: MA Experiment 108585 PARAMETER Experiment Name: At_5mM_NaNP_cDNA_P Parameter: Tissue Value: Aerial
  misc_feature: MA Experiment 108585 PARAMETER Experiment Name: At_5mM_NaNP_cDNA_P Parameter: Treatment Value: null
  misc_feature: MA Experiment ID: 20000224 Result: Down-regulated in Transcription
  misc_feature: MA Experiment ID: 20000227 Result: Up-regulated in Transcription
  misc_feature: MA Experiment 20000227 PARAMETER Experiment Name: At_Root-Tips-vs-Tops_P Parameter: Tissue Value: Root Tips vs. Root Tops
  misc_feature: MA Experiment ID: 20000437 Result: Down-regulated in Transcription
  misc_feature: MA Experiment 20000437 PARAMETER Experiment Name: At_Drought_P Parameter: Age (day) Value: 8
  misc_feature: MA Experiment 20000437 PARAMETER Experiment Name: At_Drought_P Parameter: Organism Value: A. thaliana
  misc_feature: MA Experiment 20000437 PARAMETER Experiment Name: At_Drought_P Parameter: Plant Line Value: WS
  misc_feature: MA Experiment 20000437 PARAMETER Experiment Name: At_Drought_P Parameter: Timepoint (hr) Value: 24
  misc_feature: MA Experiment 20000437 PARAMETER Experiment Name: At_Drought_P Parameter: Tissue Value: Whole Plant
  misc_feature: MA Experiment 20000437 PARAMETER Experiment Name: At_Drought_P Parameter: Treatment Value: Drought vs. No Drought
  misc_feature: MA Experiment ID: 20000794 Result: Down-regulated in Transcription
  misc_feature: MA Experiment 20000794 PARAMETER Experiment Name: At_Petals_P Parameter: Age (day) Value: 23-25 days
  misc_feature: MA Experiment 20000794 PARAMETER Experiment Name: At_Petals_P Parameter: Plant Line Value: WS
  misc_feature: MA Experiment 20000794 PARAMETER Experiment Name: At_Petals_P Parameter: Tissue Value: Petals vs. Whole plant
  misc_feature: MA Experiment ID: 20001911 Result: Down-regulated in Transcription
  misc_feature: MA Experiment 20001911 PARAMETER Experiment Name: At_Drought_Reproduction_P Parameter: Age (day) Value: 40
  misc_feature: MA Experiment 20001911 PARAMETER Experiment Name: At_Drought_Reproduction_P Parameter: Organism Value: A. thaliana
  misc_feature: MA Experiment 20001911 PARAMETER Experiment Name: At_Drought_Reproduction_P Parameter: Plant Line Value: WS
  misc_feature: MA Experiment 20001911 PARAMETER Experiment Name: At_Drought_Reproduction_P Parameter: Timepoint (day) Value: 10
  misc_feature: MA Experiment 20001911 PARAMETER Experiment Name: At_Drought_Reproduction_P Parameter: Tissue Value: Flowers
  misc_feature: MA Experiment 20001911 PARAMETER Experiment Name: At_Drought_Reproduction_P Parameter: Treatment Value: Drought vs. No Drought
aagcaaattcactgatggatacacaaatcctccagggtaactagaggtgggtcatcagatctctagggtcttctcattcttcattcccagatccgtagaatagaaaatgtttggccgatctgcgattcgtggaggaggattccgtgcagagaatctaggtcaaaacgcacttaccttaatcggtaacataggcttctcactcttcgtcttcggagtactaatcttcaccataatcgccgcaacttacgaaccagaagatcctctcttccacccatctgacaaaatcacaactttcctcacttccacatcaaacgctacacttagatccgatgactccgttgttaaaaccggtgaagatttcatgctcgctaaccaaaccgcatttgcagagtttatcaacataaacgatgttgaagccagcaccaatgagactactacagaggaagagggtaacaagttggaatgtgatgtgaatactccaattgattgcaaagatcagcaagtgtttcatcttatgatgagagctactattgacaagtttaaagatattcacttttataagtttggtaagcctgttactggcgaagaaggtgtgaattcttgtgatatggcgtggcgttataggcctagagatgggaagagtgctgctttttataaggattataggaggtttgttgttgctaagtctgagaattgtagtgtgagtgttgttgggattggtgagtatcattcgggtttgaatgcgaggaagaggaagaagaatcagaaagctgggtttgagaaaactggtgggaagaaagatgatttctctttgcctgttgttggtgaacttgtgaatgattctcttcctatggttgagtctgatagtgtgtttaagactggcaagtatttggtttatgttggtggtggagataggtgtaagagtatgaatcattttctgtggagtttcttgtgtgctcttggggaagctcagtatttgaataggactctagtgatggatttgaccttgtgtttgtcttctatctatacttcgtctggtcagaatgaggaaggcaaggatttcaggttttactttgatttcgagcatttgaaagaagctgcttctgtgttggatgaagctcagttttgggctcagtgggggaaattgcgtaagaagagaagaaatagattgaaccttcatctcgtggaggattttagggtcactcccatgaagctcgcggctgtcaaagatacgttgataatgaggaagtttggatctgtagaaccagacaattattggtacagggtttgtgaaggagatgcagaatctgttgttaaacgaccgtggcatctgttatggaaatcaagaaggttgatggaaatcgtctctgctattgcatcaaggttaaactgggactacgatgctgtacacattgagagaggagagaaagcaagaaacaaggaggtttggcctaatcttgaagcggatacttccccgagcgctctcttgtcgaccttgcaggacaaagttgaagaaggaaggcatctctacatcgcaacaaatgaaggagaattatccttcttcaaccctttgaaagataagtacgccactcatttcctttacgactacaaagatctttgggatgagagcagtgagtggtattcagagactactaagcttaatggaggcaacccggtcgaatttgatggttacatgagagcatctgttgacacagaagtattcttgagagggaagaagcagattgaaacattcaacgatcttacaaacgattgtaaagatggagttgggacctgcaatgctgcaacttcctgatctctgtcatattcctcatttatttgttgtttgaatcgtcttgtaccacttgtttccagttttgtattgtagaatagctttgtattttccattactgttgttttgtctcagtgacttttagactaatatatgtcctagtttggttctatttctttggaatgcaaaatcttgggaagaagatgatattgatacacaaaaattgattcgg

SEQ ID NO: 21874 - protein, 568 aa, Arabidopsis thaliana
  peptide (1)..(568): Ceres Seq. ID no. 13491822
  misc_feature (471)..(547): Homolog of NCBI NO: 34909040 NR Description: P0034E02.33 [Oryza sativa (japonica
  misc_feature (97)..(218): Homolog of NCBI NO: 34909040 NR Description: P0034E02.33 [Oryza sativa (japonica
  misc_feature (248)..(436): Homolog of NCBI NO: 34909040 NR Description: P0034E02.33 [Oryza sativa (japonica
  misc_feature (17)..(564): Homolog of NCBI NO: 34913308 NR Description: P0519E12.32 [Oryza sativa (japonica
  misc_feature (15)..(563): Homolog of NCBI NO: 15236611 NR Description: expressed protein [Arabidopsis thaliana]
  misc_feature (8)..(124): Homolog of NCBI NO: 37534994 NR Description: unknown protein [Oryza sativa (japonica
  misc_feature (45)..(234): Homolog of NCBI NO: 37534994 NR Description: unknown protein [Oryza sativa (japonica
  misc_feature (238)..(567): Homolog of NCBI NO: 37534994 NR Description: unknown protein [Oryza sativa (japonica
  misc_feature (1)..(568): Homolog of NCBI NO: 15235454 NR Description: expressed protein [Arabidopsis thaliana]
  misc_feature (1)..(568): Homolog of NCBI NO: 18395698 NR Description: expressed protein [Arabidopsis thaliana]
MFGRSAIRGGGFRAENLGQNALTLIGNIGFSLFVFGVLIFTIIAATYEPEDPLFHPSDKITTFLTSTSNATLRSDDSVVKTGEDFMLANQTAFAEFININDVEASTNETTTEEEGNKLECDVNTPIDCKDQQVFHLMMRATIDKFKDIHFYKFGKPVTGEEGVNSCDMAWRYRPRDGKSAAFYKDYRRFVVAKSENCSVSVVGIGEYHSGLNARKRKKNQKAGFEKTGGKKDDFSLPVVGELVNDSLPMVESDSVFKTGKYLVYVGGGDRCKSMNHFLWSFLCALGEAQYLNRTLVMDLTLCLSSIYTSSGQNEEGKDFRFYFDFEHLKEAASVLDEAQFWAQWGKLRKKRRNRLNLHLVEDFRVTPMKLAAVKDTLIMRKFGSVEPDNYWYRVCEGDAESVVKRPWHLLWKSRRLMEIVSAIASRLNWDYDAVHIERGEKARNKEVWPNLEADTSPSALLSTLQDKVEEGRHLYIATNEGELSFFNPLKDKYATHFLYDYKDLWDESSEWYSETTKLNGGNPVEFDGYMRASVDTEVFLRGKKQIETFNDLTNDCKDGVGTCNAATS

SEQ ID NO: 21875 - protein, 483 aa, Arabidopsis thaliana
  peptide (1)..(483): Ceres Seq. ID no. 13491823
  misc_feature (386)..(462): Homolog of NCBI NO: 34909040 NR Description: P0034E02.33 [Oryza sativa (japonica
  misc_feature (12)..(133): Homolog of NCBI NO: 34909040 NR Description: P0034E02.33 [Oryza sativa (japonica
  misc_feature (163)..(351): Homolog of NCBI NO: 34909040 NR Description: P0034E02.33 [Oryza sativa (japonica
  misc_feature (1)..(479): Homolog of NCBI NO: 34913308 NR Description: P0519E12.32 [Oryza sativa (japonica
  misc_feature (1)..(478): Homolog of NCBI NO: 15236611 NR Description: expressed protein [Arabidopsis thaliana]
  misc_feature (1)..(39): Homolog of NCBI NO: 37534994 NR Description: unknown protein [Oryza sativa (japonica
  misc_feature (1)..(149): Homolog of NCBI NO: 37534994 NR Description: unknown protein [Oryza sativa (japonica
  misc_feature (153)..(482): Homolog of NCBI NO: 37534994 NR Description: unknown protein [Oryza sativa (japonica
  misc_feature (1)..(483): Homolog of NCBI NO: 15235454 NR Description: expressed protein [Arabidopsis thaliana]
  misc_feature (1)..(483): Homolog of NCBI NO: 18395698 NR Description: expressed protein [Arabidopsis thaliana]
MLANQTAFAEFININDVEASTNETTTEEEGNKLECDVNTPIDCKDQQVFHLMMRATIDKFKDIHFYKFGKPVTGEEGVNSCDMAWRYRPRDGKSAAFYKDYRRFVVAKSENCSVSVVGIGEYHSGLNARKRKKNQKAGFEKTGGKKDDFSLPVVGELVNDSLPMVESDSVFKTGKYLVYVGGGDRCKSMNHFLWSFLCALGEAQYLNRTLVMDLTLCLSSIYTSSGQNEEGKDFRFYFDFEHLKEAASVLDEAQFWAQWGKLRKKRRNRLNLHLVEDFRVTPMKLAAVKDTLIMRKFGSVEPDNYWYRVCEGDAESVVKRPWHLLWKSRRLMEIVSAIASRLNWDYDAVHIERGEKARNKEVWPNLEADTSPSALLSTLQDKVEEGRHLYIATNEGELSFFNPLKDKYATHFLYDYKDLWDESSEWYSETTKLNGGNPVEFDGYMRASVDTEVFLRGKKQIETFNDLTNDCKDGVGTCNAATS

SEQ ID NO: 21876 - protein, 432 aa, Arabidopsis thaliana
  peptide (1)..(432): Ceres Seq. ID no. 13491824
  misc_feature (187)..(370): Homolog of NCBI NO: 15226842 NR Description: expressed protein [Arabidopsis thaliana]
  misc_feature (335)..(411): Homolog of NCBI NO: 34909040 NR Description: P0034E02.33 [Oryza sativa (japonica
  misc_feature (1)..(82): Homolog of NCBI NO: 34909040 NR Description: P0034E02.33 [Oryza sativa (japonica
  misc_feature (112)..(300): Homolog of NCBI NO: 34909040 NR Description: P0034E02.33 [Oryza sativa (japonica
  misc_feature (1)..(428): Homolog of NCBI NO: 34913308 NR Description: P0519E12.32 [Oryza sativa (japonica
  misc_feature (1)..(427): Homolog of NCBI NO: 15236611 NR Description: expressed protein [Arabidopsis thaliana]
  misc_feature (1)..(98): Homolog of NCBI NO: 37534994 NR Description: unknown protein [Oryza sativa (japonica
  misc_feature (102)..(431): Homolog of NCBI NO: 37534994 NR Description: unknown protein [Oryza sativa (japonica
  misc_feature (1)..(432): Homolog of NCBI NO: 15235454 NR Description: expressed protein [Arabidopsis thaliana]
  misc_feature (1)..(432): Homolog of NCBI NO: 18395698 NR Description: expressed protein [Arabidopsis thaliana]
MMRATIDKFKDIHFYKFGKPVTGEEGVNSCDMAWRYRPRDGKSAAFYKDYRRFVVAKSENCSVSVVGIGEYHSGLNARKRKKNQKAGFEKTGGKKDDFSLPVVGELVNDSLPMVESDSVFKTGKYLVYVGGGDRCKSMNHFLWSFLCALGEAQYLNRTLVMDLTLCLSSIYTSSGQNEEGKDFRFYFDFEHLKEAASVLDEAQFWAQWGKLRKKRRNRLNLHLVEDFRVTPMKLAAVKDTLIMRKFGSVEPDNYWYRVCEGDAESVVKRPWHLLWKSRRLMEIVSAIASRLNWDYDAVHIERGEKARNKEVWPNLEADTSPSALLSTLQDKVEEGRHLYIATNEGELSFFNPLKDKYATHFLYDYKDLWDESSEWYSETTKLNGGNPVEFDGYMRASVDTEVFLRGKKQIETFNDLTNDCKDGVGTCNAATS

SEQ ID NO: 21877 - DNA, 883 bp, Arabidopsis thaliana
  misc_feature (1)..(883): Ceres Seq. ID no. 12393911
  misc_feature: MA Experiment ID: 108462 Result: Down-regulated in Transcription
  misc_feature: MA Experiment 108462 PARAMETER Experiment Name: At_Germinating_Seeds_cDNA_P Parameter: Age (day) Value: 2 vs. 0
  misc_feature: MA Experiment 108462 PARAMETER Experiment Name: At_Germinating_Seeds_cDNA_P Parameter: Tissue Value: Germinating Seeds
  misc_feature: MA Experiment ID: 108463 Result: Down-regulated in Transcription
  misc_feature: MA Experiment 108463 PARAMETER Experiment Name: At_Germinating_Seeds_cDNA_P Parameter: Age (day) Value: 3 vs. 0
  misc_feature: MA Experiment 108463 PARAMETER Experiment Name: At_Germinating_Seeds_cDNA_P Parameter: Tissue Value: Germinating Seeds
  misc_feature: MA Experiment ID: 108668 Result: Up-regulated in Transcription
  misc_feature: MA Experiment 108668 PARAMETER Experiment Name: At_2mM_SA_cDNA_P Parameter: Plant Line Value: WS
  misc_feature: MA Experiment 108668 PARAMETER Experiment Name: At_2mM_SA_cDNA_P Parameter: Timepoint (hr) Value: 6
  misc_feature: MA Experiment 108668 PARAMETER Experiment Name: At_2mM_SA_cDNA_P Parameter: Treatment Value: 2mM SA vs. No Treatment
ataaatctagggctttcttctagagatcgaagaagaagagttcacatagagagattttgttcgtttcgagattttcttcagtcccaatggcgtcaaacaccagcaacgacaatttccagcatagaccacggcaaagaaacggaccacctcctccgcggcgacagggaagaaatccgccgcctccgtcttcgtcaacgcgaacttctcagaatcagccaccacagcatacgccgcaggagaagaagaaaccggtgtttgtcaaagtggatcagcttaaacctggaacgagcggccacactttgactgttaaagtcgtcgatcagaattccgtacctcagaaaccgggagctgcttcttcttctcatctccgacctgctaggatctctgagtgtcttgttggagatgagactgcttgcatcctcttcactgctcgcaacgatcaagtggaattgatgaaaccaggagctactgtgaatcttcggaatgcaaagatagatatgttcaagggatcaatgaggcttgctgttgataaatggggtcgcatcgaggccactgaaccagctgacattactgttaaagaagacaacaatctgtcccttgtggagtacgagctcgtcaatgtcgttgaggaatgatgtctgacaccccatgtctctaataggtgatatatcaagtgccacaatgaattttgttttgcggtgaacaccgttgcgggtaaaatatatttatcttatgatgttgcaagtttgctatatttatctaccagttgatttgtgttgatctcgggtttggtattcggtatgtactctttcagctgtggatgcttctgtaacctctctacttttgtatggtctttaaagagaaggttaatgaaaaaattggt

SEQ ID NO: 21878 - protein, 182 aa, Arabidopsis thaliana
  peptide (1)..(182): Ceres Seq. ID no. 12393912
  misc_feature (48)..(177): Homolog of NCBI NO: 15219562 NR Description: hypothetical protein; protein id: At1g03810.1
  misc_feature (19)..(182): Homolog of NCBI NO: 24413970 NR Description: contains EST AU181579(C50456)~similar to Oryza
  misc_feature (53)..(179): Homolog of NCBI NO: 30681801 NR Description: expressed protein [Arabidopsis thaliana]
  misc_feature (53)..(179): Homolog of NCBI NO: 18391179 NR Description: expressed protein
  misc_feature (53)..(181): Homolog of NCBI NO: 18395285 NR Description: expressed protein
  misc_feature (52)..(179): Homolog of NCBI NO: 34909622 NR Description: P0435B05.31 [Oryza sativa (japonica
  misc_feature (48)..(179): Homolog of NCBI NO: 15235304 NR Description: putative protein
  misc_feature (53)..(181): Homolog of NCBI NO: 34904470 NR Description: OSJNBa0086P08.14 [Oryza sativa (japonica
  misc_feature (1)..(124): Homolog of NCBI NO: 25329540 NR Description: probable tyrosyl-tRNA synthetase [imported] -
  misc_feature (1)..(182): Homolog of NCBI NO: 18403397 NR Description: Expressed protein
MASNTSNDNFQHRPRQRNGPPPPRRQGRNPPPPSSSTRTSQNQPPQHTPQEKKKPVFVKVDQLKPGTSGHTLTVKVVDQNSVPQKPGAASSSHLRPARISECLVGDETACILFTARNDQVELMKPGATVNLRNAKIDMFKGSMRLAVDKWGRIEATEPADITVKEDNNLSLVEYELVNVVEE

SEQ ID NO: 21879 - protein, 100 aa, Arabidopsis thaliana
  peptide (1)..(100): Ceres Seq. ID no. 12393913
INLGLSSRDRRRRVHIERFCSFRDFLQSQWRQTPATTISSIDHGKETDHLLRGDREEIRRLRLRQRELLRISHHSIRRRRRRNRCLSKWISLNLERAATL

SEQ ID NO: 21880 - DNA, 923 bp, Arabidopsis thaliana
  misc_feature (1)..(923): Ceres Seq. ID no. 12332684
  misc_feature: MA Experiment ID: 108435 Result: Down-regulated in Transcription
  misc_feature: MA Experiment 108435 PARAMETER Experiment Name: At_stm_Mutants_cDNA_P Parameter: Plant Line Value: wt Landsburg vs stm
  misc_feature: MA Experiment 108435 PARAMETER Experiment Name: At_stm_Mutants_cDNA_P Parameter: Tissue Value: Shoot Apical Meristem Region
  misc_feature: MA Experiment ID: 108488 Result: Up-regulated in Transcription
  misc_feature: MA Experiment ID: 108573 Result: Down-regulated in Transcription
  misc_feature: MA Experiment 108573 PARAMETER Experiment Name: At_Drought_cDNA_P Parameter: Timepoint (hr) Value: 6
  misc_feature: MA Experiment 108573 PARAMETER Experiment Name: At_Drought_cDNA_P Parameter: Tissue Value: Aerial
  misc_feature: MA Experiment 108573 PARAMETER Experiment Name: At_Drought_cDNA_P Parameter: Treatment Value: Drought vs. No Drought
  misc_feature: MA Experiment ID: 108585 Result: Down-regulated in Transcription
  misc_feature: MA Experiment 108585 PARAMETER Experiment Name: At_5mM_NaNP_cDNA_P Parameter: Timepoint (hr) Value: 6
  misc_feature: MA Experiment 108585 PARAMETER Experiment Name: At_5mM_NaNP_cDNA_P Parameter: Tissue Value: Aerial
  misc_feature: MA Experiment 108585 PARAMETER Experiment Name: At_5mM_NaNP_cDNA_P Parameter: Treatment Value: null
  misc_feature: MA Experiment ID: 108595 Result: Down-regulated in Transcription
  misc_feature: MA Experiment 108595 PARAMETER Experiment Name: At_Ler-pi_Ovule_cDNA_P Parameter: Plant Line Value: null
  misc_feature: MA Experiment ID: 108607 Result: Down-regulated in Transcription
  misc_feature: MA Experiment 108607 PARAMETER Experiment Name: At_100uM_ABA_cDNA_P Parameter: Timepoint (hr) Value: 4
  misc_feature: MA Experiment 108607 PARAMETER Experiment Name: At_100uM_ABA_cDNA_P Parameter: Tissue Value: Aerial
  misc_feature: MA Experiment 108607 PARAMETER Experiment Name: At_100uM_ABA_cDNA_P Parameter: Treatment Value: 100uM ABA vs. No Treatment
  misc_feature: MA Experiment ID: 20000069 Result: Down-regulated in Transcription
  misc_feature: MA Experiment 20000069 PARAMETER Experiment Name: At_100uM_ABA_Mutants_cDNA_P Parameter: Plant Line Value: CS23
  misc_feature: MA Experiment 20000069 PARAMETER Experiment Name: At_100uM_ABA_Mutants_cDNA_P Parameter: Timepoint (hr) Value: 6
  misc_feature: MA Experiment 20000069 PARAMETER Experiment Name: At_100uM_ABA_Mutants_cDNA_P Parameter: Tissue Value: Aerial
  misc_feature: MA Experiment 20000069 PARAMETER Experiment Name: At_100uM_ABA_Mutants_cDNA_P Parameter: Treatment Value: 100uM ABA vs. No Treatment
  misc_feature: MA Experiment ID: 20000070 Result: Down-regulated in Transcription
  misc_feature: MA Experiment 20000070 PARAMETER Experiment Name: At_100uM_ABA_Mutants_cDNA_P Parameter: Plant Line Value: CS24
  misc_feature: MA Experiment 20000070 PARAMETER Experiment Name: At_100uM_ABA_Mutants_cDNA_P Parameter: Timepoint (hr) Value: 6
  misc_feature: MA Experiment 20000070 PARAMETER Experiment Name: At_100uM_ABA_Mutants_cDNA_P Parameter: Tissue Value: Aerial
  misc_feature: MA Experiment 20000070 PARAMETER Experiment Name: At_100uM_ABA_Mutants_cDNA_P Parameter: Treatment Value: 100uM ABA vs. No Treatment
  misc_feature: MA Experiment ID: 20000071 Result: Down-regulated in Transcription
  misc_feature: MA Experiment 20000071 PARAMETER Experiment Name: At_100uM_ABA_Mutants_cDNA_P Parameter: Plant Line Value: CS8104
  misc_feature: MA Experiment 20000071 PARAMETER Experiment Name: At_100uM_ABA_Mutants_cDNA_P Parameter: Timepoint (hr) Value: 6
  misc_feature: MA Experiment 20000071 PARAMETER Experiment Name: At_100uM_ABA_Mutants_cDNA_P Parameter: Tissue Value: Aerial
  misc_feature: MA Experiment 20000071 PARAMETER Experiment Name: At_100uM_ABA_Mutants_cDNA_P Parameter: Treatment Value: 100uM ABA vs. No Treatment
  misc_feature: MA Experiment ID: 20000072 Result: Down-regulated in Transcription
  misc_feature: MA Experiment 20000072 PARAMETER Experiment Name: At_100uM_ABA_Mutants_cDNA_P Parameter: Plant Line Value: CS8105
  misc_feature: MA Experiment 20000072 PARAMETER Experiment Name: At_100uM_ABA_Mutants_cDNA_P Parameter: Timepoint (hr) Value: 6
  misc_feature: MA Experiment 20000072 PARAMETER Experiment Name: At_100uM_ABA_Mutants_cDNA_P Parameter: Tissue Value: Aerial
  misc_feature: MA Experiment 20000072 PARAMETER Experiment Name: At_100uM_ABA_Mutants_cDNA_P Parameter: Treatment Value: 100uM ABA vs. No Treatment
  misc_feature: MA Experiment ID: 20000087 Result: Down-regulated in Transcription
  misc_feature: MA Experiment 20000087 PARAMETER Experiment Name: At_100uM_ABA_Mutants_cDNA_P Parameter: Plant Line Value: WS
  misc_feature: MA Experiment 20000087 PARAMETER Experiment Name: At_100uM_ABA_Mutants_cDNA_P Parameter: Timepoint (hr) Value: 6
  misc_feature: MA Experiment 20000087 PARAMETER Experiment Name: At_100uM_ABA_Mutants_cDNA_P Parameter: Tissue Value: Aerial
  misc_feature: MA Experiment 20000087 PARAMETER Experiment Name: At_100uM_ABA_Mutants_cDNA_P Parameter: Treatment Value: 100uM ABA vs. No Treatment
  misc_feature: MA Experiment ID: 20000113 Result: Up-regulated in Transcription
  misc_feature: MA Experiment 20000113 PARAMETER Experiment Name: At_42deg_Heat_cDNA_P Parameter: Temperature (deg C) Value: 42 vs. 22
  misc_feature: MA Experiment 20000113 PARAMETER Experiment Name: At_42deg_Heat_cDNA_P Parameter: Timepoint (hr) Value: 8
  misc_feature: MA Experiment 20000113 PARAMETER Experiment Name: At_42deg_Heat_cDNA_P Parameter: Tissue Value: Aerial
  misc_feature: MA Experiment ID: 20000117 Result: Down-regulated in Transcription
  misc_feature: MA Experiment 20000117 PARAMETER Experiment Name: At_100uM_ABA_Mutants_cDNA_P Parameter: Plant Line Value: Columbia
  misc_feature: MA Experiment 20000117 PARAMETER Experiment Name: At_100uM_ABA_Mutants_cDNA_P Parameter: Timepoint (hr) Value: 6
  misc_feature: MA Experiment 20000117 PARAMETER Experiment Name: At_100uM_ABA_Mutants_cDNA_P Parameter: Tissue Value: Aerial
  misc_feature: MA Experiment 20000117 PARAMETER Experiment Name: At_100uM_ABA_Mutants_cDNA_P Parameter: Treatment Value: 100uM ABA vs. No Treatment
  misc_feature: MA Experiment ID: 20000185 Result: Down-regulated in Transcription
  misc_feature: MA Experiment 20000185 PARAMETER Experiment Name: At_Roots__P Parameter: Age (day) Value: 7 vs. 21
  misc_feature: MA Experiment 20000185 PARAMETER Experiment Name: At_Roots__P Parameter: Organism Value: A. thaliana
  misc_feature: MA Experiment 20000185 PARAMETER Experiment Name: At_Roots__P Parameter: Tissue Value: Roots vs. Whole Plant
  misc_feature: MA Experiment ID: 20000436 Result: Down-regulated in Transcription
  misc_feature: MA Experiment 20000436 PARAMETER Experiment Name: At_Drought_P Parameter: Age (day) Value: 7
  misc_feature: MA Experiment 20000436 PARAMETER Experiment Name: At_Drought_P Parameter: Organism Value: A. thaliana
  misc_feature: MA Experiment 20000436 PARAMETER Experiment Name: At_Drought_P Parameter: Plant Line Value: WS
  misc_feature: MA Experiment 20000436 PARAMETER Experiment Name: At_Drought_P Parameter: Timepoint (hr) Value: 12
  misc_feature: MA Experiment 20000436 PARAMETER Experiment Name: At_Drought_P Parameter: Tissue Value: Whole Plant
  misc_feature: MA Experiment 20000436 PARAMETER Experiment Name: At_Drought_P Parameter: Treatment Value: Drought vs. No Drought
  misc_feature: MA Experiment ID: 20000437 Result: Down-regulated in Transcription
  misc_feature: MA Experiment 20000437 PARAMETER Experiment Name: At_Drought_P Parameter: Age (day) Value: 8
  misc_feature: MA Experiment 20000437 PARAMETER Experiment Name: At_Drought_P Parameter: Organism Value: A. thaliana
  misc_feature: MA Experiment 20000437 PARAMETER Experiment Name: At_Drought_P Parameter: Plant Line Value: WS
  misc_feature: MA Experiment 20000437 PARAMETER Experiment Name: At_Drought_P Parameter: Timepoint (hr) Value: 24
  misc_feature: MA Experiment 20000437 PARAMETER Experiment Name: At_Drought_P Parameter: Tissue Value: Whole Plant
  misc_feature: MA Experiment 20000437 PARAMETER Experiment Name: At_Drought_P Parameter: Treatment Value: Drought vs. No Drought
  misc_feature: MA Experiment ID: 20000439 Result: Down-regulated in Transcription
  misc_feature: MA Experiment 20000439 PARAMETER Experiment Name: At_Roots__P Parameter: Age (day) Value: 14 vs. 21
  misc_feature: MA Experiment 20000439 PARAMETER Experiment Name: At_Roots__P Parameter: Organism Value: A. thaliana
  misc_feature: MA Experiment 20000439 PARAMETER Experiment Name: At_Roots__P Parameter: Tissue Value: Roots vs. Whole Plant
  misc_feature: MA Experiment ID: 20000527 Result: Up-regulated in Transcription
  misc_feature: MA Experiment 20000527 PARAMETER Experiment Name: At_10percent_PEG_P Parameter: Age (day) Value: 20
  misc_feature: MA Experiment 20000527 PARAMETER Experiment Name: At_10percent_PEG_P Parameter: Organism Value: A. thaliana
  misc_feature: MA Experiment 20000527 PARAMETER Experiment Name: At_10percent_PEG_P Parameter: Plant Line Value: WS
  misc_feature: MA Experiment 20000527 PARAMETER Experiment Name: At_10percent_PEG_P Parameter: Timepoint (day) Value: 20
  misc_feature: MA Experiment 20000527 PARAMETER Experiment Name: At_10percent_PEG_P Parameter: Tissue Value: Whole Plant
  misc_feature: MA Experiment 20000527 PARAMETER Experiment Name: At_10percent_PEG_P Parameter: Treatment Value: 10percent PEG vs. No Treatment
  misc_feature: MA Experiment ID: 20001248 Result: Down-regulated in Transcription
  misc_feature: MA Experiment 20001248 PARAMETER Experiment Name: At_Far-red-induction_P Parameter: Age (day) Value: 7
  misc_feature: MA Experiment 20001248 PARAMETER Experiment Name: At_Far-red-induction_P Parameter: Light Value: Far-red vs. White
  misc_feature: MA Experiment 20001248 PARAMETER Experiment Name: At_Far-red-induction_P Parameter: Organism Value: A. thaliana
  misc_feature: MA Experiment 20001248 PARAMETER Experiment Name: At_Far-red-induction_P Parameter: Plant Line Value: Columbia
  misc_feature: MA Experiment 20001248 PARAMETER Experiment Name: At_Far-red-induction_P Parameter: Timepoint (hr) Value: 4
  misc_feature: MA Experiment 20001248 PARAMETER Experiment Name: At_Far-red-induction_P Parameter: Tissue Value: Whole Plant
  misc_feature: MA Experiment ID: 20001450 Result: Down-regulated in Transcription
  misc_feature: MA Experiment 20001450 PARAMETER Experiment Name: At_Far-red-induction_P Parameter: Age (day) Value: 7
  misc_feature: MA Experiment 20001450 PARAMETER Experiment Name: At_Far-red-induction_P Parameter: Light Value: Far-red vs. White
  misc_feature: MA Experiment 20001450 PARAMETER Experiment Name: At_Far-red-induction_P Parameter: Organism Value: A. thaliana
  misc_feature: MA Experiment 20001450 PARAMETER Experiment Name: At_Far-red-induction_P Parameter: Plant Line Value: Columbia
  misc_feature: MA Experiment 20001450 PARAMETER Experiment Name: At_Far-red-induction_P Parameter: Timepoint (hr) Value: 8
  misc_feature: MA Experiment 20001450 PARAMETER Experiment Name: At_Far-red-induction_P Parameter: Tissue Value: Whole Plant
  misc_feature: MA Experiment ID: 20001560 Result: Up-regulated in Transcription
  misc_feature: MA Experiment 20001560 PARAMETER Experiment Name: At_Drought_Soil_Dry_P Parameter: Age (day) Value: 28
  misc_feature: MA Experiment 20001560 PARAMETER Experiment Name: At_Drought_Soil_Dry_P Parameter: Organism Value: A. thaliana
  misc_feature: MA Experiment 20001560 PARAMETER Experiment Name: At_Drought_Soil_Dry_P Parameter: Plant Line Value: WS
  misc_feature: MA Experiment 20001560 PARAMETER Experiment Name: At_Drought_Soil_Dry_P Parameter: Post Timepoint (hr) Value: None
  misc_feature: MA Experiment 20001560 PARAMETER Experiment Name: At_Drought_Soil_Dry_P Parameter: Post-Treatment Value: None
  misc_feature: MA Experiment 20001560 PARAMETER Experiment Name: At_Drought_Soil_Dry_P Parameter: Timepoint (day) Value: 14
  misc_feature: MA Experiment 20001560 PARAMETER Experiment Name: At_Drought_Soil_Dry_P Parameter: Treatment Value: Drought vs. No Drought
  misc_feature: MA Experiment ID: 20001757 Result: Up-regulated in Transcription
  misc_feature: MA Experiment 20001757 PARAMETER Experiment Name: At_50mM_NH4NO3_L-to-H_P Parameter: Timepoint (hr) Value: 6
  misc_feature: MA Experiment 20001757 PARAMETER Experiment Name: At_50mM_NH4NO3_L-to-H_P Parameter: Tissue Value: Leaf
  misc_feature: MA Experiment 20001757 PARAMETER Experiment Name: At_50mM_NH4NO3_L-to-H_P Parameter: Treatment Value: 50mM NH4NO3 vs 100mM Mannitol
aaagcctttttagttctattgacaatggcgacgaagctgatttctccgccgttgtcttgtccgtgggttacttcaagagaggtgataatcaaagggcttccacggcggagaagagaatggatggtcacgaagagaaacagagtctctgctgtcacggccatgattgtggagccactttctgttgtttcttcttcagcaattcagattcatcaatggtgggaacaaaaccctaattcgttactgttaatgacggaggctactggtggttattcgttggctagctattatacgtctttgggtttgtttgttatctctgttcctggtctttggtctctaatcaaacgctctgttaaatcaaagatagtgagaaagacgtttgttgttaatgacgtcaagaaggagccaaagcaagtagctggagagattctatctttcttcacaaggaagaatttcaatatcactgatcgtggagaaacaatcacatttgaaggaaagatggttccaagtagaggacaagctgctctgcttacgttttgtacatgtataagcttagcaagtgttggtcttgtcttaaccattacagttcctgattttggaaacaattggttcttcatcattctccttagtccactcgcaggagtgtattactggaaaaaggcgtcgaggaaagaggagataaaagtgaagatgatggtgggatcaaaagggagattggatgagattgtggttcaaggagatgatgttcaggtcgaagaaatgaggaaagagcttcagcttaatgagaaaggcatggtttatgtcaaaggtctctttgagagatcatcataatgataacattttagcctcccatttttgccttttggggaatgtgtctatacttgttttattaaggttgagattaatgactttttaactcatttccc

SEQ ID NO: 21881 - protein, 275 aa, Arabidopsis thaliana
  peptide (1)..(275): Ceres Seq. ID no. 12332685
  misc_feature (95)..(248): Homolog of NCBI NO: 22298167 NR Description: ORF_ID:tll0625~hypothetical protein
  misc_feature (102)..(230): Homolog of NCBI NO: 23039442 NR Description: hypothetical protein [Trichodesmium erythraeum
  misc_feature (97)..(230): Homolog of NCBI NO: 16332307 NR Description: unknown protein [Synechocystis sp. PCC 6803]
  misc_feature (97)..(259): Homolog of NCBI NO: 23123893 NR Description: hypothetical protein [Nostoc punctiforme]
  misc_feature (101)..(259): Homolog of NCBI NO: 17231472 NR Description: hypothetical protein [Nostoc sp. PCC 7120]
  misc_feature (97)..(250): Homolog of NCBI NO: 37523332 NR Description: hypothetical protein glr3763 [Gloeobacter
  misc_feature (211)..(275): Homolog of NCBI NO: 1402889 NR Description: unknown [Arabidopsis thaliana]
  misc_feature (9)..(161): Homolog of NCBI NO: 1402889 NR Description: unknown [Arabidopsis thaliana]
  misc_feature (9)..(275): Homolog of NCBI NO: 18405058 NR Description: expressed protein
KAFLVLLTMATKLISPPLSCPWVTSREVIIKGLPRRRREWMVTKRNRVSAVTAMIVEPLSVVSSSAIQIHQWWEQNPNSLLLMTEATGGYSLASYYTSLGLFVISVPGLWSLIKRSVKSKIVRKTFVVNDVKKEPKQVAGEILSFFTRKNFNITDRGETITFEGKMVPSRGQAALLTFCTCISLASVGLVLTITVPDFGNNWFFIILLSPLAGVYYWKKASRKEEIKVKMMVGSKGRLDEIVVQGDDVQVEEMRKELQLNEKGMVYVKGLFERSS

SEQ ID NO: 21882 - protein, 267 aa, Arabidopsis thaliana
  peptide (1)..(267): Ceres Seq. ID no. 12332686
  misc_feature (89)..(222): Homolog of NCBI NO: 16332307 NR Description: unknown protein [Synechocystis sp. PCC 6803]
  misc_feature (89)..(251): Homolog of NCBI NO: 23123893 NR Description: hypothetical protein [Nostoc punctiforme]
  misc_feature (93)..(251): Homolog of NCBI NO: 17231472 NR Description: hypothetical protein [Nostoc sp. PCC 7120]
  misc_feature (89)..(242): Homolog of NCBI NO: 37523332 NR Description: hypothetical protein glr3763 [Gloeobacter
  misc_feature (203)..(267): Homolog of NCBI NO: 1402889 NR Description: unknown [Arabidopsis thaliana]
  misc_feature (1)..(153): Homolog of NCBI NO: 1402889 NR Description: unknown [Arabidopsis thaliana]
  misc_feature (1)..(267): Homolog of NCBI NO: 18405058 NR Description: expressed protein
  misc_feature (87)..(240): Homolog of NCBI NO: 22298167 NR Description: ORF_ID:tll0625~hypothetical protein
  misc_feature (94)..(222): Homolog of NCBI NO: 23039442 NR Description: hypothetical protein [Trichodesmium erythraeum
MATKLISPPLSCPWVTSREVIIKGLPRRRREWMVTKRNRVSAVTAMIVEPLSVVSSSAIQIHQWWEQNPNSLLLMTEATGGYSLASYYTSLGLFVISVPGLWSLIKRSVKSKIVRKTFVVNDVKKEPKQVAGEILSFFTRKNFNITDRGETITFEGKMVPSRGQAALLTFCTCISLASVGLVLTITVPDFGNNWFFIILLSPLAGVYYWKKASRKEEIKVKMMVGSKGRLDEIVVQGDDVQVEEMRKELQLNEKGMVYVKGLFERSS

SEQ ID NO: 21883 - protein, 235 aa, Arabidopsis thaliana; identical to SEQ ID NO: 20367
  peptide (1)..(235): Ceres Seq. ID no. 12332687
  misc_feature (55)..(208): Homolog of NCBI NO: 22298167 NR Description: ORF_ID:tll0625~hypothetical protein
  misc_feature (62)..(190): Homolog of NCBI NO: 23039442 NR Description: hypothetical protein [Trichodesmium erythraeum
  misc_feature (57)..(190): Homolog of NCBI NO: 16332307 NR Description: unknown protein [Synechocystis sp. PCC 6803]
  misc_feature (57)..(219): Homolog of NCBI NO: 23123893 NR Description: hypothetical protein [Nostoc punctiforme]
  misc_feature (61)..(219): Homolog of NCBI NO: 17231472 NR Description: hypothetical protein [Nostoc sp. PCC 7120]
  misc_feature (57)..(210): Homolog of NCBI NO: 37523332 NR Description: hypothetical protein glr3763 [Gloeobacter
  misc_feature (171)..(235): Homolog of NCBI NO: 1402889 NR Description: unknown [Arabidopsis thaliana]
  misc_feature (1)..(121): Homolog of NCBI NO: 1402889 NR Description: unknown [Arabidopsis thaliana]
  misc_feature (1)..(235): Homolog of NCBI NO: 18405058 NR Description: expressed protein

SEQ ID NO: 21884 - DNA, 823 bp, Arabidopsis thaliana
  misc_feature (1)..(823): Ceres Seq. ID no. 12337238
  misc_feature: MA Experiment ID: 108462 Result: Down-regulated in Transcription
  misc_feature: MA Experiment 108462 PARAMETER Experiment Name: At_Germinating_Seeds_cDNA_P Parameter: Age (day) Value: 2 vs. 0
  misc_feature: MA Experiment 108462 PARAMETER Experiment Name: At_Germinating_Seeds_cDNA_P Parameter: Tissue Value: Germinating Seeds
  misc_feature: MA Experiment ID: 108573 Result: Down-regulated in Transcription
  misc_feature: MA Experiment 108573 PARAMETER Experiment Name: At_Drought_cDNA_P Parameter: Timepoint (hr) Value: 6
  misc_feature: MA Experiment 108573 PARAMETER Experiment Name: At_Drought_cDNA_P Parameter: Tissue Value: Aerial
  misc_feature: MA Experiment 108573 PARAMETER Experiment Name: At_Drought_cDNA_P Parameter: Treatment Value: Drought vs. No Drought
  misc_feature: MA Experiment ID: 108585 Result: Down-regulated in Transcription
  misc_feature: MA Experiment 108585 PARAMETER Experiment Name: At_5mM_NaNP_cDNA_P Parameter: Timepoint (hr) Value: 6
  misc_feature: MA Experiment 108585 PARAMETER Experiment Name: At_5mM_NaNP_cDNA_P Parameter: Tissue Value: Aerial
  misc_feature: MA Experiment 108585 PARAMETER Experiment Name: At_5mM_NaNP_cDNA_P Parameter: Treatment Value: null
  misc_feature: MA Experiment ID: 108595 Result: Down-regulated in Transcription
  misc_feature: MA Experiment 108595 PARAMETER Experiment Name: At_Ler-pi_Ovule_cDNA_P Parameter: Plant Line Value: null
  misc_feature: MA Experiment ID: 108607 Result: Down-regulated in Transcription
  misc_feature: MA Experiment 108607 PARAMETER Experiment Name: At_100uM_ABA_cDNA_P Parameter: Timepoint (hr) Value: 4
  misc_feature: MA Experiment 108607 PARAMETER Experiment Name: At_100uM_ABA_cDNA_P Parameter: Tissue Value: Aerial
  misc_feature: MA Experiment 108607 PARAMETER Experiment Name: At_100uM_ABA_cDNA_P Parameter: Treatment Value: 100uM ABA vs. No Treatment
  misc_feature: MA Experiment ID: 20000184 Result: Down-regulated in Transcription
  misc_feature: MA Experiment 20000184 PARAMETER Experiment Name: At_Shoots__P Parameter: Age (day) Value: 7
  misc_feature: MA Experiment 20000184 PARAMETER Experiment Name: At_Shoots__P Parameter: Tissue Value: Shoots vs. Whole Plant
  misc_feature: MA Experiment ID: 20000185 Result: Down-regulated in Transcription
  misc_feature: MA Experiment 20000185 PARAMETER Experiment Name: At_Roots__P Parameter: Age (day) Value: 7 vs. 21
  misc_feature: MA Experiment 20000185 PARAMETER Experiment Name: At_Roots__P Parameter: Organism Value: A. thaliana
  misc_feature: MA Experiment 20000185 PARAMETER Experiment Name: At_Roots__P Parameter: Tissue Value: Roots vs. Whole Plant
  misc_feature: MA Experiment ID: 20000436 Result: Down-regulated in Transcription
  misc_feature: MA Experiment 20000436 PARAMETER Experiment Name: At_Drought_P Parameter: Age (day) Value: 7
  misc_feature: MA Experiment 20000436 PARAMETER Experiment Name: At_Drought_P Parameter: Organism Value: A. thaliana
  misc_feature: MA Experiment 20000436 PARAMETER Experiment Name: At_Drought_P Parameter: Plant Line Value: WS
  misc_feature: MA Experiment 20000436 PARAMETER Experiment Name: At_Drought_P Parameter: Timepoint (hr) Value: 12
  misc_feature: MA Experiment 20000436 PARAMETER Experiment Name: At_Drought_P Parameter: Tissue Value: Whole Plant
  misc_feature: MA Experiment 20000436 PARAMETER Experiment Name: At_Drought_P Parameter: Treatment Value: Drought vs. No Drought
  misc_feature: MA Experiment ID: 20000437 Result: Down-regulated in Transcription
  misc_feature: MA Experiment 20000437 PARAMETER Experiment Name: At_Drought_P Parameter: Age (day) Value: 8
  misc_feature: MA Experiment 20000437 PARAMETER Experiment Name: At_Drought_P Parameter: Organism Value: A. thaliana
  misc_feature: MA Experiment 20000437 PARAMETER Experiment Name: At_Drought_P Parameter: Plant Line Value: WS
  misc_feature: MA Experiment 20000437 PARAMETER Experiment Name: At_Drought_P Parameter: Timepoint (hr) Value: 24
  misc_feature: MA Experiment 20000437 PARAMETER Experiment Name: At_Drought_P Parameter: Tissue Value: Whole Plant
  misc_feature: MA Experiment 20000437 PARAMETER Experiment Name: At_Drought_P Parameter: Treatment Value: Drought vs. No Drought
  misc_feature: MA Experiment ID: 20000794 Result: Down-regulated in Transcription
  misc_feature: MA Experiment 20000794 PARAMETER Experiment Name: At_Petals_P Parameter: Age (day) Value: 23-25 days
  misc_feature: MA Experiment 20000794 PARAMETER Experiment Name: At_Petals_P Parameter: Plant Line Value: WS
  misc_feature: MA Experiment 20000794 PARAMETER Experiment Name: At_Petals_P Parameter: Tissue Value: Petals vs. Whole plant
  misc_feature: MA Experiment ID: 20001757 Result: Up-regulated in Transcription
  misc_feature: MA Experiment 20001757 PARAMETER Experiment Name: At_50mM_NH4NO3_L-to-H_P Parameter: Timepoint (hr) Value: 6
  misc_feature: MA Experiment 20001757 PARAMETER Experiment Name: At_50mM_NH4NO3_L-to-H_P Parameter: Tissue Value: Leaf
  misc_feature: MA Experiment 20001757 PARAMETER Experiment Name: At_50mM_NH4NO3_L-to-H_P Parameter: Treatment Value: 50mM NH4NO3 vs 100mM Mannitol
aaaagaaacaaattgttggaatctcaattctcgaatctgagatctcggagaagagatatggcgacagagtcatcggaatcggaagaagaaggaaagattagtggaggaaactataagctaatcatagacgacgatctaagagagatgggtaaaaacgcagcttggagcgttagctcttgtaagcccggcaatggcgtcaccactctccgcgacgacaatctcgagacttattggcaatcagatgggttacaaccacatttgattaacattcaattccagaagaaagtgaaactgcagttagtggttttgtacgttgactttaagcttgatgagagctatacaccaagtaaaatctctattcgagctggtgatggttttcataacttaaaggatattaaaagtgtggagcttgttaaaccaactggttgggtttgcttatctctgtctggaactgatccacgggaaacttttgtcaatacatttatgttacaaatagccattttgtcgaatcacctcaacgggagagatactcatatccgccagatcaaagtttacggccctagaccaaatcctattccgcaccaaccttttcagtttacatcgatggagtttctcacttattcaacactgagatgagaaatttgagcaggagaagtttgaagaacatggactatgaaagatactgatgttgataccacatgaagagtctataatcagattagttattgttgttgtgtaatggcttttgtttatatattacattggatataacaatcataacttcagtaagcttatcaaccaagacccccataaaacatttgac

SEQ ID NO: 21885 - protein, 211 aa, Arabidopsis thaliana
  peptide (1)..(211): Ceres Seq. ID no. 12337239
  misc_feature (46)..(192): Homolog of NCBI NO: 32420809 NR Description: hypothetical protein ( (AL513409) related to
  misc_feature (46)..(211): Homolog of NCBI NO: 28573741 NR Description: CG11419-PA [Drosophila melanogaster]
  misc_feature (46)..(211): Homolog of NCBI NO: 31240605 NR Description: ENSANGP00000020276 [Anopheles gambiae]
  misc_feature (46)..(187): Homolog of NCBI NO: 16975123 NR Description: Chain A, Crystal Structure Of The Apc10DOC1
  misc_feature (46)..(211): Homolog of NCBI NO: 34395509 NR Description: Anaphase promoting complex subunit 10 (APC10)
  misc_feature (46)..(211): Homolog of NCBI NO: 4836700 NR Description: anaphase promoting complex subunit 10 [Homo
  misc_feature (46)..(211): Homolog of NCBI NO: 7657035 NR Description: anaphase-promoting complex 10 [Homo sapiens]
  misc_feature (31)..(211): Homolog of NCBI NO: 5091606 NR Description: ESTs dbj|D15316 and dbj|C98044 come from this
  misc_feature (20)..(211): Homolog of NCBI NO: 18398701 NR Description: expressed protein
  misc_feature (20)..(211): Homolog of NCBI NO: 21592739 NR Description: unknown [Arabidopsis thaliana]
KRNKLLESQFSNLRSRRRDMATESSESEEEGKISGGNYKLIIDDDLREMGKNAAWSVSSCKPGNGVTTLRDDNLETYWQSDGLQPHLINIQFQKKVKLQLVVLYVDFKLDESYTPSKISIRAGDGFHNLKDIKSVELVKPTGWVCLSLSGTDPRETFVNTFMLQIAILSNHLNGRDTHIRQIKVYGPRPNPIPHQPFQFTSMEFLTYSTLR

SEQ ID NO: 21886 - protein, 192 aa, Arabidopsis thaliana
  peptide (1)..(192): Ceres Seq. ID no. 12337240
  misc_feature (27)..(173): Homolog of NCBI NO: 32420809 NR Description: hypothetical protein ( (AL513409) related to
  misc_feature (27)..(192): Homolog of NCBI NO: 28573741 NR Description: CG11419-PA [Drosophila melanogaster]
  misc_feature (27)..(192): Homolog of NCBI NO: 31240605 NR Description: ENSANGP00000020276 [Anopheles gambiae]
  misc_feature (27)..(168): Homolog of NCBI NO: 16975123 NR Description: Chain A, Crystal Structure Of The Apc10DOC1
  misc_feature (27)..(192): Homolog of NCBI NO: 34395509 NR Description: Anaphase promoting complex subunit 10 (APC10)
  misc_feature (27)..(192): Homolog of NCBI NO: 4836700 NR Description: anaphase promoting complex subunit 10 [Homo
  misc_feature (27)..(192): Homolog of NCBI NO: 7657035 NR Description: anaphase-promoting complex 10 [Homo sapiens]
  misc_feature (12)..(192): Homolog of NCBI NO: 5091606 NR Description: ESTs dbj|D15316 and dbj|C98044 come from this
  misc_feature (1)..(192): Homolog of NCBI NO: 18398701 NR Description: expressed protein
  misc_feature (1)..(192): Homolog of NCBI NO: 21592739 NR Description: unknown [Arabidopsis thaliana]
MATESSESEEEGKISGGNYKLIIDDDLREMGKNAAWSVSSCKPGNGVTTLRDDNLETYWQSDGLQPHLINIQFQKKVKLQLVVLYVDFKLDESYTPSKISIRAGDGFHNLKDIKSVELVKPTGWVCLSLSGTDPRETFVNTFMLQIAILSNHLNGRDTHIRQIKVYGPRPNPIPHQPFQFTSMEFLTYSTLR

SEQ ID NO: 21887 - protein, 163 aa, Arabidopsis thaliana
  peptide (1)..(163): Ceres Seq. ID no. 12337241
  misc_feature (1)..(144): Homolog of NCBI NO: 32420809 NR Description: hypothetical protein ( (AL513409) related to
  misc_feature (1)..(163): Homolog of NCBI NO: 28573741 NR Description: CG11419-PA [Drosophila melanogaster]
  misc_feature (1)..(163): Homolog of NCBI NO: 31240605 NR Description: ENSANGP00000020276 [Anopheles gambiae]
  misc_feature (1)..(139): Homolog of NCBI NO: 16975123 NR Description: Chain A, Crystal Structure Of The Apc10DOC1
  misc_feature (1)..(163): Homolog of NCBI NO: 34395509 NR Description: Anaphase promoting complex subunit 10 (APC10)
  misc_feature (1)..(163): Homolog of NCBI NO: 4836700 NR Description: anaphase promoting complex subunit 10 [Homo
  misc_feature (1)..(163): Homolog of NCBI NO: 7657035 NR Description: anaphase-promoting complex 10 [Homo sapiens]
  misc_feature (1)..(163): Homolog of NCBI NO: 5091606 NR Description: ESTs dbj|D15316 and dbj|C98044 come from this
  misc_feature (1)..(163): Homolog of NCBI NO: 18398701 NR Description: expressed protein
  misc_feature (1)..(163): Homolog of NCBI NO: 21592739 NR Description: unknown [Arabidopsis thaliana]
MGKNAAWSVSSCKPGNGVTTLRDDNLETYWQSDGLQPHLINIQFQKKVKLQLVVLYVDFKLDESYTPSKISIRAGDGFHNLKDIKSVELVKPTGWVCLSLSGTDPRETFVNTFMLQIAILSNHLNGRDTHIRQIKVYGPRPNPIPHQPFQFTSMEFLTYSTLR

SEQ ID NO: 21888 - DNA, 670 bp, Arabidopsis thaliana
  misc_feature (1)..(670): Ceres Seq. ID no. 13646025
  misc_feature: MA Experiment ID: 108461 Result: Up-regulated in Transcription
  misc_feature: MA Experiment 108461 PARAMETER Experiment Name: At_Germinating_Seeds_cDNA_P Parameter: Age (day) Value: 1 vs. 0
  misc_feature: MA Experiment 108461 PARAMETER Experiment Name: At_Germinating_Seeds_cDNA_P Parameter: Tissue Value: Germinating Seeds
  misc_feature: MA Experiment ID: 108462 Result: Up-regulated in Transcription
  misc_feature: MA Experiment 108462 PARAMETER Experiment Name: At_Germinating_Seeds_cDNA_P Parameter: Age (day) Value: 2 vs. 0
  misc_feature: MA Experiment 108462 PARAMETER Experiment Name: At_Germinating_Seeds_cDNA_P Parameter: Tissue Value: Germinating Seeds
  misc_feature: MA Experiment ID: 108488 Result: Up-regulated in Transcription
  misc_feature: MA Experiment ID: 108595 Result: Down-regulated in Transcription
  misc_feature: MA Experiment 108595 PARAMETER Experiment Name: At_Ler-pi_Ovule_cDNA_P Parameter: Plant Line Value: null
  misc_feature: MA Experiment ID: 20000070 Result: Down-regulated in Transcription
  misc_feature: MA Experiment 20000070 PARAMETER Experiment Name: At_100uM_ABA_Mutants_cDNA_P Parameter: Plant Line Value: CS24
  misc_feature: MA Experiment 20000070 PARAMETER Experiment Name: At_100uM_ABA_Mutants_cDNA_P Parameter: Timepoint (hr) Value: 6
  misc_feature: MA Experiment 20000070 PARAMETER Experiment Name: At_100uM_ABA_Mutants_cDNA_P Parameter: Tissue Value: Aerial
  misc_feature: MA Experiment 20000070 PARAMETER Experiment Name: At_100uM_ABA_Mutants_cDNA_P Parameter: Treatment Value: 100uM ABA vs. No Treatment
  misc_feature: MA Experiment ID: 20000071 Result: Down-regulated in Transcription
  misc_feature: MA Experiment 20000071 PARAMETER Experiment Name: At_100uM_ABA_Mutants_cDNA_P Parameter: Plant Line Value: CS8104
  misc_feature: MA Experiment 20000071 PARAMETER Experiment Name: At_100uM_ABA_Mutants_cDNA_P Parameter: Timepoint (hr) Value: 6
  misc_feature: MA Experiment 20000071 PARAMETER Experiment Name: At_100uM_ABA_Mutants_cDNA_P Parameter: Tissue Value: Aerial
  misc_feature: MA Experiment 20000071 PARAMETER Experiment Name: At_100uM_ABA_Mutants_cDNA_P Parameter: Treatment Value: 100uM ABA vs. No Treatment
  misc_feature: MA Experiment ID: 20000072 Result: Down-regulated in Transcription
  misc_feature: MA Experiment 20000072 PARAMETER Experiment Name: At_100uM_ABA_Mutants_cDNA_P Parameter: Plant Line Value: CS8105
  misc_feature: MA Experiment 20000072 PARAMETER Experiment Name: At_100uM_ABA_Mutants_cDNA_P Parameter: Timepoint (hr) Value: 6
  misc_feature: MA Experiment 20000072 PARAMETER Experiment Name: At_100uM_ABA_Mutants_cDNA_P Parameter: Tissue Value: Aerial
  misc_feature: MA Experiment 20000072 PARAMETER Experiment Name: At_100uM_ABA_Mutants_cDNA_P Parameter: Treatment Value: 100uM ABA vs. No Treatment
  misc_feature: MA Experiment ID: 20000086 Result: Down-regulated in Transcription
  misc_feature: MA Experiment 20000086 PARAMETER Experiment Name: At_100uM_ABA_Mutants_cDNA_P Parameter: Plant Line Value: CS22
  misc_feature: MA Experiment 20000086 PARAMETER Experiment Name: At_100uM_ABA_Mutants_cDNA_P Parameter: Timepoint (hr) Value: 6
  misc_feature: MA Experiment 20000086 PARAMETER Experiment Name: At_100uM_ABA_Mutants_cDNA_P Parameter: Tissue Value: Aerial
  misc_feature: MA Experiment 20000086 PARAMETER Experiment Name: At_100uM_ABA_Mutants_cDNA_P Parameter: Treatment Value: 100uM ABA vs. No Treatment
  misc_feature: MA Experiment ID: 20000117 Result: Down-regulated in Transcription
  misc_feature: MA Experiment 20000117 PARAMETER Experiment Name: At_100uM_ABA_Mutants_cDNA_P Parameter: Plant Line Value: Columbia
  misc_feature: MA Experiment 20000117 PARAMETER Experiment Name: At_100uM_ABA_Mutants_cDNA_P Parameter: Timepoint (hr) Value: 6
  misc_feature: MA Experiment 20000117 PARAMETER Experiment Name: At_100uM_ABA_Mutants_cDNA_P Parameter: Tissue Value: Aerial
  misc_feature: MA Experiment 20000117 PARAMETER Experiment Name: At_100uM_ABA_Mutants_cDNA_P Parameter: Treatment Value: 100uM ABA vs. No Treatment
attcgcacgagaccattacctagaacatcctaatcaaaaacacacaatccaatcaaaacacacagagagaagaaaaactcagaagaaaagccaaagagtgaaacaaaaatggcgtcgacgactctctcaatcgcaacaacaatccgttcctcatcttatcctactctcgcttccatcaatcacttcccttcccgaaccaccaccatcgaattcccctctcgcttcggtggtggttcatcatccacattgacccaccgtgcaacccatctccgtccaatcgccgccgtcgaagctccggagaaaatcgagaagatcggatccgaaatctcatccctaaccctcgaagaagctcgtatcctcgtcgactatctccaagacaaattcggtgtctccccactctctttagcccccgcagcagcggcggttgctgctccagccgacggtggcgcggcggctgtagtggaagagcaaacagagttcgatgtggttatcaatgaagttcccagcagttcccgtattgcagtgattaaagctgttagggctttaactagcttggcgttgaaggaagctaaggagctaatcgaagtattaccaaagaagtttaaagaaggtatcactaaagatgaagctgaagaagctaagaagactcttgaagaagctggtgctaaag

SEQ ID NO: 21889 - protein, 187 aa, Arabidopsis thaliana
  peptide (1)..(187): Ceres Seq. ID no. 15219029
  misc_feature (123)..(186): Pfam Name: Ribosomal protein L7/L12 C-terminal domain Pfam Description: Ribosomal protein L7/L12 C-terminal domain
  misc_feature (1)..(186): Homolog of NCBI NO: 133085 NR Description: 50S RIBOSOMAL PROTEIN L12, CHLOROPLAST PRECURSOR
  misc_feature (1)..(186): Homolog of NCBI NO: 548746 NR Description: 50S RIBOSOMAL PROTEIN L12, CHLOROPLAST PRECURSOR
  misc_feature (1)..(186): Homolog of NCBI NO: 133088 NR Description: 50S RIBOSOMAL PROTEIN L12, CHLOROPLAST PRECURSOR
  misc_feature (1)..(186): Homolog of NCBI NO: 20020 NR Description: ribosomal protein L12-1a [Nicotiana tabacum]
  misc_feature (1)..(186): Homolog of NCBI NO: 541896 NR Description: ribosomal protein L12.B precursor, chloroplast -
  misc_feature (1)..(186): Homolog of NCBI NO: 15232275 NR Description: 50S ribosomal protein L12-2, chloroplast
  misc_feature (1)..(186): Homolog of NCBI NO: 21592776 NR Description: 50S ribosomal protein L12-C [Arabidopsis thaliana]
  misc_feature (1)..(186): Homolog of NCBI NO: 15232276 NR Description: 50S ribosomal protein L12-3, chloroplast
  misc_feature (1)..(186): Homolog of NCBI NO: 541897 NR Description: ribosomal protein L12.C precursor, chloroplast -
  misc_feature (1)..(186): Homolog of NCBI NO: 15232274 NR Description: 50S ribosomal protein L12-1, chloroplast
MASTTLSIATTIRSSSYPTLASINHFPSRTTTIEFPSRFGGGSSSTLTHRATHLRPIAAVEAPEKIEKIGSEISSLTLEEARILVDYLQDKFGVSPLSLAPAAAAVAAPADGGAAAVVEEQTEFDVVINEVPSSSRIAVIKAVRALTSLALKEAKELIEVLPKKFKEGITKDEAEEAKKTLEEAGAK

SEQ ID NO: 21890 - DNA, 1143 bp, Arabidopsis thaliana
  misc_feature (1)..(1143): Ceres Seq. ID no. 12422523
  misc_feature: MA Experiment ID: 108463 Result: Down-regulated in Transcription
  misc_feature: MA Experiment 108463 PARAMETER Experiment Name: At_Germinating_Seeds_cDNA_P Parameter: Age (day) Value: 3 vs. 0
  misc_feature: MA Experiment 108463 PARAMETER Experiment Name: At_Germinating_Seeds_cDNA_P Parameter: Tissue Value: Germinating Seeds
  misc_feature: MA Experiment ID: 108464 Result: Down-regulated in Transcription
  misc_feature: MA Experiment 108464 PARAMETER Experiment Name: At_Germinating_Seeds_cDNA_P Parameter: Age (day) Value: 4 vs. 0
  misc_feature: MA Experiment 108464 PARAMETER Experiment Name: At_Germinating_Seeds_cDNA_P Parameter: Tissue Value: Germinating Seeds
  misc_feature: MA Experiment ID: 108595 Result: Up-regulated in Transcription
  misc_feature: MA Experiment 108595 PARAMETER Experiment Name: At_Ler-pi_Ovule_cDNA_P Parameter: Plant Line Value: null
  misc_feature: MA Experiment ID: 20000495 Result: Up-regulated in Transcription
  misc_feature: MA Experiment 20000495 PARAMETER Experiment Name: At_Guard_Cells_P Parameter: Harvest Date Value: 8/2/2002
  misc_feature: MA Experiment 20000495 PARAMETER Experiment Name: At_Guard_Cells_P Parameter: Organism Value: A. thaliana
  misc_feature: MA Experiment 20000495 PARAMETER Experiment Name: At_Guard_Cells_P Parameter: Tissue Value: Guard Cells vs. Leaves
aaaaacatgtcagagcaatcttttgtcgcatccccacaagtcttgaaaagcggagcctgatgatcaaaaggaacccccaaaactctctcaaacgcatcacttttgtctgccacctgtgactgactgtgaggatcccaacaacacttcttgttcatggattctgggcttcagcaactcgcattgtgcctcttcttcattctctgccgcctctttcaagccactgccgaagatgactggaagatagccacagccacgctttctagagacagggacggctcctcctccgtcgctactggaggcgcttgtgggtatggagatctgaggcagagcagctttgccggctacagcgcaggcctgagcgggaagctgttcaacaggggaagcagctgcggagcttgtctagaagtgcggtgcgtgaaccacatccgttggtgtcttcaaggcagcccctccgtggtggtcaccgccaccgatttctgtcctcccaattcgggactctcctccgattacggaggttggtgcaacttcccaaaggaacacttggaactatctcatgccgccttcacagggatcgcagaaaccagagctgagatgatacctatacagtataggagggtcaagtgtgggcggagaggcgggttgagattcagcttgagcgggagctcccactttttccaggtgttgataagcaatgtgggcctcgacggggaagtggttggtgtgaaagtgaagggccacacaacggcttggatcccaatggccagaaactggggacagaactggcactcctctctcgatctcatcggacagtctctctctttcgaggttactctcaaaggcggcaaaaccattgcctcttatgatgtggctcctccgtattggcgcttcggaatgacataccaaggaaagcagttccactcctgactcctttatcttcttcaaatcatgattcactttcggtgactttattatgactttggagtcattagatatcatcacttcatttcaaggaggtataaatgactttccacgagtggctcatctttgtcttctcttttcttttttctttttatataatatatccttcacaatccttacttggaccgcatttagctgtgtgagagtatattatgcacattgttc

SEQ ID NO: 21891 - protein, 256 aa, Arabidopsis thaliana
  peptide (1)..(256): Ceres Seq. ID no. 12422524
  misc_feature (163)..(240): Pfam Name: Pollen allergen Pfam Description: Pollen allergen
  misc_feature (5)..(254): Homolog of NCBI NO: 3510538 NR Description: expansin [Prunus armeniaca]
  misc_feature (5)..(254): Homolog of NCBI NO: 21314545 NR Description: alpha-expansin precursor [Gossypium hirsutum]
  misc_feature (22)..(256): Homolog of NCBI NO: 4138912 NR Description: expansin precursor [Lycopersicon esculentum]
  misc_feature (5)..(254): Homolog of NCBI NO: 30841322 NR Description: expansin [Gossypium hirsutum]
  misc_feature (5)..(254): Homolog of NCBI NO: 7484721 NR Description: expansin - upland cotton
  misc_feature (28)..(254): Homolog of NCBI NO: 38046730 NR Description: alpha-expansin 3 [Populus tremula x Populus
  misc_feature (8)..(254): Homolog of NCBI NO: 6942322 NR Description: alpha-expansin 3 [Triphysaria versicolor]
  misc_feature (5)..(254): Homolog of NCBI NO: 21314543 NR Description: alpha-expansin precursor [Gossypium hirsutum]
  misc_feature (1)..(254): Homolog of NCBI NO: 20135554 NR Description: expansin 1 [Musa acuminata]
  misc_feature (1)..(256): Homolog of NCBI NO: 15233735 NR Description: expansin, putative
MDSGLQQLALCLFFILCRLFQATAEDDWKIATATLSRDRDGSSSVATGGACGYGDLRQSSFAGYSAGLSGKLFNRGSSCGACLEVRCVNHIRWCLQGSPSVVVTATDFCPPNSGLSSDYGGWCNFPKEHLELSHAAFTGIAETRAEMIPIQYRRVKCGRRGGLRFSLSGSSHFFQVLISNVGLDGEVVGVKVKGHTTAWIPMARNWGQNWHSSLDLIGQSLSFEVTLKGGKTIASYDVAPPYWRFGMTYQGKQFHS

SEQ ID NO: 21892 - DNA, 2021 bp, Arabidopsis thaliana
  misc_feature (1)..(2021): Ceres Seq. ID no. 13503054
  misc_feature: MA Experiment ID: 108433 Result: Down-regulated in Transcription
  misc_feature: MA Experiment 108433 PARAMETER Experiment Name: At_rhl_Mutant2_cDNA_P Parameter: Age (day) Value: 7
  misc_feature: MA Experiment 108433 PARAMETER Experiment Name: At_rhl_Mutant2_cDNA_P Parameter: Organism Value: A. thaliana
  misc_feature: MA Experiment 108433 PARAMETER Experiment Name: At_rhl_Mutant2_cDNA_P Parameter: Plant Line Value: rhl Mutant vs. wt landsburg
  misc_feature: MA Experiment 108433 PARAMETER Experiment Name: At_rhl_Mutant2_cDNA_P Parameter: Tissue Value: Roots
  misc_feature: MA Experiment ID: 108434 Result: Down-regulated in Transcription
  misc_feature: MA Experiment 108434 PARAMETER Experiment Name: At_Root_Tips_cDNA_P Parameter: Tissue Value: Root Tips
  misc_feature: MA Experiment ID: 108462 Result: Up-regulated in Transcription
  misc_feature: MA Experiment 108462 PARAMETER Experiment Name: At_Germinating_Seeds_cDNA_P Parameter: Age (day) Value: 2 vs. 0
  misc_feature: MA Experiment 108462 PARAMETER Experiment Name: At_Germinating_Seeds_cDNA_P Parameter: Tissue Value: Germinating Seeds
  misc_feature: MA Experiment ID: 108463 Result: Up-regulated in Transcription
  misc_feature: MA Experiment 108463 PARAMETER Experiment Name: At_Germinating_Seeds_cDNA_P Parameter: Age (day) Value: 3 vs. 0
  misc_feature: MA Experiment 108463 PARAMETER Experiment Name: At_Germinating_Seeds_cDNA_P Parameter: Tissue Value: Germinating Seeds
  misc_feature: MA Experiment ID: 108464 Result: Up-regulated in Transcription
  misc_feature: MA Experiment 108464 PARAMETER Experiment Name: At_Germinating_Seeds_cDNA_P Parameter: Age (day) Value: 4 vs. 0
  misc_feature: MA Experiment 108464 PARAMETER Experiment Name: At_Germinating_Seeds_cDNA_P Parameter: Tissue Value: Germinating Seeds
  misc_feature: MA Experiment ID: 108469 Result: Up-regulated in Transcription
  misc_feature: MA Experiment ID: 108573 Result: Up-regulated in Transcription
  misc_feature: MA Experiment 108573 PARAMETER Experiment Name: At_Drought_cDNA_P Parameter: Timepoint (hr) Value: 6
  misc_feature: MA Experiment 108573 PARAMETER Experiment Name: At_Drought_cDNA_P Parameter: Tissue Value: Aerial
  misc_feature: MA Experiment 108573 PARAMETER Experiment Name: At_Drought_cDNA_P Parameter: Treatment Value: Drought vs. No Drought
  misc_feature: MA Experiment ID: 108574 Result: Up-regulated in Transcription
  misc_feature: MA Experiment 108574 PARAMETER Experiment Name: At_Wounding__cDNA_P Parameter: Timepoint (hr) Value: 1
  misc_feature: MA Experiment 108574 PARAMETER Experiment Name: At_Wounding__cDNA_P Parameter: Tissue Value: Aerial
  misc_feature: MA Experiment 108574 PARAMETER Experiment Name: At_Wounding__cDNA_P Parameter: Treatment Value: Wounding vs. No Wounding
  misc_feature: MA Experiment ID: 108585 Result: Up-regulated in Transcription
  misc_feature: MA Experiment 108585 PARAMETER Experiment Name: At_5mM_NaNP_cDNA_P Parameter: Timepoint (hr) Value: 6
  misc_feature: MA Experiment 108585 PARAMETER Experiment Name: At_5mM_NaNP_cDNA_P Parameter: Tissue Value: Aerial
  misc_feature: MA Experiment 108585 PARAMETER Experiment Name: At_5mM_NaNP_cDNA_P Parameter: Treatment Value: null
  misc_feature: MA Experiment ID: 108668 Result: Up-regulated in Transcription
  misc_feature: MA Experiment 108668 PARAMETER Experiment Name: At_2mM_SA_cDNA_P Parameter: Plant Line Value: WS
  misc_feature: MA Experiment 108668 PARAMETER Experiment Name: At_2mM_SA_cDNA_P Parameter: Timepoint (hr) Value: 6
  misc_feature: MA Experiment 108668 PARAMETER Experiment Name: At_2mM_SA_cDNA_P Parameter: Treatment Value: 2mM SA vs. No Treatment
  misc_feature: MA Experiment ID: 20000179 Result: Up-regulated in Transcription
  misc_feature: MA Experiment 20000179 PARAMETER Experiment Name: At_Germinating_Seeds_P Parameter: Age (hr) Value: 6 vs. 0
  misc_feature: MA Experiment 20000179 PARAMETER Experiment Name: At_Germinating_Seeds_P Parameter: Tissue Value: Germinating Seeds
  misc_feature: MA Experiment ID: 20000182 Result: Up-regulated in Transcription
  misc_feature: MA Experiment 20000182 PARAMETER Experiment Name: At_2mM_SA_P Parameter: Age (day) Value: 14
  misc_feature: MA Experiment 20000182 PARAMETER Experiment Name: At_2mM_SA_P Parameter: Organism Value: A. thaliana
  misc_feature: MA Experiment 20000182 PARAMETER Experiment Name: At_2mM_SA_P Parameter: Plant Line Value: WS
  misc_feature: MA Experiment 20000182 PARAMETER Experiment Name: At_2mM_SA_P Parameter: Timepoint (hr) Value: 6
  misc_feature: MA Experiment 20000182 PARAMETER Experiment Name: At_2mM_SA_P Parameter: Tissue Value: Aerial
  misc_feature: MA Experiment 20000182 PARAMETER Experiment Name: At_2mM_SA_P Parameter: Treatment Value: 2mM SA vs. No Treatment
  misc_feature: MA Experiment ID: 20000185 Result: Down-regulated in Transcription
  misc_feature: MA Experiment 20000185 PARAMETER Experiment Name: At_Roots__P Parameter: Age (day) Value: 7 vs. 21
  misc_feature: MA Experiment 20000185 PARAMETER Experiment Name: At_Roots__P Parameter: Organism Value: A. thaliana
  misc_feature: MA Experiment 20000185 PARAMETER Experiment Name: At_Roots__P Parameter: Tissue Value: Roots vs. Whole Plant
  misc_feature: MA Experiment ID: 20000211 Result: Up-regulated in Transcription
  misc_feature: MA Experiment 20000211 PARAMETER Experiment Name: At_0.001percent_MeJA__P Parameter: Age (day) Value: 14
  misc_feature: MA Experiment 20000211 PARAMETER Experiment Name: At_0.001percent_MeJA__P Parameter: Organism Value: A. thaliana
  misc_feature: MA Experiment 20000211 PARAMETER Experiment Name: At_0.001percent_MeJA__P Parameter: Plant Line Value: WS
  misc_feature: MA Experiment 20000211 PARAMETER Experiment Name: At_0.001percent_MeJA__P Parameter: Timepoint (hr) Value: 1
  misc_feature: MA Experiment 20000211 PARAMETER Experiment Name: At_0.001percent_MeJA__P Parameter: Tissue Value: Aerial
  misc_feature: MA Experiment 20000211 PARAMETER Experiment Name: At_0.001percent_MeJA__P Parameter: Treatment Value: 0.001percent MeJA vs. No Treatment
  misc_feature: MA Experiment ID: 20000439 Result: Down-regulated in Transcription
  misc_feature: MA Experiment 20000439 PARAMETER Experiment Name: At_Roots__P Parameter: Age (day) Value: 14 vs. 21
  misc_feature: MA Experiment 20000439 PARAMETER Experiment Name: At_Roots__P Parameter: Organism Value: A. thaliana
  misc_feature: MA Experiment 20000439 PARAMETER Experiment Name: At_Roots__P Parameter: Tissue Value: Roots vs. Whole Plant
  misc_feature: MA Experiment ID: 20000496 Result: Down-regulated in Transcription
  misc_feature: MA Experiment 20000496 PARAMETER Experiment Name: At_Guard_Cells_P Parameter: Harvest Date Value: 7/19/2002
  misc_feature: MA Experiment 20000496 PARAMETER Experiment Name: At_Guard_Cells_P Parameter: Organism Value: Canola
  misc_feature: MA Experiment 20000496 PARAMETER Experiment Name: At_Guard_Cells_P Parameter: Tissue Value: Guard Cells vs. Leaves
  misc_feature: MA Experiment ID: 20000573 Result: Up-regulated in Transcription
  misc_feature: MA Experiment 20000573 PARAMETER Experiment Name: At_100uM_ABA_Mutants__P Parameter: Organism Value: A. thaliana
  misc_feature: MA Experiment 20000573 PARAMETER Experiment Name: At_100uM_ABA_Mutants__P Parameter: Plant Line Value: CS22 vs. Ler wt
  misc_feature: MA Experiment 20000573 PARAMETER Experiment Name: At_100uM_ABA_Mutants__P Parameter: Timepoint (hr) Value: N/A
  misc_feature: MA Experiment 20000573 PARAMETER Experiment Name: At_100uM_ABA_Mutants__P Parameter: Tissue Value: Whole Plant
  misc_feature: MA Experiment 20000573 PARAMETER Experiment Name: At_100uM_ABA_Mutants__P Parameter: Treatment Value: None
  misc_feature: MA Experiment ID: 20000574 Result: Up-regulated in Transcription
  misc_feature: MA Experiment 20000574 PARAMETER Experiment Name: At_100uM_ABA_Mutants__P Parameter: Organism Value: A. thaliana
  misc_feature: MA Experiment 20000574 PARAMETER Experiment Name: At_100uM_ABA_Mutants__P Parameter: Plant Line Value: CS23 vs. Ler wt
  misc_feature: MA Experiment 20000574 PARAMETER Experiment Name: At_100uM_ABA_Mutants__P Parameter: Timepoint (hr) Value: N/A
  misc_feature: MA Experiment 20000574 PARAMETER Experiment Name: At_100uM_ABA_Mutants__P Parameter: Tissue Value: Whole Plant
  misc_feature: MA Experiment 20000574 PARAMETER Experiment Name: At_100uM_ABA_Mutants__P Parameter: Treatment Value: None
  misc_feature: MA Experiment ID: 20000709 Result: Up-regulated in Transcription
  misc_feature: MA Experiment 20000709 PARAMETER Experiment Name: At_15mM_NH4NO3_L-to-H_P Parameter: Age (hr) Value: 14
  misc_feature: MA Experiment 20000709 PARAMETER Experiment Name: At_15mM_NH4NO3_L-to-H_P Parameter: Organism Value: A. thaliana
  misc_feature: MA Experiment 20000709 PARAMETER Experiment Name: At_15mM_NH4NO3_L-to-H_P Parameter: Plant Line Value: WS
  misc_feature: MA Experiment 20000709 PARAMETER Experiment Name: At_15mM_NH4NO3_L-to-H_P Parameter: Timepoint (hr) Value: 4
  misc_feature: MA Experiment 20000709 PARAMETER Experiment Name: At_15mM_NH4NO3_L-to-H_P Parameter: Tissue Value: Aerial
  misc_feature: MA Experiment 20000709 PARAMETER Experiment Name: At_15mM_NH4NO3_L-to-H_P Parameter: Treatment Value: 15mM NH4NO3 vs. 30mM Mannitol
  misc_feature: MA Experiment ID: 20001248 Result: Up-regulated in Transcription
  misc_feature: MA Experiment 20001248 PARAMETER Experiment Name: At_Far-red-induction_P Parameter: Age (day) Value: 7
  misc_feature: MA Experiment 20001248 PARAMETER Experiment Name: At_Far-red-induction_P Parameter: Light Value: Far-red vs. White
  misc_feature: MA Experiment 20001248 PARAMETER Experiment Name: At_Far-red-induction_P Parameter: Organism Value: A. thaliana
  misc_feature: MA Experiment 20001248 PARAMETER Experiment Name: At_Far-red-induction_P Parameter: Plant Line Value: Columbia
  misc_feature: MA Experiment 20001248 PARAMETER Experiment Name: At_Far-red-induction_P Parameter: Timepoint (hr) Value: 4
  misc_feature: MA Experiment 20001248 PARAMETER Experiment Name: At_Far-red-induction_P Parameter: Tissue Value: Whole Plant
  misc_feature: MA Experiment ID: 20001450 Result: Up-regulated in Transcription
  misc_feature: MA Experiment 20001450 PARAMETER Experiment Name: At_Far-red-induction_P Parameter: Age (day) Value: 7
  misc_feature: MA Experiment 20001450 PARAMETER Experiment Name: At_Far-red-induction_P Parameter: Light Value: Far-red vs. White
  misc_feature: MA Experiment 20001450 PARAMETER Experiment Name: At_Far-red-induction_P Parameter: Organism Value: A. thaliana
  misc_feature: MA Experiment 20001450 PARAMETER Experiment Name: At_Far-red-induction_P Parameter: Plant Line Value: Columbia
  misc_feature: MA Experiment 20001450 PARAMETER Experiment Name: At_Far-red-induction_P Parameter: Timepoint (hr) Value: 8
  misc_feature: MA Experiment 20001450 PARAMETER Experiment Name: At_Far-red-induction_P Parameter: Tissue Value: Whole Plant
  misc_feature: MA Experiment ID: 20001504 Result: Down-regulated in Transcription
  misc_feature: MA Experiment 20001504 PARAMETER Experiment Name: At_Far-red-enriched_P Parameter: Age (day) Value: 10
  misc_feature: MA Experiment 20001504 PARAMETER Experiment Name: At_Far-red-enriched_P Parameter: Light Value: Far-red enriched vs. White
  misc_feature: MA Experiment 20001504 PARAMETER Experiment Name: At_Far-red-enriched_P Parameter: Organism Value: A. thaliana
  misc_feature: MA Experiment 20001504 PARAMETER Experiment Name: At_Far-red-enriched_P Parameter: Plant Line Value: Columbia
  misc_feature: MA Experiment 20001504 PARAMETER Experiment Name: At_Far-red-enriched_P Parameter: Timepoint (day) Value: 6
  misc_feature: MA Experiment 20001504 PARAMETER Experiment Name: At_Far-red-enriched_P Parameter: Tissue Value: Whole Plant
atcctctctcttcactcagcatccttttataaccaaaacaaactttatctccctctctctctctcacagacaagaacacaaagttatggacaatctccggaaacttaatcttctctctgtctctctaaccataatctttgtctctcttaccatagccaccaacttacctttctttgaagtgaaatatcccaacaacaacccttttgggatgttactacggccgacaccgatcaagaaccaatccttgggtctaccggctcatgtcgggtcagatgagtgtcgggtttggaccaaagcatgttctgatgagattcttaggctgacttatcagccggataacgttgcgtggcttaaacgcgttaggaggacgatccatgagaacccggagctagcgtttgaggagtatgagactagtaggcttattaggtcggagctggaccgtatgggtatcatgtatagatatccgttagcgaaaacgggtattcgggcttggatcggatccggtggaccgccttttgttgcggttcgggctgatatggacgcactacctattcaggaagcagttgaatgggaacatataagcaaagttgcaggcaaaatgcatgcatgtggtcatgacgcacatgtgactatgcttcttggtgctgcccatattcttaaggctcgtgaacatcttctcaagggaacagtggttctgttattccaaccggctgaagaagctggaaatggtgcaaagaatatgatcgaagacggagctttggatgacgtggaggctatcttcgcggtccatgtgtcccatatccatccaacgggtgtgattggatcaagaagtggtcctttgctcgcgggatgtggaattttccgggcggttatcacttcggaagatagccgtggcgccgctaatctccttcttgcagcttcttccgcggtcattagtcttcaaggcattgtatcccgtgaagctagtcctcttgactctcaggttgtgtcggttacttcatttgatggcggtcatagtctcgatgtggcgccggacacggtggtcctcggtggtactttcagagctttttctaactcaagcttctactacctcaagaaacgtattcaagaggtactcatggatcaggtcggggttttcggttgccaagcgacagtgaacttctttgagaagcagaatgcgatatacccgccaactacgaacaatgatgcaacatacaatcacttgaagaaagtcaccatagatttgctcggagatagccatttcaccttggctccacagatgatgggagccgaagatttcgccttctactcagaaatcatcccagccgctttctacttcattggcataagaaatgaagaactcggatcagtccacattgctcattcaccacatttcatgatcgatgaagatagtttacccgttggagccgcggttcatgccgccgtggctgagagatacttaaatgataaacattcataagagtaaaaacaatctccccggcttttttttgggtggttatatttctaggcgttacggaaattatattgttcttaatctatctttgcttggaaatgtttgtgaagagtagtttttttttttttaaacgtgtaaaccgcatattgcatatggtgtatggattttagctaaagaggttagagtaaaagatagctagcggtacaaaatcttagacaactattttcttgatatcatgaaatatttggacgtttgagtatttgctacgaaattgtattaccatgtgattattaaggtttatattgacaacagaggtttcatatgtgattattagcttgtaagtgaaacaaagaaaagtaacgtcaattgaagataactgcaaggttgacaatttccaaagtccaagaagaaaattacggaatccgaaagcatacaaacgaggaagattttcaagattttaggtcataattttcttggttcgtgtgggatattaatttttgggtactttctaaggattgataaactataatatctctttttagcatct

SEQ ID NO: 21893 - protein, 492 aa, Arabidopsis thaliana
  peptide (1)..(492): Ceres Seq. ID no. 13503055
  misc_feature (114)..(488): Pfam Name: Peptidase family M20/M25/M40 Pfam Description: Peptidase family M20/M25/M40
  misc_feature (97)..(492): Homolog of NCBI NO: 902791 NR Description: ILL2
  misc_feature (97)..(492): Homolog of NCBI NO: 18175667 NR Description: IAA-amino acid hydrolase [Arabidopsis thaliana]
  misc_feature (97)..(492): Homolog of NCBI NO: 15241894 NR Description: IAA-amino acid hydrolase 2 (ILL2) [Arabidopsis
  misc_feature (103)..(487): Homolog of NCBI NO: 15218027 NR Description: IAA-Ala hydrolase (IAR3) [Arabidopsis thaliana]
  misc_feature (104)..(487): Homolog of NCBI NO: 27948556 NR Description: IAA-amino acid hydrolase [Oryza sativa (indica
  misc_feature (104)..(487): Homolog of NCBI NO: 34914096 NR Description: putative IAA-Ala hydrolase
  misc_feature (103)..(490): Homolog of NCBI NO: 34910396 NR Description: putative IAA-Ala hydrolase
  misc_feature (52)..(492): Homolog of NCBI NO: 17978838 NR Description: IAA-amino acid conjugate hydrolase-like protein
  misc_feature (29)..(492): Homolog of NCBI NO: 3559811 NR Description: gr1-protein [Arabidopsis thaliana]
  misc_feature (29)..(492): Homolog of NCBI NO: 15219390 NR Description: gr1 protein [Arabidopsis thaliana]
SSLFTQHPFITKTNFISLSLSHRQEHKVMDNLRKLNLLSVSLTIIFVSLTIATNLPFFEVKYPNNNPFGMLLRPTPIKNQSLGLPAHVGSDECRVWTKACSDEILRLTYQPDNVAWLKRVRRTIHENPELAFEEYETSRLIRSELDRMGIMYRYPLAKTGIRAWIGSGGPPFVAVRADMDALPIQEAVEWEHISKVAGKMHACGHDAHVTMLLGAAHILKAREHLLKGTVVLLFQPAEEAGNGAKNMIEDGALDDVEAIFAVHVSHIHPTGVIGSRSGPLLAGCGIFRAVITSEDSRGAANLLLAASSAVISLQGIVSREASPLDSQVVSVTSFDGGHSLDVAPDTVVLGGTFRAFSNSSFYYLKKRIQEVLMDQVGVFGCQATVNFFEKQNAIYPPTTNNDATYNHLKKVTIDLLGDSHFTLAPQMMGAEDFAFYSEIIPAAFYFIGIRNEELGSVHIAHSPHFMIDEDSLPVGAAVHAAVAERYLNDKHS

SEQ ID NO: 21894 - protein, 464 aa, Arabidopsis thaliana
  peptide (1)..(464): Ceres Seq. ID no. 13503056
  misc_feature (86)..(460): Pfam Name: Peptidase family M20/M25/M40 Pfam Description: Peptidase family M20/M25/M40
  misc_feature (69)..(464): Homolog of NCBI NO: 902791 NR Description: ILL2
  misc_feature (69)..(464): Homolog of NCBI NO: 18175667 NR Description: IAA-amino acid hydrolase [Arabidopsis thaliana]
  misc_feature (69)..(464): Homolog of NCBI NO: 15241894 NR Description: IAA-amino acid hydrolase 2 (ILL2) [Arabidopsis
  misc_feature (75)..(459): Homolog of NCBI NO: 15218027 NR Description: IAA-Ala hydrolase (IAR3) [Arabidopsis thaliana]
  misc_feature (76)..(459): Homolog of NCBI NO: 27948556 NR Description: IAA-amino acid hydrolase [Oryza sativa (indica
  misc_feature (76)..(459): Homolog of NCBI NO: 34914096 NR Description: putative IAA-Ala hydrolase
  misc_feature (75)..(462): Homolog of NCBI NO: 34910396 NR Description: putative IAA-Ala hydrolase
  misc_feature (24)..(464): Homolog of NCBI NO: 17978838 NR Description: IAA-amino acid conjugate hydrolase-like protein
  misc_feature (1)..(464): Homolog of NCBI NO: 3559811 NR Description: gr1-protein [Arabidopsis thaliana]
  misc_feature (1)..(464): Homolog of NCBI NO: 15219390 NR Description: gr1 protein [Arabidopsis thaliana]
MDNLRKLNLLSVSLTIIFVSLTIATNLPFFEVKYPNNNPFGMLLRPTPIKNQSLGLPAHVGSDECRVWTKACSDEILRLTYQPDNVAWLKRVRRTIHENPELAFEEYETSRLIRSELDRMGIMYRYPLAKTGIRAWIGSGGPPFVAVRADMDALPIQEAVEWEHISKVAGKMHACGHDAHVTMLLGAAHILKAREHLLKGTVVLLFQPAEEAGNGAKNMIEDGALDDVEAIFAVHVSHIHPTGVIGSRSGPLLAGCGIFRAVITSEDSRGAANLLLAASSAVISLQGIVSREASPLDSQVVSVTSFDGGHSLDVAPDTVVLGGTFRAFSNSSFYYLKKRIQEVLMDQVGVFGCQATVNFFEKQNAIYPPTTNNDATYNHLKKVTIDLLGDSHFTLAPQMMGAEDFAFYSEIIPAAFYFIGIRNEELGSVHIAHSPHFMIDEDSLPVGAAVHAAVAERYLNDKHS

SEQ ID NO: 21895 - protein, 423 aa, Arabidopsis thaliana
  peptide (1)..(423): Ceres Seq. ID no. 13503057
  misc_feature (45)..(419): Pfam Name: Peptidase family M20/M25/M40 Pfam Description: Peptidase family M20/M25/M40
  misc_feature (34)..(421): Homolog of NCBI NO: 34910396 NR Description: putative IAA-Ala hydrolase
  misc_feature (1)..(423): Homolog of NCBI NO: 17978838 NR Description: IAA-amino acid conjugate hydrolase-like protein
  misc_feature (28)..(423): Homolog of NCBI NO: 902791 NR Description: ILL2
  misc_feature (28)..(423): Homolog of NCBI NO: 15241894 NR Description: IAA-amino acid hydrolase 2 (ILL2) [Arabidopsis
  misc_feature (35)..(418): Homolog of NCBI NO: 27948556 NR Description: IAA-amino acid hydrolase [Oryza sativa (indica
  misc_feature (35)..(418): Homolog of NCBI NO: 34914096 NR Description: putative IAA-Ala hydrolase
  misc_feature (34)..(418): Homolog of NCBI NO: 15218027 NR Description: IAA-Ala hydrolase (IAR3) [Arabidopsis thaliana]
  misc_feature (28)..(423): Homolog of NCBI NO: 18175667 NR Description: IAA-amino acid hydrolase [Arabidopsis thaliana]
  misc_feature (1)..(423): Homolog of NCBI NO: 3559811 NR Description: gr1-protein [Arabidopsis thaliana]
  misc_feature (1)..(423): Homolog of NCBI NO: 15219390 NR Description: gr1 protein [Arabidopsis thaliana]
MLLRPTPIKNQSLGLPAHVGSDECRVWTKACSDEILRLTYQPDNVAWLKRVRRTIHENPELAFEEYETSRLIRSELDRMGIMYRYPLAKTGIRAWIGSGGPPFVAVRADMDALPIQEAVEWEHISKVAGKMHACGHDAHVTMLLGAAHILKAREHLLKGTVVLLFQPAEEAGNGAKNMIEDGALDDVEAIFAVHVSHIHPTGVIGSRSGPLLAGCGIFRAVITSEDSRGAANLLLAASSAVISLQGIVSREASPLDSQVVSVTSFDGGHSLDVAPDTVVLGGTFRAFSNSSFYYLKKRIQEVLMDQVGVFGCQATVNFFEKQNAIYPPTTNNDATYNHLKKVTIDLLGDSHFTLAPQMMGAEDFAFYSEIIPAAFYFIGIRNEELGSVHIAHSPHFMIDEDSLPVGAAVHAAVAERYLNDKHS

SEQ ID NO: 21896 - DNA, 1201 bp, Arabidopsis thaliana
  misc_feature (1)..(1201): Ceres Seq. ID no. 12357614
  misc_feature: MA Experiment ID: 108488 Result: Down-regulated in Transcription
  misc_feature: MA Experiment ID: 108569 Result: Down-regulated in Transcription
  misc_feature: MA Experiment 108569 PARAMETER Experiment Name: At_0.001%_MeJA__cDNA_P Parameter: Timepoint (hr) Value: 6
  misc_feature: MA Experiment 108569 PARAMETER Experiment Name: At_0.001%_MeJA__cDNA_P Parameter: Tissue Value: Aerial
  misc_feature: MA Experiment 108569 PARAMETER Experiment Name: At_0.001%_MeJA__cDNA_P Parameter: Treatment Value: 0.001% MeJA vs. No Treatment
  misc_feature: MA Experiment ID: 20000087 Result: Up-regulated in Transcription
  misc_feature: MA Experiment 20000087 PARAMETER Experiment Name: At_100uM_ABA_Mutants_cDNA_P Parameter: Plant Line Value: WS
  misc_feature: MA Experiment 20000087 PARAMETER Experiment Name: At_100uM_ABA_Mutants_cDNA_P Parameter: Timepoint (hr) Value: 6
  misc_feature: MA Experiment 20000087 PARAMETER Experiment Name: At_100uM_ABA_Mutants_cDNA_P Parameter: Tissue Value: Aerial
  misc_feature: MA Experiment 20000087 PARAMETER Experiment Name: At_100uM_ABA_Mutants_cDNA_P Parameter: Treatment Value: 100uM ABA vs. No Treatment
  misc_feature: MA Experiment ID: 20000111 Result: Up-regulated in Transcription
  misc_feature: MA Experiment 20000111 PARAMETER Experiment Name: At_42deg_Heat_cDNA_P Parameter: Temperature (deg C) Value: 42 vs. 22
  misc_feature: MA Experiment 20000111 PARAMETER Experiment Name: At_42deg_Heat_cDNA_P Parameter: Timepoint (hr) Value: 6
  misc_feature: MA Experiment 20000111 PARAMETER Experiment Name: At_42deg_Heat_cDNA_P Parameter: Tissue Value: Aerial
  misc_feature: MA Experiment ID: 20000112 Result: Up-regulated in Transcription
  misc_feature: MA Experiment 20000112 PARAMETER Experiment Name: At_42deg_Heat_cDNA_P Parameter: Temperature (deg C) Value: 42 vs. 22
  misc_feature: MA Experiment 20000112 PARAMETER Experiment Name: At_42deg_Heat_cDNA_P Parameter: Timepoint (hr) Value: 2
  misc_feature: MA Experiment 20000112 PARAMETER Experiment Name: At_42deg_Heat_cDNA_P Parameter: Tissue Value: Aerial
  misc_feature: MA Experiment ID: 20000113 Result: Up-regulated in Transcription
  misc_feature: MA Experiment 20000113 PARAMETER Experiment Name: At_42deg_Heat_cDNA_P Parameter: Temperature (deg C) Value: 42 vs. 22
  misc_feature: MA Experiment 20000113 PARAMETER Experiment Name: At_42deg_Heat_cDNA_P Parameter: Timepoint (hr) Value: 8
  misc_feature: MA Experiment 20000113 PARAMETER Experiment Name: At_42deg_Heat_cDNA_P Parameter: Tissue Value: Aerial
  misc_feature: MA Experiment ID: 20000180 Result: Up-regulated in Transcription
  misc_feature: MA Experiment 20000180 PARAMETER Experiment Name: At_Germinating_Seeds_P Parameter: Age (hr) Value: 24 vs. 0
  misc_feature: MA Experiment 20000180 PARAMETER Experiment Name: At_Germinating_Seeds_P Parameter: Tissue Value: Germinating Seeds
  misc_feature: MA Experiment ID: 20000185 Result: Up-regulated in Transcription
  misc_feature: MA Experiment 20000185 PARAMETER Experiment Name: At_Roots__P Parameter: Age (day) Value: 7 vs. 21
  misc_feature: MA Experiment 20000185 PARAMETER Experiment Name: At_Roots__P Parameter: Organism Value: A. thaliana
  misc_feature: MA Experiment 20000185 PARAMETER Experiment Name: At_Roots__P Parameter: Tissue Value: Roots vs. Whole Plant
  misc_feature: MA Experiment ID: 20000439 Result: Up-regulated in Transcription
  misc_feature: MA Experiment 20000439 PARAMETER Experiment Name: At_Roots__P Parameter: Age (day) Value: 14 vs. 21
  misc_feature: MA Experiment 20000439 PARAMETER Experiment Name: At_Roots__P Parameter: Organism Value: A. thaliana
  misc_feature: MA Experiment 20000439 PARAMETER Experiment Name: At_Roots__P Parameter: Tissue Value: Roots vs. Whole Plant
  misc_feature: MA Experiment ID: 20001248 Result: Down-regulated in Transcription
  misc_feature: MA Experiment 20001248 PARAMETER Experiment Name: At_Far-red-induction_P Parameter: Age (day) Value: 7
  misc_feature: MA Experiment 20001248 PARAMETER Experiment Name: At_Far-red-induction_P Parameter: Light Value: Far-red vs. White
  misc_feature: MA Experiment 20001248 PARAMETER Experiment Name: At_Far-red-induction_P Parameter: Organism Value: A. thaliana
  misc_feature: MA Experiment 20001248 PARAMETER Experiment Name: At_Far-red-induction_P Parameter: Plant Line Value: Columbia
  misc_feature: MA Experiment 20001248 PARAMETER Experiment Name: At_Far-red-induction_P Parameter: Timepoint (hr) Value: 4
  misc_feature: MA Experiment 20001248 PARAMETER Experiment Name: At_Far-red-induction_P Parameter: Tissue Value: Whole Plant
atcatttcaaaagcaattcttcttgtcttggctcaatttatatacaacactctctctctctcggttttgtccaaacaatggctcgcttcgatattgttctactcataggtctttgcctcataatctctgtctttcccgatacaaccaccgcacaactaagccgcggtttctactccaaaacttgccccaatgtcgaacaaatcgtgagaaatgctgtccaaaagaaaataaagaagacattcgtcgccgtccctgccactctccgtctcttcttccacgactgctttgtcaatggttgtgatgcatctgtcatgatccaatcaacgcctaagaacaaggcagagaaggatcatccagataacatttcgctagctggagatggatttgatgtggtgatccaagctaagaaagcccttgactctaaccctagttgccggaacaaggtctcatgtgccgatattcttactttggccacccgagatgttgttgttgcggctggaggaccgtcctatgaagttgaacttggtaggttcgatggtttggtatcaaccgcgtcaagtgtcgaagggaacttaccaggaccttcggacaatgtagacaaacttaatgctcttttcacgaaaaacaaacttacccaagaagatatgattgctctttcagcggctcacacccttggattcgcacattgcggcaaggtctttaaaagaatccacaaattcaacggcatcaactccgtggacccaactttaaacaaggcttacgctattgagcttcaaaaggcttgtcctaagaatgtggacccaagaattgcaatcaacatggacccagtcacgcccaagacgtttgacaacacttacttcaagaatcttcaacaaggcaaaggtctcttcacctccgatcaagttctcttcacggatggtcgctctaggcccaccgttaatgcttgggcctcaaactctacggcctttaaccgcgcttttgtgatagccatgaccaaacttggccgtgttggagttaagaatagcagcaatggaaacatccgtcgtgattgtggtgcgtttaactagagctggtaatgggaaaatataagttgtcttatctcctaatttttttttcttttatccaattcaacctattttcttttcgtttattaatgtttgaatgttcattttgacgatgagaagatattattggtttttcc

SEQ ID NO: 21897 - protein, 354 aa, Arabidopsis thaliana
  peptide (1)..(354): Ceres Seq. ID no. 12357615
  misc_feature (68)..(318): Pfam Name: Peroxidase Pfam Description: Peroxidase
  misc_feature (26)..(350): Homolog of NCBI NO: 4138647 NR Description: peroxidase [Trifolium repens]
  misc_feature (26)..(350): Homolog of NCBI NO: 2117624 NR Description: peroxidase (EC 1.11.1.7) 2 precursor - alfalfa
  misc_feature (26)..(354): Homolog of NCBI NO: 17979440 NR Description: putative peroxidase [Arabidopsis thaliana]
  misc_feature (26)..(354): Homolog of NCBI NO: 15235600 NR Description: peroxidase, putative
  misc_feature (26)..(354): Homolog of NCBI NO: 28629828 NR Description: peroxidase 1 [Artemisia annua]
  misc_feature (46)..(354): Homolog of NCBI NO: 1546708 NR Description: peroxidase ATP9a [Arabidopsis thaliana]
  misc_feature (31)..(354): Homolog of NCBI NO: 21554605 NR Description: peroxidase, prxr2 [Arabidopsis thaliana]
  misc_feature (31)..(354): Homolog of NCBI NO: 15235597 NR Description: peroxidase, putative
  misc_feature (26)..(354): Homolog of NCBI NO: 15240737 NR Description: peroxidase, putative; protein id: At5g67400.1
  misc_feature (26)..(354): Homolog of NCBI NO: 15229646 NR Description: peroxidase, putative; protein id: At3g49960.1
HFKSNSSCLGSIYIQHSLSLGFVQTMARFDIVLLIGLCLIISVFPDTTTAQLSRGFYSKTCPNVEQIVRNAVQKKIKKTFVAVPATLRLFFHDCFVNGCDASVMIQSTPKNKAEKDHPDNISLAGDGFDVVIQAKKALDSNPSCRNKVSCADILTLATRDVVVAAGGPSYEVELGRFDGLVSTASSVEGNLPGPSDNVDKLNALFTKNKLTQEDMIALSAAHTLGFAHCGKVFKRIHKFNGINSVDPTLNKAYAIELQKACPKNVDPRIAINMDPVTPKTFDNTYFKNLQQGKGLFTSDQVLFTDGRSRPTVNAWASNSTAFNRAFVIAMTKLGRVGVKNSSNGNIRRDCGAFN

SEQ ID NO: 21898 - protein, 329 aa, Arabidopsis thaliana
  peptide (1)..(329): Ceres Seq. ID no. 12357616
  misc_feature (43)..(293): Pfam Name: Peroxidase Pfam Description: Peroxidase
  misc_feature (1)..(325): Homolog of NCBI NO: 4138647 NR Description: peroxidase [Trifolium repens]
  misc_feature (1)..(325): Homolog of NCBI NO: 2117624 NR Description: peroxidase (EC 1.11.1.7) 2 precursor - alfalfa
  misc_feature (1)..(329): Homolog of NCBI NO: 17979440 NR Description: putative peroxidase [Arabidopsis thaliana]
  misc_feature (1)..(329): Homolog of NCBI NO: 15235600 NR Description: peroxidase, putative
  misc_feature (1)..(329): Homolog of NCBI NO: 28629828 NR Description: peroxidase 1 [Artemisia annua]
  misc_feature (21)..(329): Homolog of NCBI NO: 1546708 NR Description: peroxidase ATP9a [Arabidopsis thaliana]
  misc_feature (6)..(329): Homolog of NCBI NO: 21554605 NR Description: peroxidase, prxr2 [Arabidopsis thaliana]
  misc_feature (6)..(329): Homolog of NCBI NO: 15235597 NR Description: peroxidase, putative
  misc_feature (1)..(329): Homolog of NCBI NO: 15240737 NR Description: peroxidase, putative; protein id: At5g67400.1
  misc_feature (1)..(329): Homolog of NCBI NO: 15229646 NR Description: peroxidase, putative; protein id: At3g49960.1
MARFDIVLLIGLCLIISVFPDTTTAQLSRGFYSKTCPNVEQIVRNAVQKKIKKTFVAVPATLRLFFHDCFVNGCDASVMIQSTPKNKAEKDHPDNISLAGDGFDVVIQAKKALDSNPSCRNKVSCADILTLATRDVVVAAGGPSYEVELGRFDGLVSTASSVEGNLPGPSDNVDKLNALFTKNKLTQEDMIALSAAHTLGFAHCGKVFKRIHKFNGINSVDPTLNKAYAIELQKACPKNVDPRIAINMDPVTPKTFDNTYFKNLQQGKGLFTSDQVLFTDGRSRPTVNAWASNSTAFNRAFVIAMTKLGRVGVKNSSNGNIRRDCGAFN

SEQ ID NO: 21899 - protein, 251 aa, Arabidopsis thaliana
  peptide (1)..(251): Ceres Seq. ID no. 12357617
  misc_feature (1)..(215): Pfam Name: Peroxidase Pfam Description: Peroxidase
  misc_feature (1)..(247): Homolog of NCBI NO: 4138647 NR Description: peroxidase [Trifolium repens]
  misc_feature (1)..(247): Homolog of NCBI NO: 2117624 NR Description: peroxidase (EC 1.11.1.7) 2 precursor - alfalfa
  misc_feature (1)..(251): Homolog of NCBI NO: 17979440 NR Description: putative peroxidase [Arabidopsis thaliana]
  misc_feature (1)..(251): Homolog of NCBI NO: 15235600 NR Description: peroxidase, putative
  misc_feature (1)..(251): Homolog of NCBI NO: 28629828 NR Description: peroxidase 1 [Artemisia annua]
  misc_feature (1)..(251): Homolog of NCBI NO: 1546708 NR Description: peroxidase ATP9a [Arabidopsis thaliana]
  misc_feature (1)..(251): Homolog of NCBI NO: 21554605 NR Description: peroxidase, prxr2 [Arabidopsis thaliana]
  misc_feature (1)..(251): Homolog of NCBI NO: 15235597 NR Description: peroxidase, putative
  misc_feature (1)..(251): Homolog of NCBI NO: 15240737 NR Description: peroxidase, putative; protein id: At5g67400.1
  misc_feature (1)..(251): Homolog of NCBI NO: 15229646 NR Description: peroxidase, putative; protein id: At3g49960.1
MIQSTPKNKAEKDHPDNISLAGDGFDVVIQAKKALDSNPSCRNKVSCADILTLATRDVVVAAGGPSYEVELGRFDGLVSTASSVEGNLPGPSDNVDKLNALFTKNKLTQEDMIALSAAHTLGFAHCGKVFKRIHKFNGINSVDPTLNKAYAIELQKACPKNVDPRIAINMDPVTPKTFDNTYFKNLQQGKGLFTSDQVLFTDGRSRPTVNAWASNSTAFNRAFVIAMTKLGRVGVKNSSNGNIRRDCGAFN

SEQ ID NO: 21900 - DNA, 1437 bp, Arabidopsis thaliana
  misc_feature (1)..(1437): Ceres Seq. ID no. 13497598
  misc_feature: MA Experiment ID: 108434 Result: Up-regulated in Transcription
  misc_feature: MA Experiment 108434 PARAMETER Experiment Name: At_Root_Tips_cDNA_P Parameter: Tissue Value: Root Tips
  misc_feature: MA Experiment ID: 108462 Result: Down-regulated in Transcription
  misc_feature: MA Experiment 108462 PARAMETER Experiment Name: At_Germinating_Seeds_cDNA_P Parameter: Age (day) Value: 2 vs. 0
  misc_feature: MA Experiment 108462 PARAMETER Experiment Name: At_Germinating_Seeds_cDNA_P Parameter: Tissue Value: Germinating Seeds
  misc_feature: MA Experiment ID: 108463 Result: Down-regulated in Transcription
  misc_feature: MA Experiment 108463 PARAMETER Experiment Name: At_Germinating_Seeds_cDNA_P Parameter: Age (day) Value: 3 vs. 0
  misc_feature: MA Experiment 108463 PARAMETER Experiment Name: At_Germinating_Seeds_cDNA_P Parameter: Tissue Value: Germinating Seeds
  misc_feature: MA Experiment ID: 108464 Result: Down-regulated in Transcription
  misc_feature: MA Experiment 108464 PARAMETER Experiment Name: At_Germinating_Seeds_cDNA_P Parameter: Age (day) Value: 4 vs. 0
  misc_feature: MA Experiment 108464 PARAMETER Experiment Name: At_Germinating_Seeds_cDNA_P Parameter: Tissue Value: Germinating Seeds
  misc_feature: MA Experiment ID: 20000184 Result: Up-regulated in Transcription
  misc_feature: MA Experiment 20000184 PARAMETER Experiment Name: At_Shoots__P Parameter: Age (day) Value: 7
  misc_feature: MA Experiment 20000184 PARAMETER Experiment Name: At_Shoots__P Parameter: Tissue Value: Shoots vs. Whole Plant
  misc_feature: MA Experiment ID: 20000227 Result: Up-regulated in Transcription
  misc_feature: MA Experiment 20000227 PARAMETER Experiment Name: At_Root-Tips-vs-Tops_P Parameter: Tissue Value: Root Tips vs. Root Tops
  misc_feature: MA Experiment ID: 20000234 Result: Up-regulated in Transcription
  misc_feature: MA Experiment 20000234 PARAMETER Experiment Name: At_Siliques_P Parameter: Age (day) Value: 21
  misc_feature: MA Experiment 20000234 PARAMETER Experiment Name: At_Siliques_P Parameter: Organism Value: A. thaliana
  misc_feature: MA Experiment 20000234 PARAMETER Experiment Name: At_Siliques_P Parameter: Plant Line Value: WS
  misc_feature: MA Experiment 20000234 PARAMETER Experiment Name: At_Siliques_P Parameter: Tissue Value: Less Than 5mm Siliques vs. Whole Plant
  misc_feature: MA Experiment ID: 20001557 Result: Up-regulated in Transcription
  misc_feature: MA Experiment 20001557 PARAMETER Experiment Name: At_Drought_Soil_Dry_P Parameter: Age (day) Value: 27
  misc_feature: MA Experiment 20001557 PARAMETER Experiment Name: At_Drought_Soil_Dry_P Parameter: Organism Value: A. thaliana
  misc_feature: MA Experiment 20001557 PARAMETER Experiment Name: At_Drought_Soil_Dry_P Parameter: Plant Line Value: WS
  misc_feature: MA Experiment 20001557 PARAMETER Experiment Name: At_Drought_Soil_Dry_P Parameter: Post Timepoint (hr) Value: 3
  misc_feature: MA Experiment 20001557 PARAMETER Experiment Name: At_Drought_Soil_Dry_P Parameter: Post-Treatment Value: Re-Water vs. No Drought
  misc_feature: MA Experiment 20001557 PARAMETER Experiment Name: At_Drought_Soil_Dry_P Parameter: Timepoint (day) Value: 13
  misc_feature: MA Experiment 20001557 PARAMETER Experiment Name: At_Drought_Soil_Dry_P Parameter: Treatment Value: Drought vs. No Drought
  misc_feature: MA Experiment ID: 20001558 Result: Up-regulated in Transcription
  misc_feature: MA Experiment 20001558 PARAMETER Experiment Name: At_Drought_Soil_Dry_P Parameter: Age (day) Value: 27
  misc_feature: MA Experiment 20001558 PARAMETER Experiment Name: At_Drought_Soil_Dry_P Parameter: Organism Value: A. thaliana
  misc_feature: MA Experiment 20001558 PARAMETER Experiment Name: At_Drought_Soil_Dry_P Parameter: Plant Line Value: WS
  misc_feature: MA Experiment 20001558 PARAMETER Experiment Name: At_Drought_Soil_Dry_P Parameter: Post Timepoint (hr) Value: 6
  misc_feature: MA Experiment 20001558 PARAMETER Experiment Name: At_Drought_Soil_Dry_P Parameter: Post-Treatment Value: Re-Water vs. No Drought
  misc_feature: MA Experiment 20001558 PARAMETER Experiment Name: At_Drought_Soil_Dry_P Parameter: Timepoint (day) Value: 13
  misc_feature: MA Experiment 20001558 PARAMETER Experiment Name: At_Drought_Soil_Dry_P Parameter: Treatment Value: Drought vs. No Drought
  misc_feature: MA Experiment ID: 20001560 Result: Up-regulated in Transcription
  misc_feature: MA Experiment 20001560 PARAMETER Experiment Name: At_Drought_Soil_Dry_P Parameter: Age (day) Value: 28
  misc_feature: MA Experiment 20001560 PARAMETER Experiment Name: At_Drought_Soil_Dry_P Parameter: Organism Value: A. thaliana
  misc_feature: MA Experiment 20001560 PARAMETER Experiment Name: At_Drought_Soil_Dry_P Parameter: Plant Line Value: WS
  misc_feature: MA Experiment 20001560 PARAMETER Experiment Name: At_Drought_Soil_Dry_P Parameter: Post Timepoint (hr) Value: None
  misc_feature: MA Experiment 20001560 PARAMETER Experiment Name: At_Drought_Soil_Dry_P Parameter: Post-Treatment Value: None
  misc_feature: MA Experiment 20001560 PARAMETER Experiment Name: At_Drought_Soil_Dry_P Parameter: Timepoint (day) Value: 14
  misc_feature: MA Experiment 20001560 PARAMETER Experiment Name: At_Drought_Soil_Dry_P Parameter: Treatment Value: Drought vs. No Drought
  misc_feature: MA Experiment ID: 20001757 Result: Up-regulated in Transcription
  misc_feature: MA Experiment 20001757 PARAMETER Experiment Name: At_50mM_NH4NO3_L-to-H_P Parameter: Timepoint (hr) Value: 6
  misc_feature: MA Experiment 20001757 PARAMETER Experiment Name: At_50mM_NH4NO3_L-to-H_P Parameter: Tissue Value: Leaf
  misc_feature: MA Experiment 20001757 PARAMETER Experiment Name: At_50mM_NH4NO3_L-to-H_P Parameter: Treatment Value: 50mM NH4NO3 vs 100mM Mannitol
aaaaccctaatttctcaaagagtctaaagagacggagagtgagagaagagagaaacatttcgagacaaatggccgccgccgctgctcgtcctctcgtcaccatccaaaccttggatggtgacatgtccaccgatcaatcctccaccgtcgtacttcccgacgtcatgacggcgccagttcgaccagacatcgttaacttcgttcacgcccaaatctccaacaacagccgtcagccatacgccgtatcgaagaaggccggtcaccagacctccgccgagtcctggggaaccggacgtgccgtgtctcgtatccctcgtgttcccggtggtggtactcaccgtgctggtcaagctgcgttcggtaacatgtgtcgtggtggtcgtatgttcgctccaaccaagatctggcgccgctggcaccgtcgtgtcaatgtcaacatgaagcgtcacgcaatcgtctcagctatcgctgcaactgctgttcctgcgcttgtgatggctcgtggtcacaagatcgagaatgttcctgagatgcctcttgttgtgagtgactccgccgaagctgtggagaagacctcagctgcgatcaaggttttgaaacagatcggtgcttatgatgatgctgagaaggcaaagaacagcattggaatccgtcctggtaaaggtaaaatgaggaaccgtcgttacatttctaggaaaggtcctctggtggtttatggaactgaaggatctaagatagttaaggcgtttagaaaccttcctggtgttgagctttgtcatgtggagaggcttaatttgttgaagcttgctcctggtggtcaccttggtcggtttgtgatctggaccaagtctgcctttgagaagcttgagtctatctatggttcgtttgagaagccatcagagaagaagaaggggtatgtgcttcctcgtgcaaagatggtgaatgctgatcttgccaggattatcaattcagatgagattcagagtgttgtgaatccgatcaagaaggatgcgaagagggctgttcttaagaagaatccattgaagaatctcaatgtgatgttgaagttgaatccttatgctaagaccgcgaagaggatgtcactgttagctgaagcacagagagttaaggctaagaaggagaagctcgccaagaagaggaaaaccgttaccaaggaggaggcgttggcaatcaaagcagcaggcaagtcgtggtacaagactatgatctccgacagtgattacaccgagtttgataacttcaccaaatggctcggtgctagccagtaataatctcgtctgctttggaacactttccatattttagtcaaaagattttggtttttttaatctgttttgtctttgggtgtctggatatcaagttgaattatgaacaagtttcacttttttacatctccatttcttacttcgcctttat

SEQ ID NO: 21901 - protein, 428 aa, Arabidopsis thaliana
  peptide (1)..(428): Ceres Seq. ID no. 13497599
  misc_feature (47)..(291): Pfam Name: Ribosomal protein L4/L1 family Pfam Description: Ribosomal protein L4/L1 family
  misc_feature (47)..(291): Pfam Name: Ribosomal protein L4/L1 family Pfam Description: Ribosomal protein L4/L1 family
  misc_feature (27)..(393): Homolog of NCBI NO: 1350686 NR Description: 60S RIBOSOMAL PROTEIN L4 (L1)
  misc_feature (71)..(428): Homolog of NCBI NO: 6441068 NR Description: 60S ribosomal protein L4 [Chlamydomonas sp. HS-5]
  misc_feature (122)..(428): Homolog of NCBI NO: 13605831 NR Description: AT5g02870/F9G14_180 [Arabidopsis thaliana]
  misc_feature (25)..(428): Homolog of NCBI NO: 34897236 NR Description: putative 60S ribosomal protein L1
  misc_feature (25)..(428): Homolog of NCBI NO: 34393487 NR Description: putative 60S ribosomal protein L4/L1
  misc_feature (27)..(393): Homolog of NCBI NO: 1350686 NR Description: 60S RIBOSOMAL PROTEIN L4 (L1)
  misc_feature (122)..(428): Homolog of NCBI NO: 13605831 NR Description: AT5g02870/F9G14_180 [Arabidopsis thaliana]
  misc_feature (25)..(428): Homolog of NCBI NO: 34393487 NR Description: putative 60S ribosomal protein L4/L1
  misc_feature (23)..(428): Homolog of NCBI NO: 15232723 NR Description: 60S ribosomal protein L4/L1 (RPL4A) [Arabidopsis
  misc_feature (23)..(428): Homolog of NCBI NO: 21593543 NR Description: 60S ribosomal protein L4-B (L1) [Arabidopsis
  misc_feature (23)..(428): Homolog of NCBI NO: 15242558 NR Description: 60S ribosomal protein L4/L1 (RPL4D) [Arabidopsis
  misc_feature (23)..(428): Homolog of NCBI NO: 26450328 NR Description: putative 60S ribosomal protein [Arabidopsis
  misc_feature (24)..(428): Homolog of NCBI NO: 17367847 NR Description: 60S ribosomal protein L4 (L1)
  misc_feature (25)..(428): Homolog of NCBI NO: 34897236 NR Description: putative 60S ribosomal protein L1
  misc_feature (71)..(428): Homolog of NCBI NO: 6441068 NR Description: 60S ribosomal protein L4 [Chlamydomonas sp. HS-5]
  misc_feature (24)..(428): Homolog of NCBI NO: 17367847 NR Description: 60S ribosomal protein L4 (L1)
  misc_feature (23)..(428): Homolog of NCBI NO: 26450328 NR Description: putative 60S ribosomal protein [Arabidopsis
  misc_feature (23)..(428): Homolog of NCBI NO: 15242558 NR Description: 60S ribosomal protein L4/L1 (RPL4D) [Arabidopsis
  misc_feature (23)..(428): Homolog of NCBI NO: 21593543 NR Description: 60S ribosomal protein L4-B (L1) [Arabidopsis
  misc_feature (23)..(428): Homolog of NCBI NO: 15232723 NR Description: 60S ribosomal protein L4/L1 (RPL4A) [Arabidopsis
NPNFSKSLKRRRVREERNISRQMAAAAARPLVTIQTLDGDMSTDQSSTVVLPDVMTAPVRPDIVNFVHAQISNNSRQPYAVSKKAGHQTSAESWGTGRAVSRIPRVPGGGTHRAGQAAFGNMCRGGRMFAPTKIWRRWHRRVNVNMKRHAIVSAIAATAVPALVMARGHKIENVPEMPLVVSDSAEAVEKTSAAIKVLKQIGAYDDAEKAKNSIGIRPGKGKMRNRRYISRKGPLVVYGTEGSKIVKAFRNLPGVELCHVERLNLLKLAPGGHLGRFVIWTKSAFEKLESIYGSFEKPSEKKKGYVLPRAKMVNADLARIINSDEIQSVVNPIKKDAKRAVLKKNPLKNLNVMLKLNPYAKTAKRMSLLAEAQRVKAKKEKLAKKRKTVTKEEALAIKAAGKSWYKTMISDSDYTEFDNFTKWLGASQ

SEQ ID NO: 21902 - protein, 406 aa, Arabidopsis thaliana
  peptide (1)..(406): Ceres Seq. ID no. 13497600
  misc_feature (25)..(269): Pfam Name: Ribosomal protein L4/L1 family Pfam Description: Ribosomal protein L4/L1 family
  misc_feature (25)..(269): Pfam Name: Ribosomal protein L4/L1 family Pfam Description: Ribosomal protein L4/L1 family
  misc_feature (5)..(371): Homolog of NCBI NO: 1350686 NR Description: 60S RIBOSOMAL PROTEIN L4 (L1)
  misc_feature (49)..(406): Homolog of NCBI NO: 6441068 NR Description: 60S ribosomal protein L4 [Chlamydomonas sp. HS-5]
  misc_feature (100)..(406): Homolog of NCBI NO: 13605831 NR Description: AT5g02870/F9G14_180 [Arabidopsis thaliana]
  misc_feature (3)..(406): Homolog of NCBI NO: 34897236 NR Description: putative 60S ribosomal protein L1
  misc_feature (3)..(406): Homolog of NCBI NO: 34393487 NR Description: putative 60S ribosomal protein L4/L1
  misc_feature (5)..(371): Homolog of NCBI NO: 1350686 NR Description: 60S RIBOSOMAL PROTEIN L4 (L1)
  misc_feature (100)..(406): Homolog of NCBI NO: 13605831 NR Description: AT5g02870/F9G14_180 [Arabidopsis thaliana]
  misc_feature (3)..(406): Homolog of NCBI NO: 34393487 NR Description: putative 60S ribosomal protein L4/L1
  misc_feature (1)..(406): Homolog of NCBI NO: 15232723 NR Description: 60S ribosomal protein L4/L1 (RPL4A) [Arabidopsis
  misc_feature (1)..(406): Homolog of NCBI NO: 21593543 NR Description: 60S ribosomal protein L4-B (L1) [Arabidopsis
  misc_feature (1)..(406): Homolog of NCBI NO: 15242558 NR Description: 60S ribosomal protein L4/L1 (RPL4D) [Arabidopsis
  misc_feature (1)..(406): Homolog of NCBI NO: 26450328 NR Description: putative 60S ribosomal protein [Arabidopsis
  misc_feature (2)..(406): Homolog of NCBI NO: 17367847 NR Description: 60S ribosomal protein L4 (L1)
  misc_feature (3)..(406): Homolog of NCBI NO: 34897236 NR Description: putative 60S ribosomal protein L1
  misc_feature (49)..(406): Homolog of NCBI NO: 6441068 NR Description: 60S ribosomal protein L4 [Chlamydomonas sp. HS-5]
  misc_feature (2)..(406): Homolog of NCBI NO: 17367847 NR Description: 60S ribosomal protein L4 (L1)
  misc_feature (1)..(406): Homolog of NCBI NO: 26450328 NR Description: putative 60S ribosomal protein [Arabidopsis
  misc_feature (1)..(406): Homolog of NCBI NO: 15242558 NR Description: 60S ribosomal protein L4/L1 (RPL4D) [Arabidopsis
  misc_feature (1)..(406): Homolog of NCBI NO: 21593543 NR Description: 60S ribosomal protein L4-B (L1) [Arabidopsis
  misc_feature (1)..(406): Homolog of NCBI NO: 15232723 NR Description: 60S ribosomal protein L4/L1 (RPL4A) [Arabidopsis
MAAAAARPLVTIQTLDGDMSTDQSSTVVLPDVMTAPVRPDIVNFVHAQISNNSRQPYAVSKKAGHQTSAESWGTGRAVSRIPRVPGGGTHRAGQAAFGNMCRGGRMFAPTKIWRRWHRRVNVNMKRHAIVSAIAATAVPALVMARGHKIENVPEMPLVVSDSAEAVEKTSAAIKVLKQIGAYDDAEKAKNSIGIRPGKGKMRNRRYISRKGPLVVYGTEGSKIVKAFRNLPGVELCHVERLNLLKLAPGGHLGRFVIWTKSAFEKLESIYGSFEKPSEKKKGYVLPRAKMVNADLARIINSDEIQSVVNPIKKDAKRAVLKKNPLKNLNVMLKLNPYAKTAKRMSLLAEAQRVKAKKEKLAKKRKTVTKEEALAIKAAGKSWYKTMISDSDYTEFDNFTKWLGASQ

SEQ ID NO: 21903 - protein, 388 aa, Arabidopsis thaliana
  peptide (1)..(388): Ceres Seq. ID no. 13497601
  misc_feature (7)..(251): Pfam Name: Ribosomal protein L4/L1 family Pfam Description: Ribosomal protein L4/L1 family
  misc_feature (7)..(251): Pfam Name: Ribosomal protein L4/L1 family Pfam Description: Ribosomal protein L4/L1 family
  misc_feature (1)..(353): Homolog of NCBI NO: 1350686 NR Description: 60S RIBOSOMAL PROTEIN L4 (L1)
  misc_feature (31)..(388): Homolog of NCBI NO: 6441068 NR Description: 60S ribosomal protein L4 [Chlamydomonas sp. HS-5]
  misc_feature (82)..(388): Homolog of NCBI NO: 13605831 NR Description: AT5g02870/F9G14_180 [Arabidopsis thaliana]
  misc_feature (1)..(388): Homolog of NCBI NO: 34897236 NR Description: putative 60S ribosomal protein L1
  misc_feature (1)..(388): Homolog of NCBI NO: 34393487 NR Description: putative 60S ribosomal protein L4/L1
  misc_feature (1)..(353): Homolog of NCBI NO: 1350686 NR Description: 60S RIBOSOMAL PROTEIN L4 (L1)
  misc_feature (82)..(388): Homolog of NCBI NO: 13605831 NR Description: AT5g02870/F9G14_180 [Arabidopsis thaliana]
  misc_feature (1)..(388): Homolog of NCBI NO: 34393487 NR Description: putative 60S ribosomal protein L4/L1
  misc_feature (1)..(388): Homolog of NCBI NO: 15232723 NR Description: 60S ribosomal protein L4/L1 (RPL4A) [Arabidopsis
  misc_feature (1)..(388): Homolog of NCBI NO: 21593543 NR Description: 60S ribosomal protein L4-B (L1) [Arabidopsis
  misc_feature (1)..(388): Homolog of NCBI NO: 15242558 NR Description: 60S ribosomal protein L4/L1 (RPL4D) [Arabidopsis
  misc_feature (1)..(388): Homolog of NCBI NO: 26450328 NR Description: putative 60S ribosomal protein [Arabidopsis
  misc_feature (1)..(388): Homolog of NCBI NO: 17367847 NR Description: 60S ribosomal protein L4 (L1)
  misc_feature (1)..(388): Homolog of NCBI NO: 34897236 NR Description: putative 60S ribosomal protein L1
  misc_feature (31)..(388): Homolog of NCBI NO: 6441068 NR Description: 60S ribosomal protein L4 [Chlamydomonas sp. HS-5]
  misc_feature (1)..(388): Homolog of NCBI NO: 17367847 NR Description: 60S ribosomal protein L4 (L1)
  misc_feature (1)..(388): Homolog of NCBI NO: 26450328 NR Description: putative 60S ribosomal protein [Arabidopsis
  misc_feature (1)..(388): Homolog of NCBI NO: 15242558 NR Description: 60S ribosomal protein L4/L1 (RPL4D) [Arabidopsis
  misc_feature (1)..(388): Homolog of NCBI NO: 21593543 NR Description: 60S ribosomal protein L4-B (L1) [Arabidopsis
  misc_feature (1)..(388): Homolog of NCBI NO: 15232723 NR Description: 60S ribosomal protein L4/L1 (RPL4A) [Arabidopsis
MSTDQSSTVVLPDVMTAPVRPDIVNFVHAQISNNSRQPYAVSKKAGHQTSAESWGTGRAVSRIPRVPGGGTHRAGQAAFGNMCRGGRMFAPTKIWRRWHRRVNVNMKRHAIVSAIAATAVPALVMARGHKIENVPEMPLVVSDSAEAVEKTSAAIKVLKQIGAYDDAEKAKNSIGIRPGKGKMRNRRYISRKGPLVVYGTEGSKIVKAFRNLPGVELCHVERLNLLKLAPGGHLGRFVIWTKSAFEKLESIYGSFEKPSEKKKGYVLPRAKMVNADLARIINSDEIQSVVNPIKKDAKRAVLKKNPLKNLNVMLKLNPYAKTAKRMSLLAEAQRVKAKKEKLAKKRKTVTKEEALAIKAAGKSWYKTMISDSDYTEFDNFTKWLGASQ

SEQ ID NO: 21904 - DNA, 1704 bp, Arabidopsis thaliana
  misc_feature (1)..(1704): Ceres Seq. ID no. 12321264
  misc_feature: MA Experiment ID: 108435 Result: Up-regulated in Transcription
  misc_feature: MA Experiment 108435 PARAMETER Experiment Name: At_stm_Mutants_cDNA_P Parameter: Plant Line Value: wt Landsburg vs stm
  misc_feature: MA Experiment 108435 PARAMETER Experiment Name: At_stm_Mutants_cDNA_P Parameter: Tissue Value: Shoot Apical Meristem Region
  misc_feature: MA Experiment ID: 108461 Result: Down-regulated in Transcription
  misc_feature: MA Experiment 108461 PARAMETER Experiment Name: At_Germinating_Seeds_cDNA_P Parameter: Age (day) Value: 1 vs. 0
  misc_feature: MA Experiment 108461 PARAMETER Experiment Name: At_Germinating_Seeds_cDNA_P Parameter: Tissue Value: Germinating Seeds
  misc_feature: MA Experiment ID: 108462 Result: Down-regulated in Transcription
  misc_feature: MA Experiment 108462 PARAMETER Experiment Name: At_Germinating_Seeds_cDNA_P Parameter: Age (day) Value: 2 vs. 0
  misc_feature: MA Experiment 108462 PARAMETER Experiment Name: At_Germinating_Seeds_cDNA_P Parameter: Tissue Value: Germinating Seeds
  misc_feature: MA Experiment ID: 108463 Result: Down-regulated in Transcription
  misc_feature: MA Experiment 108463 PARAMETER Experiment Name: At_Germinating_Seeds_cDNA_P Parameter: Age (day) Value: 3 vs. 0
  misc_feature: MA Experiment 108463 PARAMETER Experiment Name: At_Germinating_Seeds_cDNA_P Parameter: Tissue Value: Germinating Seeds
  misc_feature: MA Experiment ID: 108464 Result: Down-regulated in Transcription
  misc_feature: MA Experiment 108464 PARAMETER Experiment Name: At_Germinating_Seeds_cDNA_P Parameter: Age (day) Value: 4 vs. 0
  misc_feature: MA Experiment 108464 PARAMETER Experiment Name: At_Germinating_Seeds_cDNA_P Parameter: Tissue Value: Germinating Seeds
  misc_feature: MA Experiment ID: 108489 Result: Up-regulated in Transcription
  misc_feature: MA Experiment ID: 20000185 Result: Up-regulated in Transcription
  misc_feature: MA Experiment 20000185 PARAMETER Experiment Name: At_Roots__P Parameter: Age (day) Value: 7 vs. 21
  misc_feature: MA Experiment 20000185 PARAMETER Experiment Name: At_Roots__P Parameter: Organism Value: A. thaliana
  misc_feature: MA Experiment 20000185 PARAMETER Experiment Name: At_Roots__P Parameter: Tissue Value: Roots vs. Whole Plant
  misc_feature: MA Experiment ID: 20000439 Result: Up-regulated in Transcription
  misc_feature: MA Experiment 20000439 PARAMETER Experiment Name: At_Roots__P Parameter: Age (day) Value: 14 vs. 21
  misc_feature: MA Experiment 20000439 PARAMETER Experiment Name: At_Roots__P Parameter: Organism Value: A. thaliana
  misc_feature: MA Experiment 20000439 PARAMETER Experiment Name: At_Roots__P Parameter: Tissue Value: Roots vs. Whole Plant
  misc_feature: MA Experiment ID: 20001458 Result: Up-regulated in Transcription
  misc_feature: MA Experiment 20001458 PARAMETER Experiment Name: At_50mM_NH4NO3_L-to-H_P Parameter: Age (day) Value: Undefined
  misc_feature: MA Experiment 20001458 PARAMETER Experiment Name: At_50mM_NH4NO3_L-to-H_P Parameter: Organism Value: Undefined
  misc_feature: MA Experiment 20001458 PARAMETER Experiment Name: At_50mM_NH4NO3_L-to-H_P Parameter: Plant Line Value: Undefined
  misc_feature: MA Experiment 20001458 PARAMETER Experiment Name: At_50mM_NH4NO3_L-to-H_P Parameter: Timepoint (hr) Value: 2
  misc_feature: MA Experiment 20001458 PARAMETER Experiment Name: At_50mM_NH4NO3_L-to-H_P Parameter: Tissue Value: Siliques
  misc_feature: MA Experiment 20001458 PARAMETER Experiment Name: At_50mM_NH4NO3_L-to-H_P Parameter: Treatment Value: 50mM NH4NO3 vs. 100mM Manitol
  misc_feature: MA Experiment ID: 20001459 Result: Up-regulated in Transcription
  misc_feature: MA Experiment 20001459 PARAMETER Experiment Name: At_50mM_NH4NO3_L-to-H_P Parameter: Age (day) Value: Undefined
  misc_feature: MA Experiment 20001459 PARAMETER Experiment Name: At_50mM_NH4NO3_L-to-H_P Parameter: Organism Value: Undefined
  misc_feature: MA Experiment 20001459 PARAMETER Experiment Name: At_50mM_NH4NO3_L-to-H_P Parameter: Plant Line Value: Undefined
  misc_feature: MA Experiment 20001459 PARAMETER Experiment Name: At_50mM_NH4NO3_L-to-H_P Parameter: Timepoint (hr) Value: 4
  misc_feature: MA Experiment 20001459 PARAMETER Experiment Name: At_50mM_NH4NO3_L-to-H_P Parameter: Tissue Value: Siliques
  misc_feature: MA Experiment 20001459 PARAMETER Experiment Name: At_50mM_NH4NO3_L-to-H_P Parameter: Treatment Value: 50mM NH4NO3 vs. 100mM Manitol
aaaaacttcaccaaccccatttttaagcccctttctttgtttttatcctccgatcgatcaaaccaagaaaaaacactttcgtatttccctcgacgaaaaaaatggcaaccatttcgaatctcgctaatcttccccgcgccacctgcgtcgactccaaatcttcttcctcttcctccgtcttacctagatccttcgtcaatttccgcgctttgaatgcaaagctttcctcttctcagctttctcttcgttataaccaacgatcaataccttccctctctgtgaggtgttcagtgtctggtggaaatggaactgctggaaagagaacgactcttcatgatctatatgagaaggaaggtcagagtccttggtatgataatctttgccgtccagtcacagatcttctcccgttgattgctcgtggtgttagaggtgttactagcaaccctgcgatcttccaaaaagccatttccacttcaaatgcttataatgatcaattcaggacacttgtggaatcgggaaaggacattgaaagtgcgtattgggaacttgtggtgaaggatattcaggatgcctgcaaactttttgagccaatctatgaccagacagaaggtgcggatggctatgtctctgttgaagtttcacctaggcttgctgatgatacccaaggaactgttgaagctgctaaatatcttagcaaggttgtcaaccgtcgtaatgtctacattaagattcctgctactgctccatgcattccttccatcagggatgtcattgcagctggaataagtgtcaatgtcacgcttatattctcaatcgccagatatgaagcagtgatcgatgcatatttggatggcctcgaggcgtctggacttgatgacctctcaagagttaccagtgttgcttccttctttgtcagtcgggtggatactctcatggacaagatgcttgagcaaattggtacccctgaagccttagatctccgtgggaaggcggctgtggctcaagctgcattagcatacaagctataccagcagaaattctctggcccaagatgggaagctctggtaaagaaaggtgccaagaaacagagacttctctgggcatcaacaagtgtaaagaacccagcttactctgacaccttatatgtcgctcctctcatcggacctgacactgtatcaaccatgccggatcaagccctggaagcattcgcagatcatggaatagtgaagaggacaatagatgcgaatgtgtcagaagcagaagggatttacagtgcactagagaagctgggaatagactggaacaaagtaggagaacagttggaagacgaaggagtagattccttcaagaagagtttcgagagtctgctcggtacactgcaagacaaggccaacactctcaaactagccagccattgaggaaatgagtcatcattatgtttttggttacgctaaaataaaaagaagaacctttggcttttgttcttcaatccttatgcatgctttctaaagtggttatgatggattttgcttgatgttccacattatgggttattctattttctttgttcttgtaagatgatgcttcagaagagtttgttactttttaccgtatttgtaatttacattttcactgaaaacaattggcgagtaaaaaagtgtccttgtcttcttctttgttcggattatatgaacaattgttcct

SEQ ID NO: 21905 - protein, 438 aa, Arabidopsis thaliana
  peptide (1)..(438): Ceres Seq. ID no. 12321265
  misc_feature (87)..(426): Pfam Name: Transaldolase Pfam Description: Transaldolase
  misc_feature (87)..(426): Pfam Name: Transaldolase Pfam Description: Transaldolase
  misc_feature (77)..(433): Homolog of NCBI NO: 37522946 NR Description: transaldolase [Gloeobacter violaceus]
  misc_feature (84)..(423): Homolog of NCBI NO: 29828309 NR Description: putative transaldolase [Streptomyces avermitilis
  misc_feature (84)..(433): Homolog of NCBI NO: 21220422 NR Description: putative transaldolase [Streptomyces coelicolor
  misc_feature (83)..(433): Homolog of NCBI NO: 29832856 NR Description: putative transaldolase [Streptomyces avermitilis
  misc_feature (59)..(117): Homolog of NCBI NO: 34907042 NR Description: putative transaldolase [Oryza sativa (japonica
  misc_feature (77)..(433): Homolog of NCBI NO: 37522946 NR Description: transaldolase [Gloeobacter violaceus]
  misc_feature (84)..(433): Homolog of NCBI NO: 21220422 NR Description: putative transaldolase [Streptomyces coelicolor
  misc_feature (59)..(117): Homolog of NCBI NO: 34907042 NR Description: putative transaldolase [Oryza sativa (japonica
  misc_feature (1)..(438): Homolog of NCBI NO: 15240625 NR Description: transaldolase - like protein
  misc_feature (1)..(437): Homolog of NCBI NO: 7489279 NR Description: transaldolase (EC 2.2.1.2) - potato
  misc_feature (1)..(437): Homolog of NCBI NO: 10441272 NR Description: transaldolase [Lycopersicon esculentum]
  misc_feature (1)..(437): Homolog of NCBI NO: 32481059 NR Description: transaldolase [Lycopersicon esculentum]
  misc_feature (117)..(434): Homolog of NCBI NO: 34907042 NR Description: putative transaldolase [Oryza sativa (japonica
  misc_feature (83)..(433): Homolog of NCBI NO: 29832856 NR Description: putative transaldolase [Streptomyces avermitilis
  misc_feature (84)..(423): Homolog of NCBI NO: 29828309 NR Description: putative transaldolase [Streptomyces avermitilis
  misc_feature (117)..(434): Homolog of NCBI NO: 34907042 NR Description: putative transaldolase [Oryza sativa (japonica
  misc_feature (1)..(437): Homolog of NCBI NO: 32481059 NR Description: transaldolase [Lycopersicon esculentum]
  misc_feature (1)..(437): Homolog of NCBI NO: 10441272 NR Description: transaldolase [Lycopersicon esculentum]
  misc_feature (1)..(437): Homolog of NCBI NO: 7489279 NR Description: transaldolase (EC 2.2.1.2) - potato
  misc_feature (1)..(438): Homolog of NCBI NO: 15240625 NR Description: transaldolase - like protein
MATISNLANLPRATCVDSKSSSSSSVLPRSFVNFRALNAKLSSSQLSLRYNQRSIPSLSVRCSVSGGNGTAGKRTTLHDLYEKEGQSPWYDNLCRPVTDLLPLIARGVRGVTSNPAIFQKAISTSNAYNDQFRTLVESGKDIESAYWELVVKDIQDACKLFEPIYDQTEGADGYVSVEVSPRLADDTQGTVEAAKYLSKVVNRRNVYIKIPATAPCIPSIRDVIAAGISVNVTLIFSIARYEAVIDAYLDGLEASGLDDLSRVTSVASFFVSRVDTLMDKMLEQIGTPEALDLRGKAAVAQAALAYKLYQQKFSGPRWEALVKKGAKKQRLLWASTSVKNPAYSDTLYVAPLIGPDTVSTMPDQALEAFADHGIVKRTIDANVSEAEGIYSALEKLGIDWNKVGEQLEDEGVDSFKKSFESLLGTLQDKANTLKLASH

SEQ ID NO: 21906 - DNA, 2204 bp, Arabidopsis thaliana
  misc_feature (1)..(2204): Ceres Seq. ID no. 12324801
  misc_feature: MA Experiment ID: 108434 Result: Up-regulated in Transcription
  misc_feature: MA Experiment 108434 PARAMETER Experiment Name: At_Root_Tips_cDNA_P Parameter: Tissue Value: Root Tips
  misc_feature: MA Experiment ID: 108576 Result: Down-regulated in Transcription
  misc_feature: MA Experiment 108576 PARAMETER Experiment Name: At_42deg_Heat_cDNA_P Parameter: Temperature (deg C) Value: 42 vs. 22
  misc_feature: MA Experiment 108576 PARAMETER Experiment Name: At_42deg_Heat_cDNA_P Parameter: Timepoint (hr) Value: 1
  misc_feature: MA Experiment 108576 PARAMETER Experiment Name: At_42deg_Heat_cDNA_P Parameter: Tissue Value: Aerial
  misc_feature: MA Experiment ID: 108577 Result: Down-regulated in Transcription
  misc_feature: MA Experiment 108577 PARAMETER Experiment Name: At_42deg_Heat_cDNA_P Parameter: Temperature (deg C) Value: 42 vs. 22
  misc_feature: MA Experiment 108577 PARAMETER Experiment Name: At_42deg_Heat_cDNA_P Parameter: Timepoint (hr) Value: 6
  misc_feature: MA Experiment 108577 PARAMETER Experiment Name: At_42deg_Heat_cDNA_P Parameter: Tissue Value: Aerial
  misc_feature: MA Experiment ID: 108585 Result: Down-regulated in Transcription
  misc_feature: MA Experiment 108585 PARAMETER Experiment Name: At_5mM_NaNP_cDNA_P Parameter: Timepoint (hr) Value: 6
  misc_feature: MA Experiment 108585 PARAMETER Experiment Name: At_5mM_NaNP_cDNA_P Parameter: Tissue Value: Aerial
  misc_feature: MA Experiment 108585 PARAMETER Experiment Name: At_5mM_NaNP_cDNA_P Parameter: Treatment Value: null
  misc_feature: MA Experiment ID: 108595 Result: Down-regulated in Transcription
  misc_feature: MA Experiment 108595 PARAMETER Experiment Name: At_Ler-pi_Ovule_cDNA_P Parameter: Plant Line Value: null
  misc_feature: MA Experiment ID: 20000087 Result: Down-regulated in Transcription
  misc_feature: MA Experiment 20000087 PARAMETER Experiment Name: At_100uM_ABA_Mutants_cDNA_P Parameter: Plant Line Value: WS
  misc_feature: MA Experiment 20000087 PARAMETER Experiment Name: At_100uM_ABA_Mutants_cDNA_P Parameter: Timepoint (hr) Value: 6
  misc_feature: MA Experiment 20000087 PARAMETER Experiment Name: At_100uM_ABA_Mutants_cDNA_P Parameter: Tissue Value: Aerial
  misc_feature: MA Experiment 20000087 PARAMETER Experiment Name: At_100uM_ABA_Mutants_cDNA_P Parameter: Treatment Value: 100uM ABA vs. No Treatment
  misc_feature: MA Experiment ID: 20000111 Result: Down-regulated in Transcription
  misc_feature: MA Experiment 20000111 PARAMETER Experiment Name: At_42deg_Heat_cDNA_P Parameter: Temperature (deg C) Value: 42 vs. 22
  misc_feature: MA Experiment 20000111 PARAMETER Experiment Name: At_42deg_Heat_cDNA_P Parameter: Timepoint (hr) Value: 6
  misc_feature: MA Experiment 20000111 PARAMETER Experiment Name: At_42deg_Heat_cDNA_P Parameter: Tissue Value: Aerial
  misc_feature: MA Experiment ID: 20000113 Result: Down-regulated in Transcription
  misc_feature: MA Experiment 20000113 PARAMETER Experiment Name: At_42deg_Heat_cDNA_P Parameter: Temperature (deg C) Value: 42 vs. 22
  misc_feature: MA Experiment 20000113 PARAMETER Experiment Name: At_42deg_Heat_cDNA_P Parameter: Timepoint (hr) Value: 8
  misc_feature: MA Experiment 20000113 PARAMETER Experiment Name: At_42deg_Heat_cDNA_P Parameter: Tissue Value: Aerial
  misc_feature: MA Experiment ID: 20000144 Result: Down-regulated in Transcription
  misc_feature: MA Experiment 20000144 PARAMETER Experiment Name: At_42deg_Heat_cDNA_P Parameter: Temperature (deg C) Value: 42 vs. 22
  misc_feature: MA Experiment 20000144 PARAMETER Experiment Name: At_42deg_Heat_cDNA_P Parameter: Timepoint (hr) Value: 1
  misc_feature: MA Experiment 20000144 PARAMETER Experiment Name: At_42deg_Heat_cDNA_P Parameter: Tissue Value: Aerial
gtcaaccaaaaaagagcttttgcgaactcttcttatcctttcaatttaacagagtcatcagcttgaagacgaaagcctttctaattccaatcttcttcacttgtatgacacgttcgtctactcttgcgcttggtcggttttcttaggatttttgcacaagaatgatcaacgcatgattcggattccaggatagagaatccatggctactttcaatgttctttgtagcaatcgatttagattcaatggaggttattctccggagaaatttaatagaaaggtgtcttcgaggagtagtgagcttaatgtttgtgtctctagaatcaggactcaatcgtttagttgcaggagacttggtgggtttatggaaattggtgaaaccagattaggggttattagagttcatggcgattctcgtaatagattttcttgtaatagcgagattaagcgacttgtgactggtgattacggagataaggagactcgtattggtgaaaatggtagaaacaaagggaagagaagaaggttttctcttaggcttcgacctagattacgattagtgagaatgagacttggcagatttgatttcagagcatcaatggaagattttcgatattttttgaaaaagaatctcaaaagagtgatcttgtccaccggtgtggctttaatctttggactgtgttatttgttcttgaggttaactgctgttccgtccccatccattgttccttactcagatttcgttacgaatcttcgaggtggttctgtttcaaaggttttgctcgaagaaggctcacgtcgaatctattacaacactgatgagaatgttgaggttgttgatgatgttcacaagtctgaaactttagaagatccggcaatccaaattgatggcggcacagtgacagaagctgttacgaaagacgatactccgcgaaaggttcgagctttgcctcctgtgtggaagtatgtgacaagaaaagtcgatcatgatgagaagtttcttcttagtttaatgagagagaaaggcattacttatagttcagctcctcaatccgcattgatgtcaatgagaactactttgataacaatcatctctctgtggattcctttgacacctcttatgtggcttctttatcggcaactctcagcatctaacagccctgcgaagaaacgacggtctaaaaatcccactgttggcttcgatgatgttgagggtgttgattctgctaaagacgagctcgtggagatagtctcatgtcttcaaggaagtataaactacaaaaaactaggagcaagattaccgagaggtgtgcttttggtcggtccaccagggaccggtaaaaccttgttggctcgggctgtagctggagaagcgggagttccatttttctctgtctccgctagtgagtttgttgaattgtttgttggaagaggcgcagcgcgaatcagagatcttttcaatgcagcaaggaaaaactcaccttccattatattcattgatgagcttgatgcggttggaggaaaacgcggtaggagtttcaacgatgaacgtgaccagacgttaaaccagttgcttactgagatggatggattcgagtcagacacgaaagtcattgtaattgcagcaactaaccgaccagaagcgttagactcggctctttgtcggcctggaaggttctctagaaaagttttggttgcagaaccagaccaagaaggccgtcggaaaatcttggccatacatctgagagacgttcctttagaagaagatgcatttctcatatgtgatctggttgcttctttaactcccggatttgtaggtgctgatctcgccaatattgtcaatgaagctgcattgcttgctgctcgtagaggcggagaagcggtggcacgggaagatataatggaagctatagagagagcgaagttcgggatcaatgataaggaagcgaggccaaggacgttaggaaatgaactcagcaagatgttcccatggatgccatctttggctagaagaaacggaccagatcaagacggtttacaaggaccgttaggttatcaaactctcagctaaaccaaaccaagacagaccggttagagagcaaatccattgataccaagtttctttgtatctgaaatttttggaaatgtacgtttttttgtgtgtttacattgcaaagtcaattgctttttggttcgtagtaccttc

SEQ ID NO: 21907 - protein, 622 aa, Arabidopsis thaliana
  peptide (1)..(622): Ceres Seq. ID no. 12324802
  misc_feature (369)..(555): Pfam Name: ATPase family associated with various cellular Pfam Description: ATPase family associated with various cellular
  misc_feature (271)..(594): Homolog of NCBI NO: 22298071 NR Description: cell division protein [Thermosynechococcus
  misc_feature (186)..(581): Homolog of NCBI NO: 33860785 NR Description: cell division protein FtsH2
  misc_feature (168)..(577): Homolog of NCBI NO: 16329797 NR Description: cell division protein; FtsH [Synechocystis sp.
  misc_feature (267)..(583): Homolog of NCBI NO: 23124397 NR Description: hypothetical protein [Nostoc punctiforme]
  misc_feature (228)..(577): Homolog of NCBI NO: 37522147 NR Description: cell division protein [Gloeobacter violaceus]
  misc_feature (264)..(613): Homolog of NCBI NO: 33864065 NR Description: cell division protein FtsH2
  misc_feature (267)..(590): Homolog of NCBI NO: 37522710 NR Description: cell division protein [Gloeobacter violaceus]
  misc_feature (228)..(593): Homolog of NCBI NO: 17232428 NR Description: cell division protein [Nostoc sp. PCC 7120]
  misc_feature (254)..(580): Homolog of NCBI NO: 30248910 NR Description: ftsH; cell division protein [Nitrosomonas
  misc_feature (91)..(622): Homolog of NCBI NO: 38606517 NR Description: OSJNBa0016O02.1 [Oryza sativa (japonica
MATFNVLCSNRFRFNGGYSPEKFNRKVSSRSSELNVCVSRIRTQSFSCRRLGGFMEIGETRLGVIRVHGDSRNRFSCNSEIKRLVTGDYGDKETRIGENGRNKGKRRRFSLRLRPRLRLVRMRLGRFDFRASMEDFRYFLKKNLKRVILSTGVALIFGLCYLFLRLTAVPSPSIVPYSDFVTNLRGGSVSKVLLEEGSRRIYYNTDENVEVVDDVHKSETLEDPAIQIDGGTVTEAVTKDDTPRKVRALPPVWKYVTRKVDHDEKFLLSLMREKGITYSSAPQSALMSMRTTLITIISLWIPLTPLMWLLYRQLSASNSPAKKRRSKNPTVGFDDVEGVDSAKDELVEIVSCLQGSINYKKLGARLPRGVLLVGPPGTGKTLLARAVAGEAGVPFFSVSASEFVELFVGRGAARIRDLFNAARKNSPSIIFIDELDAVGGKRGRSFNDERDQTLNQLLTEMDGFESDTKVIVIAATNRPEALDSALCRPGRFSRKVLVAEPDQEGRRKILAIHLRDVPLEEDAFLICDLVASLTPGFVGADLANIVNEAALLAARRGGEAVAREDIMEAIERAKFGINDKEARPRTLGNELSKMFPWMPSLARRNGPDQDGLQGPLGYQTLS

SEQ ID NO: 21908 - protein, 568 aa, Arabidopsis thaliana
  peptide (1)..(568): Ceres Seq. ID no. 12324803
  misc_feature (315)..(501): Pfam Name: ATPase family associated with various cellular Pfam Description: ATPase family associated with various cellular
  misc_feature (174)..(523): Homolog of NCBI NO: 37522147 NR Description: cell division protein [Gloeobacter violaceus]
  misc_feature (210)..(559): Homolog of NCBI NO: 33864065 NR Description: cell division protein FtsH2
  misc_feature (217)..(540): Homolog of NCBI NO: 22298071 NR Description: cell division protein [Thermosynechococcus
  misc_feature (132)..(527): Homolog of NCBI NO: 33860785 NR Description: cell division protein FtsH2
  misc_feature (114)..(523): Homolog of NCBI NO: 16329797 NR Description: cell division protein; FtsH [Synechocystis sp.
  misc_feature (213)..(529): Homolog of NCBI NO: 23124397 NR Description: hypothetical protein [Nostoc punctiforme]
  misc_feature (213)..(536): Homolog of NCBI NO: 37522710 NR Description: cell division protein [Gloeobacter violaceus]
  misc_feature (174)..(539): Homolog of NCBI NO: 17232428 NR Description: cell division protein [Nostoc sp. PCC 7120]
  misc_feature (200)..(526): Homolog of NCBI NO: 30248910 NR Description: ftsH; cell division protein [Nitrosomonas
  misc_feature (37)..(568): Homolog of NCBI NO: 38606517 NR Description: OSJNBa0016O02.1 [Oryza sativa (japonica
MEIGETRLGVIRVHGDSRNRFSCNSEIKRLVTGDYGDKETRIGENGRNKGKRRRFSLRLRPRLRLVRMRLGRFDFRASMEDFRYFLKKNLKRVILSTGVALIFGLCYLFLRLTAVPSPSIVPYSDFVTNLRGGSVSKVLLEEGSRRIYYNTDENVEVVDDVHKSETLEDPAIQIDGGTVTEAVTKDDTPRKVRALPPVWKYVTRKVDHDEKFLLSLMREKGITYSSAPQSALMSMRTTLITIISLWIPLTPLMWLLYRQLSASNSPAKKRRSKNPTVGFDDVEGVDSAKDELVEIVSCLQGSINYKKLGARLPRGVLLVGPPGTGKTLLARAVAGEAGVPFFSVSASEFVELFVGRGAARIRDLFNAARKNSPSIIFIDELDAVGGKRGRSFNDERDQTLNQLLTEMDGFESDTKVIVIAATNRPEALDSALCRPGRFSRKVLVAEPDQEGRRKILAIHLRDVPLEEDAFLICDLVASLTPGFVGADLANIVNEAALLAARRGGEAVAREDIMEAIERAKFGINDKEARPRTLGNELSKMFPWMPSLARRNGPDQDGLQGPLGYQTLS

SEQ ID NO: 21909 - protein, 501 aa, Arabidopsis thaliana
  peptide (1)..(501): Ceres Seq. ID no. 12324804
  misc_feature (248)..(434): Pfam Name: ATPase family associated with various cellular Pfam Description: ATPase family associated with various cellular
  misc_feature (107)..(456): Homolog of NCBI NO: 37522147 NR Description: cell division protein [Gloeobacter violaceus]
  misc_feature (143)..(492): Homolog of NCBI NO: 33864065 NR Description: cell division protein FtsH2
  misc_feature (150)..(473): Homolog of NCBI NO: 22298071 NR Description: cell division protein [Thermosynechococcus
  misc_feature (65)..(460): Homolog of NCBI NO: 33860785 NR Description: cell division protein FtsH2
  misc_feature (47)..(456): Homolog of NCBI NO: 16329797 NR Description: cell division protein; FtsH [Synechocystis sp.
  misc_feature (146)..(462): Homolog of NCBI NO: 23124397 NR Description: hypothetical protein [Nostoc punctiforme]
  misc_feature (146)..(469): Homolog of NCBI NO: 37522710 NR Description: cell division protein [Gloeobacter violaceus]
  misc_feature (107)..(472): Homolog of NCBI NO: 17232428 NR Description: cell division protein [Nostoc sp. PCC 7120]
  misc_feature (133)..(459): Homolog of NCBI NO: 30248910 NR Description: ftsH; cell division protein [Nitrosomonas
  misc_feature (1)..(501): Homolog of NCBI NO: 38606517 NR Description: OSJNBa0016O02.1 [Oryza sativa (japonica
MRLGRFDFRASMEDFRYFLKKNLKRVILSTGVALIFGLCYLFLRLTAVPSPSIVPYSDFVTNLRGGSVSKVLLEEGSRRIYYNTDENVEVVDDVHKSETLEDPAIQIDGGTVTEAVTKDDTPRKVRALPPVWKYVTRKVDHDEKFLLSLMREKGITYSSAPQSALMSMRTTLITIISLWIPLTPLMWLLYRQLSASNSPAKKRRSKNPTVGFDDVEGVDSAKDELVEIVSCLQGSINYKKLGARLPRGVLLVGPPGTGKTLLARAVAGEAGVPFFSVSASEFVELFVGRGAARIRDLFNAARKNSPSIIFIDELDAVGGKRGRSFNDERDQTLNQLLTEMDGFESDTKVIVIAATNRPEALDSALCRPGRFSRKVLVAEPDQEGRRKILAIHLRDVPLEEDAFLICDLVASLTPGFVGADLANIVNEAALLAARRGGEAVAREDIMEAIERAKFGINDKEARPRTLGNELSKMFPWMPSLARRNGPDQDGLQGPLGYQTLS

SEQ ID NO: 21910 - DNA, 1576 bp, Arabidopsis thaliana
  misc_feature (1)..(1576): Ceres Seq. ID no. 12357547
  misc_feature: MA Experiment ID: 108434 Result: Up-regulated in Transcription
  misc_feature: MA Experiment 108434 PARAMETER Experiment Name: At_Root_Tips_cDNA_P Parameter: Tissue Value: Root Tips
  misc_feature: MA Experiment ID: 108461 Result: Down-regulated in Transcription
  misc_feature: MA Experiment 108461 PARAMETER Experiment Name: At_Germinating_Seeds_cDNA_P Parameter: Age (day) Value: 1 vs. 0
  misc_feature: MA Experiment 108461 PARAMETER Experiment Name: At_Germinating_Seeds_cDNA_P Parameter: Tissue Value: Germinating Seeds
  misc_feature: MA Experiment ID: 108462 Result: Down-regulated in Transcription
  misc_feature: MA Experiment 108462 PARAMETER Experiment Name: At_Germinating_Seeds_cDNA_P Parameter: Age (day) Value: 2 vs. 0
  misc_feature: MA Experiment 108462 PARAMETER Experiment Name: At_Germinating_Seeds_cDNA_P Parameter: Tissue Value: Germinating Seeds
  misc_feature: MA Experiment ID: 108463 Result: Down-regulated in Transcription
  misc_feature: MA Experiment 108463 PARAMETER Experiment Name: At_Germinating_Seeds_cDNA_P Parameter: Age (day) Value: 3 vs. 0
  misc_feature: MA Experiment 108463 PARAMETER Experiment Name: At_Germinating_Seeds_cDNA_P Parameter: Tissue Value: Germinating Seeds
  misc_feature: MA Experiment ID: 20000180 Result: Down-regulated in Transcription
  misc_feature: MA Experiment 20000180 PARAMETER Experiment Name: At_Germinating_Seeds_P Parameter: Age (hr) Value: 24 vs. 0
  misc_feature: MA Experiment 20000180 PARAMETER Experiment Name: At_Germinating_Seeds_P Parameter: Tissue Value: Germinating Seeds
ataccaattggcaaatcattagggtttatgaaattttgagtgattttcagagaagtttgaggatgactgtgtgattctacttctcgaattgaaatagatagttgggtcataatcgcatatccttgtcttctgtcatgtattctctgattcgccatggaagaagtttggtcgagttacagaaatggcgtcatttgagagttttagtgcaaaaggcgtctcctttgtccaattccttctcctctgcttctgctgcgcgtttgagtcctagagttggtcgaaaaggtaagagctttacagtctcttacctcgttgattcattgggtttacccaaaaagctcgctgaatcggtctcaaggaaggttagcttcgaggacaaggacaaccctgactctgttctgaatcttttgagaagtcatgggttcactgattctcagatctccaccatcgttacggattatccacaattgcttgtagctgatgctgagaaatcacttgctcccaagcttcagtttttgcagtctagaggagcttcaagctctgagctcactgagattgtttctacagttcctaaaatcttgggaaagagaggcaacaaaactatcagcgtattctatgatttcatcaaagaaactttacttgataagagttccaagtccgaaaagtcatgtcagccttttccacagggtaatctggagaacaagatcagaaatttatctgttttgagagaattggggatgcctcacaagttgttattccccttgctcatctcttgtgacgtacctgtcttcggtaaagaaaaatttgaagaatccctcaagaaagttgttgagatgggttttgatccatccacctcaaagtttgtggaagctttgtgcgttgttcaaagattgagcgacaaaacaatagaagataaagtcaatgcgtataaaaggttaggctttgatgtggaatatgtatggacagtgttcaagaggtggccaaactttctgacacactcggagaagaagatattgaacaccattgaaacatttctaggcctagggttcagcagagatgagtttagcgtgttaattaagcgctttcctcagggcattggattatccgcggagatggttaaaaagaagactgagtttttggtaaagaagatgaattggccactaaaggctctggtttcaaaccctgcggtgcttggatacagcctagagaagaggactgtcccaaggggtaacgtagttcaagctctcatctccaagggattgatcggaagtgaactcccttcgatatcacgtgtcttcgtatgtaccgatcaggtgttcttaaacaggtatgtcaagaggcatgaggacaagcagctggagactgagttgatggctatctatcgtgcttcatagatcacaacgcttgtcaaggattttggttttatctttgaatatctttaatttagactttagttctcaatttcatatcgatccaaactgtttgtctctctctatagattcttgaaattgtaagttttgaatccattttcagctatattactgaagttaaattccaaattctttatgaccttgttcgg

SEQ ID NO: 21911 - protein, 418 aa, Arabidopsis thaliana
  peptide (1)..(418): Ceres Seq. ID no. 12357548
  misc_feature (88)..(396): Pfam Name: mTERF Pfam Description: mTERF
  misc_feature (1)..(334): Homolog of NCBI NO: 30696656 NR Description: expressed protein [Arabidopsis thaliana]
  misc_feature (1)..(334): Homolog of NCBI NO: 26450011 NR Description: unknown protein [Arabidopsis thaliana]
  misc_feature (1)..(334): Homolog of NCBI NO: 15220660 NR Description: hypothetical protein; protein id: At1g61960.1
  misc_feature (1)..(334): Homolog of NCBI NO: 25345734 NR Description: hypothetical protein F19K23.4 [imported] -
  misc_feature (19)..(415): Homolog of NCBI NO: 15220672 NR Description: hypothetical protein; protein id: At1g62010.1
  misc_feature (1)..(415): Homolog of NCBI NO: 15220666 NR Description: hypothetical protein
  misc_feature (1)..(399): Homolog of NCBI NO: 25404361 NR Description: hypothetical protein F19K23.6 [imported] -
  misc_feature (1)..(415): Homolog of NCBI NO: 15220713 NR Description: hypothetical protein; protein id: At1g62120.1
  misc_feature (1)..(418): Homolog of NCBI NO: 15220662 NR Description: hypothetical protein; protein id: At1g61970.1
  misc_feature (1)..(418): Homolog of NCBI NO: 15220664 NR Description: hypothetical protein; protein id: At1g61980.1
MYSLIRHGRSLVELQKWRHLRVLVQKASPLSNSFSSASAARLSPRVGRKGKSFTVSYLVDSLGLPKKLAESVSRKVSFEDKDNPDSVLNLLRSHGFTDSQISTIVTDYPQLLVADAEKSLAPKLQFLQSRGASSSELTEIVSTVPKILGKRGNKTISVFYDFIKETLLDKSSKSEKSCQPFPQGNLENKIRNLSVLRELGMPHKLLFPLLISCDVPVFGKEKFEESLKKVVEMGFDPSTSKFVEALCVVQRLSDKTIEDKVNAYKRLGFDVEYVWTVFKRWPNFLTHSEKKILNTIETFLGLGFSRDEFSVLIKRFPQGIGLSAEMVKKKTEFLVKKMNWPLKALVSNPAVLGYSLEKRTVPRGNVVQALISKGLIGSELPSISRVFVCTDQVFLNRYVKRHEDKQLETELMAIYRAS

SEQ ID NO: 21912 - protein, 218 aa, Arabidopsis thaliana
  peptide (1)..(218): Ceres Seq. ID no. 12357549
  misc_feature (1)..(196): Pfam Name: mTERF Pfam Description: mTERF
  misc_feature (1)..(134): Homolog of NCBI NO: 30696656 NR Description: expressed protein [Arabidopsis thaliana]
  misc_feature (1)..(134): Homolog of NCBI NO: 26450011 NR Description: unknown protein [Arabidopsis thaliana]
  misc_feature (1)..(134): Homolog of NCBI NO: 15220660 NR Description: hypothetical protein; protein id: At1g61960.1
  misc_feature (1)..(134): Homolog of NCBI NO: 25345734 NR Description: hypothetical protein F19K23.4 [imported] -
  misc_feature (1)..(215): Homolog of NCBI NO: 15220672 NR Description: hypothetical protein; protein id: At1g62010.1
  misc_feature (1)..(215): Homolog of NCBI NO: 15220666 NR Description: hypothetical protein
  misc_feature (1)..(199): Homolog of NCBI NO: 25404361 NR Description: hypothetical protein F19K23.6 [imported] -
  misc_feature (1)..(215): Homolog of NCBI NO: 15220713 NR Description: hypothetical protein; protein id: At1g62120.1
  misc_feature (1)..(218): Homolog of NCBI NO: 15220662 NR Description: hypothetical protein; protein id: At1g61970.1
  misc_feature (1)..(218): Homolog of NCBI NO: 15220664 NR Description: hypothetical protein; protein id: At1g61980.1
MPHKLLFPLLISCDVPVFGKEKFEESLKKVVEMGFDPSTSKFVEALCVVQRLSDKTIEDKVNAYKRLGFDVEYVWTVFKRWPNFLTHSEKKILNTIETFLGLGFSRDEFSVLIKRFPQGIGLSAEMVKKKTEFLVKKMNWPLKALVSNPAVLGYSLEKRTVPRGNVVQALISKGLIGSELPSISRVFVCTDQVFLNRYVKRHEDKQLETELMAIYRAS

SEQ ID NO: 21913 - DNA, 1535 bp, Arabidopsis thaliana
  misc_feature (1)..(1535): Ceres Seq. ID no. 13486674
  misc_feature: MA Experiment ID: 20000794 Result: Up-regulated in Transcription
  misc_feature: MA Experiment 20000794 PARAMETER Experiment Name: At_Petals_P Parameter: Age (day) Value: 23-25 days
  misc_feature: MA Experiment 20000794 PARAMETER Experiment Name: At_Petals_P Parameter: Plant Line Value: WS
  misc_feature: MA Experiment 20000794 PARAMETER Experiment Name: At_Petals_P Parameter: Tissue Value: Petals vs. Whole plant
ccggctttgcaaagttgcaacctttttgggtttagtacttgaagagaatcaatctgacagcaaatagttttggcgtctttctaactcaacccatcatctctgttgcattttatcgagagaatatttgaggtggatatggcctcgacccttttctccagaactttcttggctgctagtcaccgactgattactccttctcttccgcaaaagatctttaatccagccacctttctcagtaggtcactccactctcagttaggctccgcttctacagcctataaatcaactacttgggctcgtcgagctatggcttctactggagttgagacaaaagccggttactccacatcatccgtatcaaccagtgaacctgttgtttctgttgattggcttcatgctaatcttagagagcctgatttgaagattttggatgcttcatggtatatgccggatgagcagagaaatccgatccaagaatatcaggttgctcatattccccgcgctctcttctttgatttggatggaatatcagatcgaaaaactagtttgccacatatgttgcccactgaggaagcttttgctgctggttgttctgctcttggaattgataacaaagatgaagtggttgtctatgatggaaaggggatctttagtgcagcccgtgtatggtggatgttccgagtttttggacatgaaaaagtttgggtgctcgatggaggtctaccaagatggcgtgcatcaggttatgatgttgaatctagtgcatcaggtgatgctattctgaaagccagtgccgcaagtgaggctatagagaaaatttatcaaggacaaaccgtcagtccgataacctttcagactaagttccagccacatctagtgtggacacttgatcaggtcaagaacaatatggaggatccgacttatcaacacatagacgctcgttccaaagccaggtttgatggtactgctccagaaccccgtaagggaataagaagcggtcatatacctggaagcaaatgtatcccttttcctcagatgtttgattcttgtaacacattgttaccagcagaggagctgaagaaacgatttgaccaagaagatatctcactggacaagcctattatggcctcgtgtgggactggtgtaacagcttgcatcttggcaatggggcttcaccggctggggaaaaccgacgtgccgatctatgatgggtcgtggactgaatgggcgacacaaccagacttgcccatagagagtgttgaatcttcttcatgaaagtctccaccgtaaaggctagcgacaagattacaagccacagacggaaataattatcatgtttaagttgagggatttgtttgaagttaatcataatcctggctttaaatttgcctcaaccctcaagccgaagaggactgtatctatagaacttggaacttttccttttcgtttctggattcatcttctcagataacaaaaggttgttttctgtgttttctttctaataaaatcaagaaccaggaaatttctcaacgatc

SEQ ID NO: 21914 - protein, 379 aa, Arabidopsis thaliana
  peptide (1)..(379): Ceres Seq. ID no. 13486675
  misc_feature (82)..(202): Pfam Name: Rhodanese-like domain Pfam Description: Rhodanese-like domain
  misc_feature (244)..(372): Homolog of NCBI NO: 22958331 NR Description: hypothetical protein [Rhodobacter sphaeroides]
  misc_feature (51)..(207): Homolog of NCBI NO: 22958331 NR Description: hypothetical protein [Rhodobacter sphaeroides]
  misc_feature (74)..(369): Homolog of NCBI NO: 14571545 NR Description: thiosulfate transferase [Triticum aestivum]
  misc_feature (58)..(379): Homolog of NCBI NO: 25288797 NR Description: hypothetical protein F3O9.26 [imported] -
  misc_feature (58)..(379): Homolog of NCBI NO: 18394364 NR Description: mercaptopyruvate sulfurtransferase (Mst2/Rdh2)
  misc_feature (32)..(379): Homolog of NCBI NO: 25456716 NR Description: thiosulfate sulfurtransferase (EC 2.8.1.1)
  misc_feature (33)..(379): Homolog of NCBI NO: 30684873 NR Description: mercaptopyruvate sulfurtransferase (Mst2/Rdh2)
  misc_feature (1)..(374): Homolog of NCBI NO: 4406372 NR Description: thiosulfate sulfurtransferase [Datisca glomerata]
  misc_feature (1)..(379): Homolog of NCBI NO: 25288794 NR Description: thiosulfate sulfurtransferase (EC 2.8.1.1) Mst1
  misc_feature (1)..(379): Homolog of NCBI NO: 18412307 NR Description: mercaptopyruvate sulfurtransferase (Mst1/Rdh1)
MASTLFSRTFLAASHRLITPSLPQKIFNPATFLSRSLHSQLGSASTAYKSTTWARRAMASTGVETKAGYSTSSVSTSEPVVSVDWLHANLREPDLKILDASWYMPDEQRNPIQEYQVAHIPRALFFDLDGISDRKTSLPHMLPTEEAFAAGCSALGIDNKDEVVVYDGKGIFSAARVWWMFRVFGHEKVWVLDGGLPRWRASGYDVESSASGDAILKASAASEAIEKIYQGQTVSPITFQTKFQPHLVWTLDQVKNNMEDPTYQHIDARSKARFDGTAPEPRKGIRSGHIPGSKCIPFPQMFDSCNTLLPAEELKKRFDQEDISLDKPIMASCGTGVTACILAMGLHRLGKTDVPIYDGSWTEWATQPDLPIESVESSS

SEQ ID NO: 21915 - protein, 322 aa, Arabidopsis thaliana
  peptide (1)..(322): Ceres Seq. ID no. 13486676
  misc_feature (25)..(145): Pfam Name: Rhodanese-like domain Pfam Description: Rhodanese-like domain
  misc_feature (187)..(315): Homolog of NCBI NO: 22958331 NR Description: hypothetical protein [Rhodobacter sphaeroides]
  misc_feature (1)..(150): Homolog of NCBI NO: 22958331 NR Description: hypothetical protein [Rhodobacter sphaeroides]
  misc_feature (17)..(312): Homolog of NCBI NO: 14571545 NR Description: thiosulfate transferase [Triticum aestivum]
  misc_feature (1)..(322): Homolog of NCBI NO: 25288797 NR Description: hypothetical protein F3O9.26 [imported] -
  misc_feature (1)..(322): Homolog of NCBI NO: 18394364 NR Description: mercaptopyruvate sulfurtransferase (Mst2/Rdh2)
  misc_feature (1)..(322): Homolog of NCBI NO: 25456716 NR Description: thiosulfate sulfurtransferase (EC 2.8.1.1)
  misc_feature (1)..(322): Homolog of NCBI NO: 30684873 NR Description: mercaptopyruvate sulfurtransferase (Mst2/Rdh2)
  misc_feature (1)..(317): Homolog of NCBI NO: 4406372 NR Description: thiosulfate sulfurtransferase [Datisca glomerata]
  misc_feature (1)..(322): Homolog of NCBI NO: 25288794 NR Description: thiosulfate sulfurtransferase (EC 2.8.1.1) Mst1
  misc_feature (1)..(322): Homolog of NCBI NO: 18412307 NR Description: mercaptopyruvate sulfurtransferase (Mst1/Rdh1)
MASTGVETKAGYSTSSVSTSEPVVSVDWLHANLREPDLKILDASWYMPDEQRNPIQEYQVAHIPRALFFDLDGISDRKTSLPHMLPTEEAFAAGCSALGIDNKDEVVVYDGKGIFSAARVWWMFRVFGHEKVWVLDGGLPRWRASGYDVESSASGDAILKASAASEAIEKIYQGQTVSPITFQTKFQPHLVWTLDQVKNNMEDPTYQHIDARSKARFDGTAPEPRKGIRSGHIPGSKCIPFPQMFDSCNTLLPAEELKKRFDQEDISLDKPIMASCGTGVTACILAMGLHRLGKTDVPIYDGSWTEWATQPDLPIESVESSS

SEQ ID NO: 21916 - protein, 276 aa, Arabidopsis thaliana
  peptide (1)..(276): Ceres Seq. ID no. 13486677
  misc_feature (1)..(99): Pfam Name: Rhodanese-like domain Pfam Description: Rhodanese-like domain
  misc_feature (141)..(269): Homolog of NCBI NO: 22958331 NR Description: hypothetical protein [Rhodobacter sphaeroides]
  misc_feature (1)..(104): Homolog of NCBI NO: 22958331 NR Description: hypothetical protein [Rhodobacter sphaeroides]
  misc_feature (1)..(266): Homolog of NCBI NO: 14571545 NR Description: thiosulfate transferase [Triticum aestivum]
  misc_feature (1)..(276): Homolog of NCBI NO: 25288797 NR Description: hypothetical protein F3O9.26 [imported] -
  misc_feature (1)..(276): Homolog of NCBI NO: 18394364 NR Description: mercaptopyruvate sulfurtransferase (Mst2/Rdh2)
  misc_feature (1)..(276): Homolog of NCBI NO: 25456716 NR Description: thiosulfate sulfurtransferase (EC 2.8.1.1)
  misc_feature (1)..(276): Homolog of NCBI NO: 30684873 NR Description: mercaptopyruvate sulfurtransferase (Mst2/Rdh2)
  misc_feature (1)..(271): Homolog of NCBI NO: 4406372 NR Description: thiosulfate sulfurtransferase [Datisca glomerata]
  misc_feature (1)..(276): Homolog of NCBI NO: 25288794 NR Description: thiosulfate sulfurtransferase (EC 2.8.1.1) Mst1
  misc_feature (1)..(276): Homolog of NCBI NO: 18412307 NR Description: mercaptopyruvate sulfurtransferase (Mst1/Rdh1)
MPDEQRNPIQEYQVAHIPRALFFDLDGISDRKTSLPHMLPTEEAFAAGCSALGIDNKDEVVVYDGKGIFSAARVWWMFRVFGHEKVWVLDGGLPRWRASGYDVESSASGDAILKASAASEAIEKIYQGQTVSPITFQTKFQPHLVWTLDQVKNNMEDPTYQHIDARSKARFDGTAPEPRKGIRSGHIPGSKCIPFPQMFDSCNTLLPAEELKKRFDQEDISLDKPIMASCGTGVTACILAMGLHRLGKTDVPIYDGSWTEWATQPDLPIESVESSS

SEQ ID NO: 21917 - DNA, 1303 bp, Arabidopsis thaliana
  misc_feature (1)..(1303): Ceres Seq. ID no. 13490337
  misc_feature: MA Experiment ID: 108435 Result: Up-regulated in Transcription
  misc_feature: MA Experiment 108435 PARAMETER Experiment Name: At_stm_Mutants_cDNA_P Parameter: Plant Line Value: wt Landsburg vs stm
  misc_feature: MA Experiment 108435 PARAMETER Experiment Name: At_stm_Mutants_cDNA_P Parameter: Tissue Value: Shoot Apical Meristem Region
  misc_feature: MA Experiment ID: 108462 Result: Down-regulated in Transcription
  misc_feature: MA Experiment 108462 PARAMETER Experiment Name: At_Germinating_Seeds_cDNA_P Parameter: Age (day) Value: 2 vs. 0
  misc_feature: MA Experiment 108462 PARAMETER Experiment Name: At_Germinating_Seeds_cDNA_P Parameter: Tissue Value: Germinating Seeds
  misc_feature: MA Experiment ID: 108463 Result: Down-regulated in Transcription
  misc_feature: MA Experiment 108463 PARAMETER Experiment Name: At_Germinating_Seeds_cDNA_P Parameter: Age (day) Value: 3 vs. 0
  misc_feature: MA Experiment 108463 PARAMETER Experiment Name: At_Germinating_Seeds_cDNA_P Parameter: Tissue Value: Germinating Seeds
  misc_feature: MA Experiment ID: 108464 Result: Down-regulated in Transcription
  misc_feature: MA Experiment 108464 PARAMETER Experiment Name: At_Germinating_Seeds_cDNA_P Parameter: Age (day) Value: 4 vs. 0
  misc_feature: MA Experiment 108464 PARAMETER Experiment Name: At_Germinating_Seeds_cDNA_P Parameter: Tissue Value: Germinating Seeds
  misc_feature: MA Experiment ID: 108595 Result: Down-regulated in Transcription
  misc_feature: MA Experiment 108595 PARAMETER Experiment Name: At_Ler-pi_Ovule_cDNA_P Parameter: Plant Line Value: null
  misc_feature: MA Experiment ID: 20000068 Result: Up-regulated in Transcription
  misc_feature: MA Experiment ID: 20000069 Result: Down-regulated in Transcription
  misc_feature: MA Experiment 20000069 PARAMETER Experiment Name: At_100uM_ABA_Mutants_cDNA_P Parameter: Plant Line Value: CS23
  misc_feature: MA Experiment 20000069 PARAMETER Experiment Name: At_100uM_ABA_Mutants_cDNA_P Parameter: Timepoint (hr) Value: 6
  misc_feature: MA Experiment 20000069 PARAMETER Experiment Name: At_100uM_ABA_Mutants_cDNA_P Parameter: Tissue Value: Aerial
  misc_feature: MA Experiment 20000069 PARAMETER Experiment Name: At_100uM_ABA_Mutants_cDNA_P Parameter: Treatment Value: 100uM ABA vs. No Treatment
  misc_feature: MA Experiment ID: 20000070 Result: Down-regulated in Transcription
  misc_feature: MA Experiment 20000070 PARAMETER Experiment Name: At_100uM_ABA_Mutants_cDNA_P Parameter: Plant Line Value: CS24
  misc_feature: MA Experiment 20000070 PARAMETER Experiment Name: At_100uM_ABA_Mutants_cDNA_P Parameter: Timepoint (hr) Value: 6
  misc_feature: MA Experiment 20000070 PARAMETER Experiment Name: At_100uM_ABA_Mutants_cDNA_P Parameter: Tissue Value: Aerial
  misc_feature: MA Experiment 20000070 PARAMETER Experiment Name: At_100uM_ABA_Mutants_cDNA_P Parameter: Treatment Value: 100uM ABA vs. No Treatment
  misc_feature: MA Experiment ID: 20000071 Result: Down-regulated in Transcription
  misc_feature: MA Experiment 20000071 PARAMETER Experiment Name: At_100uM_ABA_Mutants_cDNA_P Parameter: Plant Line Value: CS8104
  misc_feature: MA Experiment 20000071 PARAMETER Experiment Name: At_100uM_ABA_Mutants_cDNA_P Parameter: Timepoint (hr) Value: 6
  misc_feature: MA Experiment 20000071 PARAMETER Experiment Name: At_100uM_ABA_Mutants_cDNA_P Parameter: Tissue Value: Aerial
  misc_feature: MA Experiment 20000071 PARAMETER Experiment Name: At_100uM_ABA_Mutants_cDNA_P Parameter: Treatment Value: 100uM ABA vs. No Treatment
  misc_feature: MA Experiment ID: 20000089 Result: Down-regulated in Transcription
  misc_feature: MA Experiment ID: 20000090 Result: Down-regulated in Transcription
  misc_feature: MA Experiment ID: 20000113 Result: Up-regulated in Transcription
  misc_feature: MA Experiment 20000113 PARAMETER Experiment Name: At_42deg_Heat_cDNA_P Parameter: Temperature (deg C) Value: 42 vs. 22
  misc_feature: MA Experiment 20000113 PARAMETER Experiment Name: At_42deg_Heat_cDNA_P Parameter: Timepoint (hr) Value: 8
  misc_feature: MA Experiment 20000113 PARAMETER Experiment Name: At_42deg_Heat_cDNA_P Parameter: Tissue Value: Aerial
  misc_feature: MA Experiment ID: 20000185 Result: Down-regulated in Transcription
  misc_feature: MA Experiment 20000185 PARAMETER Experiment Name: At_Roots__P Parameter: Age (day) Value: 7 vs. 21
  misc_feature: MA Experiment 20000185 PARAMETER Experiment Name: At_Roots__P Parameter: Organism Value: A. thaliana
  misc_feature: MA Experiment 20000185 PARAMETER Experiment Name: At_Roots__P Parameter: Tissue Value: Roots vs. Whole Plant
  misc_feature: MA Experiment ID: 20000265 Result: Up-regulated in Transcription
  misc_feature: MA Experiment 20000265 PARAMETER Experiment Name: At_Open_Flower_P Parameter: Age (day) Value: 21
  misc_feature: MA Experiment 20000265 PARAMETER Experiment Name: At_Open_Flower_P Parameter: Plant Line Value: WS
  misc_feature: MA Experiment 20000265 PARAMETER Experiment Name: At_Open_Flower_P Parameter: Tissue Value: Closed Flower vs. Whole Plant
  misc_feature: MA Experiment ID: 20000286 Result: Up-regulated in Transcription
  misc_feature: MA Experiment 20000286 PARAMETER Experiment Name: At_Open_Flower_P Parameter: Age (day) Value: 21
  misc_feature: MA Experiment 20000286 PARAMETER Experiment Name: At_Open_Flower_P Parameter: Plant Line Value: WS
  misc_feature: MA Experiment 20000286 PARAMETER Experiment Name: At_Open_Flower_P Parameter: Tissue Value: Half Open vs. Whole Plant
  misc_feature: MA Experiment ID: 20000439 Result: Down-regulated in Transcription
  misc_feature: MA Experiment 20000439 PARAMETER Experiment Name: At_Roots__P Parameter: Age (day) Value: 14 vs. 21
  misc_feature: MA Experiment 20000439 PARAMETER Experiment Name: At_Roots__P Parameter: Organism Value: A. thaliana
  misc_feature: MA Experiment 20000439 PARAMETER Experiment Name: At_Roots__P Parameter: Tissue Value: Roots vs. Whole Plant
  misc_feature: MA Experiment ID: 20000495 Result: Down-regulated in Transcription
  misc_feature: MA Experiment 20000495 PARAMETER Experiment Name: At_Guard_Cells_P Parameter: Harvest Date Value: 8/2/2002
  misc_feature: MA Experiment 20000495 PARAMETER Experiment Name: At_Guard_Cells_P Parameter: Organism Value: A. thaliana
  misc_feature: MA Experiment 20000495 PARAMETER Experiment Name: At_Guard_Cells_P Parameter: Tissue Value: Guard Cells vs. Leaves
  misc_feature: MA Experiment ID: 20000573 Result: Down-regulated in Transcription
  misc_feature: MA Experiment 20000573 PARAMETER Experiment Name: At_100uM_ABA_Mutants__P Parameter: Organism Value: A. thaliana
  misc_feature: MA Experiment 20000573 PARAMETER Experiment Name: At_100uM_ABA_Mutants__P Parameter: Plant Line Value: CS22 vs. Ler wt
  misc_feature: MA Experiment 20000573 PARAMETER Experiment Name: At_100uM_ABA_Mutants__P Parameter: Timepoint (hr) Value: N/A
  misc_feature: MA Experiment 20000573 PARAMETER Experiment Name: At_100uM_ABA_Mutants__P Parameter: Tissue Value: Whole Plant
  misc_feature: MA Experiment 20000573 PARAMETER Experiment Name: At_100uM_ABA_Mutants__P Parameter: Treatment Value: None
  misc_feature: MA Experiment ID: 20000574 Result: Down-regulated in Transcription
  misc_feature: MA Experiment 20000574 PARAMETER Experiment Name: At_100uM_ABA_Mutants__P Parameter: Organism Value: A. thaliana
  misc_feature: MA Experiment 20000574 PARAMETER Experiment Name: At_100uM_ABA_Mutants__P Parameter: Plant Line Value: CS23 vs. Ler wt
  misc_feature: MA Experiment 20000574 PARAMETER Experiment Name: At_100uM_ABA_Mutants__P Parameter: Timepoint (hr) Value: N/A
  misc_feature: MA Experiment 20000574 PARAMETER Experiment Name: At_100uM_ABA_Mutants__P Parameter: Tissue Value: Whole Plant
  misc_feature: MA Experiment 20000574 PARAMETER Experiment Name: At_100uM_ABA_Mutants__P Parameter: Treatment Value: None
  misc_feature: MA Experiment ID: 20001248 Result: Down-regulated in Transcription
  misc_feature: MA Experiment 20001248 PARAMETER Experiment Name: At_Far-red-induction_P Parameter: Age (day) Value: 7
  misc_feature: MA Experiment 20001248 PARAMETER Experiment Name: At_Far-red-induction_P Parameter: Light Value: Far-red vs. White
  misc_feature: MA Experiment 20001248 PARAMETER Experiment Name: At_Far-red-induction_P Parameter: Organism Value: A. thaliana
  misc_feature: MA Experiment 20001248 PARAMETER Experiment Name: At_Far-red-induction_P Parameter: Plant Line Value: Columbia
  misc_feature: MA Experiment 20001248 PARAMETER Experiment Name: At_Far-red-induction_P Parameter: Timepoint (hr) Value: 4
  misc_feature: MA Experiment 20001248 PARAMETER Experiment Name: At_Far-red-induction_P Parameter: Tissue Value: Whole Plant
  misc_feature: MA Experiment ID: 20001557 Result: Down-regulated in Transcription
  misc_feature: MA Experiment 20001557 PARAMETER Experiment Name: At_Drought_Soil_Dry_P Parameter: Age (day) Value: 27
  misc_feature: MA Experiment 20001557 PARAMETER Experiment Name: At_Drought_Soil_Dry_P Parameter: Organism Value: A. thaliana
  misc_feature: MA Experiment 20001557 PARAMETER Experiment Name: At_Drought_Soil_Dry_P Parameter: Plant Line Value: WS
  misc_feature: MA Experiment 20001557 PARAMETER Experiment Name: At_Drought_Soil_Dry_P Parameter: Post Timepoint (hr) Value: 3
  misc_feature: MA Experiment 20001557 PARAMETER Experiment Name: At_Drought_Soil_Dry_P Parameter: Post-Treatment Value: Re-Water vs. No Drought
  misc_feature: MA Experiment 20001557 PARAMETER Experiment Name: At_Drought_Soil_Dry_P Parameter: Timepoint (day) Value: 13
  misc_feature: MA Experiment 20001557 PARAMETER Experiment Name: At_Drought_Soil_Dry_P Parameter: Treatment Value: Drought vs. No Drought
  misc_feature: MA Experiment ID: 20001558 Result: Down-regulated in Transcription
  misc_feature: MA Experiment 20001558 PARAMETER Experiment Name: At_Drought_Soil_Dry_P Parameter: Age (day) Value: 27
  misc_feature: MA Experiment 20001558 PARAMETER Experiment Name: At_Drought_Soil_Dry_P Parameter: Organism Value: A. thaliana
  misc_feature: MA Experiment 20001558 PARAMETER Experiment Name: At_Drought_Soil_Dry_P Parameter: Plant Line Value: WS
  misc_feature: MA Experiment 20001558 PARAMETER Experiment Name: At_Drought_Soil_Dry_P Parameter: Post Timepoint (hr) Value: 6
  misc_feature: MA Experiment 20001558 PARAMETER Experiment Name: At_Drought_Soil_Dry_P Parameter: Post-Treatment Value: Re-Water vs. No Drought
  misc_feature: MA Experiment 20001558 PARAMETER Experiment Name: At_Drought_Soil_Dry_P Parameter: Timepoint (day) Value: 13
  misc_feature: MA Experiment 20001558 PARAMETER Experiment Name: At_Drought_Soil_Dry_P Parameter: Treatment Value: Drought vs. No Drought
  misc_feature: MA Experiment ID: 20001560 Result: Down-regulated in Transcription
  misc_feature: MA Experiment 20001560 PARAMETER Experiment Name: At_Drought_Soil_Dry_P Parameter: Age (day) Value: 28
  misc_feature: MA Experiment 20001560 PARAMETER Experiment Name: At_Drought_Soil_Dry_P Parameter: Organism Value: A. thaliana
  misc_feature: MA Experiment 20001560 PARAMETER Experiment Name: At_Drought_Soil_Dry_P Parameter: Plant Line Value: WS
  misc_feature: MA Experiment 20001560 PARAMETER Experiment Name: At_Drought_Soil_Dry_P Parameter: Post Timepoint (hr) Value: None
  misc_feature: MA Experiment 20001560 PARAMETER Experiment Name: At_Drought_Soil_Dry_P Parameter: Post-Treatment Value: None
  misc_feature: MA Experiment 20001560 PARAMETER Experiment Name: At_Drought_Soil_Dry_P Parameter: Timepoint (day) Value: 14
  misc_feature: MA Experiment 20001560 PARAMETER Experiment Name: At_Drought_Soil_Dry_P Parameter: Treatment Value: Drought vs. No Drought
tgactgtaacaataatcaaataatccctgacttcgtcacgtttctttgtatctccaacgtccaataaatgaaagcaactctagcagcaccctcttctctcacaagcctcccttatcgaaccaactcttctttcggctcaaagtcatcgcttctctttcggtctccatcctcctcctcctcagtctctatgacgacaacgcgtggaaacgtggctgtggcggctgctgctacatccactgaggcgctaagaaaaggaatagcggagttctacaatgaaacttcgggtttgtgggaagagatttggggagatcatatgcatcatggcttttatgaccctgattcttctgttcaactttctgattctggtcacaaggaagctcagatccgtatgattgaagagtctctccgttttgccggtgttactgatgaagaggaggagaaaaagataaagaaagtagtggatgttgggtgtgggattggaggaagctcaagatatcttgcctctaaatttggagctgaatgcattggcattactctcagccctgttcaggccaagagagccaatgatctcgcggctgctcaatcactcgctcataaggcttccttccaagttgcggatgcgttggatcagccattcgaagatggaaaattcgatctagtgtggtcgatggagagtggtgagcatatgcctgacaaggccaagtttgtaaaagagttggtacgtgtggcggctccaggaggtaggataataatagtgacatggtgccatagaaatctatctgcgggggaggaagctttgcagccgtgggagcaaaacatcttggacaaaatctgtaagacgttctatctcccggcttggtgctccaccgatgattatgtcaacttgcttcaatcccattctctccaggatattaagtgtgcggattggtcagagaacgtagctcctttctggcctgcggttatacggactgcattaacatggaagggccttgtgtctctgcttcgtagtggtatgaaaagtattaaaggagcattgacaatgccattgatgattgaaggttacaagaaaggtgtcattaagtttggtatcatcacttgccagaagccactctaagtctaaagctatactaggagattgaataagactataagagtagtgtctcatgtgaaagcatgaaattccttaaaaacgtcaatgttaagcctatgcttcgttatttgttttagataaatatcatttcactcttgtctaaggtagtttctataaacaataaataccatgaattagctcatgttatctggt

SEQ ID NO: 21918 - protein, 348 aa, Arabidopsis thaliana
  peptide (1)..(348): Ceres Seq. ID no. 13490338
  misc_feature (7)..(347): Homolog of NCBI NO: 17224292 NR Description: gamma-tocopherol methyltransferase [Perilla
  misc_feature (1)..(348): Homolog of NCBI NO: 27448218 NR Description: gamma-tocopherol methyltransferase [Brassica
  misc_feature (1)..(348): Homolog of NCBI NO: 21592747 NR Description: gamma-tocopherol methyltransferase [Arabidopsis
  misc_feature (1)..(348): Homolog of NCBI NO: 24211769 NR Description: Tocopherol O-methyltransferase, chloroplast
  misc_feature (1)..(348): Homolog of NCBI NO: 15217804 NR Description: gamma-tocopherol methyltransferase [Arabidopsis
  misc_feature (48)..(348): Homolog of NCBI NO: 16331764 NR Description: delta(24)-sterol C-methyltransferase
  misc_feature (60)..(346): Homolog of NCBI NO: 17229295 NR Description: gamma-tocopherol methyltransferase [Nostoc sp.
  misc_feature (60)..(346): Homolog of NCBI NO: 23128517 NR Description: hypothetical protein [Nostoc punctiforme]
  misc_feature (57)..(348): Homolog of NCBI NO: 23039419 NR Description: hypothetical protein [Trichodesmium erythraeum
  misc_feature (48)..(347): Homolog of NCBI NO: 22208517 NR Description: putative gamma-tocopherol methyltransferase
MKATLAAPSSLTSLPYRTNSSFGSKSSLLFRSPSSSSSVSMTTTRGNVAVAAAATSTEALRKGIAEFYNETSGLWEEIWGDHMHHGFYDPDSSVQLSDSGHKEAQIRMIEESLRFAGVTDEEEEKKIKKVVDVGCGIGGSSRYLASKFGAECIGITLSPVQAKRANDLAAAQSLAHKASFQVADALDQPFEDGKFDLVWSMESGEHMPDKAKFVKELVRVAAPGGRIIIVTWCHRNLSAGEEALQPWEQNILDKICKTFYLPAWCSTDDYVNLLQSHSLQDIKCADWSENVAPFWPAVIRTALTWKGLVSLLRSGMKSIKGALTMPLMIEGYKKGVIKFGIITCQKPL

SEQ ID NO: 21919 - protein, 308 aa, Arabidopsis thaliana
  peptide (1)..(308): Ceres Seq. ID no. 13490339
  misc_feature (8)..(308): Homolog of NCBI NO: 16331764 NR Description: delta(24)-sterol C-methyltransferase
  misc_feature (20)..(306): Homolog of NCBI NO: 17229295 NR Description: gamma-tocopherol methyltransferase [Nostoc sp.
  misc_feature (20)..(306): Homolog of NCBI NO: 23128517 NR Description: hypothetical protein [Nostoc punctiforme]
  misc_feature (17)..(308): Homolog of NCBI NO: 23039419 NR Description: hypothetical protein [Trichodesmium erythraeum
  misc_feature (8)..(307): Homolog of NCBI NO: 22208517 NR Description: putative gamma-tocopherol methyltransferase
  misc_feature (1)..(307): Homolog of NCBI NO: 17224292 NR Description: gamma-tocopherol methyltransferase [Perilla
  misc_feature (1)..(308): Homolog of NCBI NO: 27448218 NR Description: gamma-tocopherol methyltransferase [Brassica
  misc_feature (1)..(308): Homolog of NCBI NO: 21592747 NR Description: gamma-tocopherol methyltransferase [Arabidopsis
  misc_feature (1)..(308): Homolog of NCBI NO: 24211769 NR Description: Tocopherol O-methyltransferase, chloroplast
  misc_feature (1)..(308): Homolog of NCBI NO: 15217804 NR Description: gamma-tocopherol methyltransferase [Arabidopsis
MTTTRGNVAVAAAATSTEALRKGIAEFYNETSGLWEEIWGDHMHHGFYDPDSSVQLSDSGHKEAQIRMIEESLRFAGVTDEEEEKKIKKVVDVGCGIGGSSRYLASKFGAECIGITLSPVQAKRANDLAAAQSLAHKASFQVADALDQPFEDGKFDLVWSMESGEHMPDKAKFVKELVRVAAPGGRIIIVTWCHRNLSAGEEALQPWEQNILDKICKTFYLPAWCSTDDYVNLLQSHSLQDIKCADWSENVAPFWPAVIRTALTWKGLVSLLRSGMKSIKGALTMPLMIEGYKKGVIKFGIITCQKPL

SEQ ID NO: 21920 - protein, 266 aa, Arabidopsis thaliana
  peptide (1)..(266): Ceres Seq. ID no. 13490340
  misc_feature (1)..(266): Homolog of NCBI NO: 16331764 NR Description: delta(24)-sterol C-methyltransferase
  misc_feature (1)..(264): Homolog of NCBI NO: 17229295 NR Description: gamma-tocopherol methyltransferase [Nostoc sp.
  misc_feature (1)..(264): Homolog of NCBI NO: 23128517 NR Description: hypothetical protein [Nostoc punctiforme]
  misc_feature (1)..(266): Homolog of NCBI NO: 23039419 NR Description: hypothetical protein [Trichodesmium erythraeum
  misc_feature (1)..(265): Homolog of NCBI NO: 22208517 NR Description: putative gamma-tocopherol methyltransferase
  misc_feature (1)..(265): Homolog of NCBI NO: 17224292 NR Description: gamma-tocopherol methyltransferase [Perilla
  misc_feature (1)..(266): Homolog of NCBI NO: 27448218 NR Description: gamma-tocopherol methyltransferase [Brassica
  misc_feature (1)..(266): Homolog of NCBI NO: 21592747 NR Description: gamma-tocopherol methyltransferase [Arabidopsis
  misc_feature (1)..(266): Homolog of NCBI NO: 24211769 NR Description: Tocopherol O-methyltransferase, chloroplast
  misc_feature (1)..(266): Homolog of NCBI NO: 15217804 NR Description: gamma-tocopherol methyltransferase [Arabidopsis
MHHGFYDPDSSVQLSDSGHKEAQIRMIEESLRFAGVTDEEEEKKIKKVVDVGCGIGGSSRYLASKFGAECIGITLSPVQAKRANDLAAAQSLAHKASFQVADALDQPFEDGKFDLVWSMESGEHMPDKAKFVKELVRVAAPGGRIIIVTWCHRNLSAGEEALQPWEQNILDKICKTFYLPAWCSTDDYVNLLQSHSLQDIKCADWSENVAPFWPAVIRTALTWKGLVSLLRSGMKSIKGALTMPLMIEGYKKGVIKFGIITCQKPL

SEQ ID NO: 21921 - DNA, 1396 bp, Arabidopsis thaliana
  misc_feature (1)..(1396): Ceres Seq. ID no. 12328918
  misc_feature: MA Experiment ID: 108433 Result: Down-regulated in Transcription
  misc_feature: MA Experiment 108433 PARAMETER Experiment Name: At_rhl_Mutant2_cDNA_P Parameter: Age (day) Value: 7
  misc_feature: MA Experiment 108433 PARAMETER Experiment Name: At_rhl_Mutant2_cDNA_P Parameter: Organism Value: A. thaliana
  misc_feature: MA Experiment 108433 PARAMETER Experiment Name: At_rhl_Mutant2_cDNA_P Parameter: Plant Line Value: rhl Mutant vs. wt landsburg
  misc_feature: MA Experiment 108433 PARAMETER Experiment Name: At_rhl_Mutant2_cDNA_P Parameter: Tissue Value: Roots
  misc_feature: MA Experiment ID: 108434 Result: Up-regulated in Transcription
  misc_feature: MA Experiment 108434 PARAMETER Experiment Name: At_Root_Tips_cDNA_P Parameter: Tissue Value: Root Tips
  misc_feature: MA Experiment ID: 108435 Result: Up-regulated in Transcription
  misc_feature: MA Experiment 108435 PARAMETER Experiment Name: At_stm_Mutants_cDNA_P Parameter: Plant Line Value: wt Landsburg vs stm
  misc_feature: MA Experiment 108435 PARAMETER Experiment Name: At_stm_Mutants_cDNA_P Parameter: Tissue Value: Shoot Apical Meristem Region
  misc_feature: MA Experiment ID: 108576 Result: Down-regulated in Transcription
  misc_feature: MA Experiment 108576 PARAMETER Experiment Name: At_42deg_Heat_cDNA_P Parameter: Temperature (deg C) Value: 42 vs. 22
  misc_feature: MA Experiment 108576 PARAMETER Experiment Name: At_42deg_Heat_cDNA_P Parameter: Timepoint (hr) Value: 1
  misc_feature: MA Experiment 108576 PARAMETER Experiment Name: At_42deg_Heat_cDNA_P Parameter: Tissue Value: Aerial
  misc_feature: MA Experiment ID: 20000069 Result: Down-regulated in Transcription
  misc_feature: MA Experiment 20000069 PARAMETER Experiment Name: At_100uM_ABA_Mutants_cDNA_P Parameter: Plant Line Value: CS23
  misc_feature: MA Experiment 20000069 PARAMETER Experiment Name: At_100uM_ABA_Mutants_cDNA_P Parameter: Timepoint (hr) Value: 6
  misc_feature: MA Experiment 20000069 PARAMETER Experiment Name: At_100uM_ABA_Mutants_cDNA_P Parameter: Tissue Value: Aerial
  misc_feature: MA Experiment 20000069 PARAMETER Experiment Name: At_100uM_ABA_Mutants_cDNA_P Parameter: Treatment Value: 100uM ABA vs. No Treatment
  misc_feature: MA Experiment ID: 20000071 Result: Down-regulated in Transcription
  misc_feature: MA Experiment 20000071 PARAMETER Experiment Name: At_100uM_ABA_Mutants_cDNA_P Parameter: Plant Line Value: CS8104
  misc_feature: MA Experiment 20000071 PARAMETER Experiment Name: At_100uM_ABA_Mutants_cDNA_P Parameter: Timepoint (hr) Value: 6
  misc_feature: MA Experiment 20000071 PARAMETER Experiment Name: At_100uM_ABA_Mutants_cDNA_P Parameter: Tissue Value: Aerial
  misc_feature: MA Experiment 20000071 PARAMETER Experiment Name: At_100uM_ABA_Mutants_cDNA_P Parameter: Treatment Value: 100uM ABA vs. No Treatment
  misc_feature: MA Experiment ID: 20000112 Result: Down-regulated in Transcription
  misc_feature: MA Experiment 20000112 PARAMETER Experiment Name: At_42deg_Heat_cDNA_P Parameter: Temperature (deg C) Value: 42 vs. 22
  misc_feature: MA Experiment 20000112 PARAMETER Experiment Name: At_42deg_Heat_cDNA_P Parameter: Timepoint (hr) Value: 2
  misc_feature: MA Experiment 20000112 PARAMETER Experiment Name: At_42deg_Heat_cDNA_P Parameter: Tissue Value: Aerial
  misc_feature: MA Experiment ID: 20000113 Result: Down-regulated in Transcription
  misc_feature: MA Experiment 20000113 PARAMETER Experiment Name: At_42deg_Heat_cDNA_P Parameter: Temperature (deg C) Value: 42 vs. 22
  misc_feature: MA Experiment 20000113 PARAMETER Experiment Name: At_42deg_Heat_cDNA_P Parameter: Timepoint (hr) Value: 8
  misc_feature: MA Experiment 20000113 PARAMETER Experiment Name: At_42deg_Heat_cDNA_P Parameter: Tissue Value: Aerial
  misc_feature: MA Experiment ID: 20000117 Result: Down-regulated in Transcription
  misc_feature: MA Experiment 20000117 PARAMETER Experiment Name: At_100uM_ABA_Mutants_cDNA_P Parameter: Plant Line Value: Columbia
  misc_feature: MA Experiment 20000117 PARAMETER Experiment Name: At_100uM_ABA_Mutants_cDNA_P Parameter: Timepoint (hr) Value: 6
  misc_feature: MA Experiment 20000117 PARAMETER Experiment Name: At_100uM_ABA_Mutants_cDNA_P Parameter: Tissue Value: Aerial
  misc_feature: MA Experiment 20000117 PARAMETER Experiment Name: At_100uM_ABA_Mutants_cDNA_P Parameter: Treatment Value: 100uM ABA vs. No Treatment
  misc_feature: MA Experiment ID: 20000144 Result: Down-regulated in Transcription
  misc_feature: MA Experiment 20000144 PARAMETER Experiment Name: At_42deg_Heat_cDNA_P Parameter: Temperature (deg C) Value: 42 vs. 22
  misc_feature: MA Experiment 20000144 PARAMETER Experiment Name: At_42deg_Heat_cDNA_P Parameter: Timepoint (hr) Value: 1
  misc_feature: MA Experiment 20000144 PARAMETER Experiment Name: At_42deg_Heat_cDNA_P Parameter: Tissue Value: Aerial
  misc_feature: MA Experiment ID: 20000182 Result: Down-regulated in Transcription
  misc_feature: MA Experiment 20000182 PARAMETER Experiment Name: At_2mM_SA_P Parameter: Age (day) Value: 14
  misc_feature: MA Experiment 20000182 PARAMETER Experiment Name: At_2mM_SA_P Parameter: Organism Value: A. thaliana
  misc_feature: MA Experiment 20000182 PARAMETER Experiment Name: At_2mM_SA_P Parameter: Plant Line Value: WS
  misc_feature: MA Experiment 20000182 PARAMETER Experiment Name: At_2mM_SA_P Parameter: Timepoint (hr) Value: 6
  misc_feature: MA Experiment 20000182 PARAMETER Experiment Name: At_2mM_SA_P Parameter: Tissue Value: Aerial
  misc_feature: MA Experiment 20000182 PARAMETER Experiment Name: At_2mM_SA_P Parameter: Treatment Value: 2mM SA vs. No Treatment
  misc_feature: MA Experiment ID: 20000184 Result: Up-regulated in Transcription
  misc_feature: MA Experiment 20000184 PARAMETER Experiment Name: At_Shoots__P Parameter: Age (day) Value: 7
  misc_feature: MA Experiment 20000184 PARAMETER Experiment Name: At_Shoots__P Parameter: Tissue Value: Shoots vs. Whole Plant
  misc_feature: MA Experiment ID: 20000286 Result: Up-regulated in Transcription
  misc_feature: MA Experiment 20000286 PARAMETER Experiment Name: At_Open_Flower_P Parameter: Age (day) Value: 21
  misc_feature: MA Experiment 20000286 PARAMETER Experiment Name: At_Open_Flower_P Parameter: Plant Line Value: WS
  misc_feature: MA Experiment 20000286 PARAMETER Experiment Name: At_Open_Flower_P Parameter: Tissue Value: Half Open vs. Whole Plant
  misc_feature: MA Experiment ID: 20000437 Result: Down-regulated in Transcription
  misc_feature: MA Experiment 20000437 PARAMETER Experiment Name: At_Drought_P Parameter: Age (day) Value: 8
  misc_feature: MA Experiment 20000437 PARAMETER Experiment Name: At_Drought_P Parameter: Organism Value: A. thaliana
  misc_feature: MA Experiment 20000437 PARAMETER Experiment Name: At_Drought_P Parameter: Plant Line Value: WS
  misc_feature: MA Experiment 20000437 PARAMETER Experiment Name: At_Drought_P Parameter: Timepoint (hr) Value: 24
  misc_feature: MA Experiment 20000437 PARAMETER Experiment Name: At_Drought_P Parameter: Tissue Value: Whole Plant
  misc_feature: MA Experiment 20000437 PARAMETER Experiment Name: At_Drought_P Parameter: Treatment Value: Drought vs. No Drought
  misc_feature: MA Experiment ID: 20000445 Result: Down-regulated in Transcription
  misc_feature: MA Experiment 20000445 PARAMETER Experiment Name: At_100uM_NAA__P Parameter: Age (day) Value: 14
  misc_feature: MA Experiment 20000445 PARAMETER Experiment Name: At_100uM_NAA__P Parameter: Organism Value: A. thaliana
  misc_feature: MA Experiment 20000445 PARAMETER Experiment Name: At_100uM_NAA__P Parameter: Plant Line Value: WS
  misc_feature: MA Experiment 20000445 PARAMETER Experiment Name: At_100uM_NAA__P Parameter: Timepoint (hr) Value: 6
  misc_feature: MA Experiment 20000445 PARAMETER Experiment Name: At_100uM_NAA__P Parameter: Tissue Value: Aerial
  misc_feature: MA Experiment 20000445 PARAMETER Experiment Name: At_100uM_NAA__P Parameter: Treatment Value: 100uM NAA vs. No Treatment
  misc_feature: MA Experiment ID: 20000495 Result: Up-regulated in Transcription
  misc_feature: MA Experiment 20000495 PARAMETER Experiment Name: At_Guard_Cells_P Parameter: Harvest Date Value: 8/2/2002
  misc_feature: MA Experiment 20000495 PARAMETER Experiment Name: At_Guard_Cells_P Parameter: Organism Value: A. thaliana
  misc_feature: MA Experiment 20000495 PARAMETER Experiment Name: At_Guard_Cells_P Parameter: Tissue Value: Guard Cells vs. Leaves
  misc_feature: MA Experiment ID: 20000573 Result: Down-regulated in Transcription
  misc_feature: MA Experiment 20000573 PARAMETER Experiment Name: At_100uM_ABA_Mutants__P Parameter: Organism Value: A. thaliana
  misc_feature: MA Experiment 20000573 PARAMETER Experiment Name: At_100uM_ABA_Mutants__P Parameter: Plant Line Value: CS22 vs. Ler wt
  misc_feature: MA Experiment 20000573 PARAMETER Experiment Name: At_100uM_ABA_Mutants__P Parameter: Timepoint (hr) Value: N/A
  misc_feature: MA Experiment 20000573 PARAMETER Experiment Name: At_100uM_ABA_Mutants__P Parameter: Tissue Value: Whole Plant
  misc_feature: MA Experiment 20000573 PARAMETER Experiment Name: At_100uM_ABA_Mutants__P Parameter: Treatment Value: None
  misc_feature: MA Experiment ID: 20000574 Result: Down-regulated in Transcription
  misc_feature: MA Experiment 20000574 PARAMETER Experiment Name: At_100uM_ABA_Mutants__P Parameter: Organism Value: A. thaliana
  misc_feature: MA Experiment 20000574 PARAMETER Experiment Name: At_100uM_ABA_Mutants__P Parameter: Plant Line Value: CS23 vs. Ler wt
  misc_feature: MA Experiment 20000574 PARAMETER Experiment Name: At_100uM_ABA_Mutants__P Parameter: Timepoint (hr) Value: N/A
  misc_feature: MA Experiment 20000574 PARAMETER Experiment Name: At_100uM_ABA_Mutants__P Parameter: Tissue Value: Whole Plant
  misc_feature: MA Experiment 20000574 PARAMETER Experiment Name: At_100uM_ABA_Mutants__P Parameter: Treatment Value: None
  misc_feature: MA Experiment ID: 20000794 Result: Down-regulated in Transcription
  misc_feature: MA Experiment 20000794 PARAMETER Experiment Name: At_Petals_P Parameter: Age (day) Value: 23-25 days
  misc_feature: MA Experiment 20000794 PARAMETER Experiment Name: At_Petals_P Parameter: Plant Line Value: WS
  misc_feature: MA Experiment 20000794 PARAMETER Experiment Name: At_Petals_P Parameter: Tissue Value: Petals vs. Whole plant
  misc_feature: MA Experiment ID: 20001248 Result: Down-regulated in Transcription
  misc_feature: MA Experiment 20001248 PARAMETER Experiment Name: At_Far-red-induction_P Parameter: Age (day) Value: 7
  misc_feature: MA Experiment 20001248 PARAMETER Experiment Name: At_Far-red-induction_P Parameter: Light Value: Far-red vs. White
  misc_feature: MA Experiment 20001248 PARAMETER Experiment Name: At_Far-red-induction_P Parameter: Organism Value: A. thaliana
  misc_feature: MA Experiment 20001248 PARAMETER Experiment Name: At_Far-red-induction_P Parameter: Plant Line Value: Columbia
  misc_feature: MA Experiment 20001248 PARAMETER Experiment Name: At_Far-red-induction_P Parameter: Timepoint (hr) Value: 4
  misc_feature: MA Experiment 20001248 PARAMETER Experiment Name: At_Far-red-induction_P Parameter: Tissue Value: Whole Plant
  misc_feature: MA Experiment ID: 20001555 Result: Down-regulated in Transcription
  misc_feature: MA Experiment 20001555 PARAMETER Experiment Name: At_Drought_Soil_Dry_P Parameter: Age (day) Value: 24
  misc_feature: MA Experiment 20001555 PARAMETER Experiment Name: At_Drought_Soil_Dry_P Parameter: Organism Value: A. thaliana
  misc_feature: MA Experiment 20001555 PARAMETER Experiment Name: At_Drought_Soil_Dry_P Parameter: Plant Line Value: WS
  misc_feature: MA Experiment 20001555 PARAMETER Experiment Name: At_Drought_Soil_Dry_P Parameter: Post Timepoint (hr) Value: None
  misc_feature: MA Experiment 20001555 PARAMETER Experiment Name: At_Drought_Soil_Dry_P Parameter: Post-Treatment Value: None
  misc_feature: MA Experiment 20001555 PARAMETER Experiment Name: At_Drought_Soil_Dry_P Parameter: Timepoint (day) Value: 10
  misc_feature: MA Experiment 20001555 PARAMETER Experiment Name: At_Drought_Soil_Dry_P Parameter: Treatment Value: Drought vs. No Drought
  misc_feature: MA Experiment ID: 20001557 Result: Up-regulated in Transcription
  misc_feature: MA Experiment 20001557 PARAMETER Experiment Name: At_Drought_Soil_Dry_P Parameter: Age (day) Value: 27
  misc_feature: MA Experiment 20001557 PARAMETER Experiment Name: At_Drought_Soil_Dry_P Parameter: Organism Value: A. thaliana
  misc_feature: MA Experiment 20001557 PARAMETER Experiment Name: At_Drought_Soil_Dry_P Parameter: Plant Line Value: WS
  misc_feature: MA Experiment 20001557 PARAMETER Experiment Name: At_Drought_Soil_Dry_P Parameter: Post Timepoint (hr) Value: 3
  misc_feature: MA Experiment 20001557 PARAMETER Experiment Name: At_Drought_Soil_Dry_P Parameter: Post-Treatment Value: Re-Water vs. No Drought
  misc_feature: MA Experiment 20001557 PARAMETER Experiment Name: At_Drought_Soil_Dry_P Parameter: Timepoint (day) Value: 13
  misc_feature: MA Experiment 20001557 PARAMETER Experiment Name: At_Drought_Soil_Dry_P Parameter: Treatment Value: Drought vs. No Drought
  misc_feature: MA Experiment ID: 20001558 Result: Up-regulated in Transcription
  misc_feature: MA Experiment 20001558 PARAMETER Experiment Name: At_Drought_Soil_Dry_P Parameter: Age (day) Value: 27
  misc_feature: MA Experiment 20001558 PARAMETER Experiment Name: At_Drought_Soil_Dry_P Parameter: Organism Value: A. thaliana
  misc_feature: MA Experiment 20001558 PARAMETER Experiment Name: At_Drought_Soil_Dry_P Parameter: Plant Line Value: WS
  misc_feature: MA Experiment 20001558 PARAMETER Experiment Name: At_Drought_Soil_Dry_P Parameter: Post Timepoint (hr) Value: 6
  misc_feature: MA Experiment 20001558 PARAMETER Experiment Name: At_Drought_Soil_Dry_P Parameter: Post-Treatment Value: Re-Water vs. No Drought
  misc_feature: MA Experiment 20001558 PARAMETER Experiment Name: At_Drought_Soil_Dry_P Parameter: Timepoint (day) Value: 13
  misc_feature: MA Experiment 20001558 PARAMETER Experiment Name: At_Drought_Soil_Dry_P Parameter: Treatment Value: Drought vs. No Drought
  misc_feature: MA Experiment ID: 20001560 Result: Up-regulated in Transcription
  misc_feature: MA Experiment 20001560 PARAMETER Experiment Name: At_Drought_Soil_Dry_P Parameter: Age (day) Value: 28
  misc_feature: MA Experiment 20001560 PARAMETER Experiment Name: At_Drought_Soil_Dry_P Parameter: Organism Value: A. thaliana
  misc_feature: MA Experiment 20001560 PARAMETER Experiment Name: At_Drought_Soil_Dry_P Parameter: Plant Line Value: WS
  misc_feature: MA Experiment 20001560 PARAMETER Experiment Name: At_Drought_Soil_Dry_P Parameter: Post Timepoint (hr) Value: None
  misc_feature: MA Experiment 20001560 PARAMETER Experiment Name: At_Drought_Soil_Dry_P Parameter: Post-Treatment Value: None
  misc_feature: MA Experiment 20001560 PARAMETER Experiment Name: At_Drought_Soil_Dry_P Parameter: Timepoint (day) Value: 14
  misc_feature: MA Experiment 20001560 PARAMETER Experiment Name: At_Drought_Soil_Dry_P Parameter: Treatment Value: Drought vs. No Drought
  misc_feature: MA Experiment ID: 20001911 Result: Down-regulated in Transcription
  misc_feature: MA Experiment 20001911 PARAMETER Experiment Name: At_Drought_Reproduction_P Parameter: Age (day) Value: 40
  misc_feature: MA Experiment 20001911 PARAMETER Experiment Name: At_Drought_Reproduction_P Parameter: Organism Value: A. thaliana
  misc_feature: MA Experiment 20001911 PARAMETER Experiment Name: At_Drought_Reproduction_P Parameter: Plant Line Value: WS
  misc_feature: MA Experiment 20001911 PARAMETER Experiment Name: At_Drought_Reproduction_P Parameter: Timepoint (day) Value: 10
  misc_feature: MA Experiment 20001911 PARAMETER Experiment Name: At_Drought_Reproduction_P Parameter: Tissue Value: Flowers
  misc_feature: MA Experiment 20001911 PARAMETER Experiment Name: At_Drought_Reproduction_P Parameter: Treatment Value: Drought vs. No Drought
attttcaactcaaatagcttcacagttttactaatctctctcatcttcttcccaacatcaaagaagacctttacttctggttagaatagaccaagaacactgagtacgacaaagaaccatgatgaatctttcttctcgtcgcgcctcttccactctcacattgagcttcactgttctccttttagcttccacaggttcgtatggctcaacattcacattcgctaatcggtgcggctacaccgtatggcctggaatcctatcgaatgctggctcacctactctctccaccaccggatttgagctccctaaaggcacctctcgctctctccaagctcccaccggttggtccggtcgattctgggctcgtaccggttgcaagttcgacagttctggctccggtacatgcaaaaccggtgactgcggctccaacgctgtcgaatgcgccgggcttggtgccgcaccgcctgtaactctcgcggagttcactctaggcactggcggcgatgatttctacgacgttagtctcgtcgacggttacaacattccgatgatagttgaagtcgccggtggatctgggcagtgcgcttctaccggatgcactacggatcttaacattcagtgccctgctgagctgcgtttcggcgacggagacgcttgcaaaagcgcgtgtttagcgtttcggagtcctgaatactgttgcagcggcgcgtatgctacaccttctagttgtcggccttccgtgtattcggagatgtttaaagccgcgtgtcctcgctcctatagctacgcttacgacgatgctacgagcactttcacttgcgccggtggagattatacggtgacgttttgcccttcttcccctagtcaaaaatcgactagctactcccctccagtgacagactcgtcgtcgacctcacaaggttccgatcctgtgcctggttctgatactggttacgctggtcagggtcaacagactccaggtcaaggtaatgtgtacgggtcacaggggactgggtcggagatgggtacgggtgagaccatgttacaagacggatcatggatggctggtttggccatgggagaggcaagcagaccagccggcgtttcattgacagtgctgcttgctgcatttacttttccgtttattttctcgtagcatcatcgtctttagatttggtagtcgttttgttagcattgcctttgtttagtttttgttgatactcgatgattatcgcttaagactgcgacaatttgggttttaggcttttagggttttgcattgtagctttgtcgtgtacgcgcgtgtttgcttgtatcatctgtcattgaagattgtttatcatgttcgaaattgtgagatatgctttgtgatttaaagaaagatcttttgtggctt

SEQ ID NO: 21922 - protein, 345 aa, Arabidopsis thaliana
  peptide (1)..(345): Ceres Seq. ID no. 12328919
  misc_feature (36)..(245): Pfam Name: Thaumatin family Pfam Description: Thaumatin family
  misc_feature (13)..(246): Homolog of NCBI NO: 4105697 NR Description: thaumatin-like protein [Arabidopsis thaliana]
  misc_feature (13)..(277): Homolog of NCBI NO: 15222875 NR Description: thaumatin, putative
  misc_feature (31)..(293): Homolog of NCBI NO: 30686652 NR Description: thaumatin family [Arabidopsis thaliana]
  misc_feature (6)..(257): Homolog of NCBI NO: 37531042 NR Description: putative thaumatin-like protein
  misc_feature (13)..(293): Homolog of NCBI NO: 25296204 NR Description: hypothetical protein T20H2.19 [imported] -
  misc_feature (15)..(248): Homolog of NCBI NO: 2262099 NR Description: thaumatin isolog [Arabidopsis thaliana]
  misc_feature (11)..(248): Homolog of NCBI NO: 15233738 NR Description: thaumatin-like protein; protein id: At4g24180.1
  misc_feature (26)..(345): Homolog of NCBI NO: 7442168 NR Description: pathogenesis-related protein F20M13.220 -
  misc_feature (1)..(345): Homolog of NCBI NO: 21592749 NR Description: putative thaumatin-like protein [Arabidopsis
  misc_feature (1)..(345): Homolog of NCBI NO: 18420282 NR Description: putative thaumatin-like protein
MMNLSSRRASSTLTLSFTVLLLASTGSYGSTFTFANRCGYTVWPGILSNAGSPTLSTTGFELPKGTSRSLQAPTGWSGRFWARTGCKFDSSGSGTCKTGDCGSNAVECAGLGAAPPVTLAEFTLGTGGDDFYDVSLVDGYNIPMIVEVAGGSGQCASTGCTTDLNIQCPAELRFGDGDACKSACLAFRSPEYCCSGAYATPSSCRPSVYSEMFKAACPRSYSYAYDDATSTFTCAGGDYTVTFCPSSPSQKSTSYSPPVTDSSSTSQGSDPVPGSDTGYAGQGQQTPGQGNVYGSQGTGSEMGTGETMLQDGSWMAGLAMGEASRPAGVSLTVLLAAFTFPFIFS

SEQ ID NO: 21923 - protein, 344 aa, Arabidopsis thaliana
  peptide (1)..(344): Ceres Seq. ID no. 12328920
  misc_feature (35)..(244): Pfam Name: Thaumatin family Pfam Description: Thaumatin family
  misc_feature (12)..(245): Homolog of NCBI NO: 4105697 NR Description: thaumatin-like protein [Arabidopsis thaliana]
  misc_feature (12)..(276): Homolog of NCBI NO: 15222875 NR Description: thaumatin, putative
  misc_feature (30)..(292): Homolog of NCBI NO: 30686652 NR Description: thaumatin family [Arabidopsis thaliana]
  misc_feature (5)..(256): Homolog of NCBI NO: 37531042 NR Description: putative thaumatin-like protein
  misc_feature (12)..(292): Homolog of NCBI NO: 25296204 NR Description: hypothetical protein T20H2.19 [imported] -
  misc_feature (14)..(247): Homolog of NCBI NO: 2262099 NR Description: thaumatin isolog [Arabidopsis thaliana]
  misc_feature (10)..(247): Homolog of NCBI NO: 15233738 NR Description: thaumatin-like protein; protein id: At4g24180.1
  misc_feature (25)..(344): Homolog of NCBI NO: 7442168 NR Description: pathogenesis-related protein F20M13.220 -
  misc_feature (1)..(344): Homolog of NCBI NO: 21592749 NR Description: putative thaumatin-like protein [Arabidopsis
  misc_feature (1)..(344): Homolog of NCBI NO: 18420282 NR Description: putative thaumatin-like protein
MNLSSRRASSTLTLSFTVLLLASTGSYGSTFTFANRCGYTVWPGILSNAGSPTLSTTGFELPKGTSRSLQAPTGWSGRFWARTGCKFDSSGSGTCKTGDCGSNAVECAGLGAAPPVTLAEFTLGTGGDDFYDVSLVDGYNIPMIVEVAGGSGQCASTGCTTDLNIQCPAELRFGDGDACKSACLAFRSPEYCCSGAYATPSSCRPSVYSEMFKAACPRSYSYAYDDATSTFTCAGGDYTVTFCPSSPSQKSTSYSPPVTDSSSTSQGSDPVPGSDTGYAGQGQQTPGQGNVYGSQGTGSEMGTGETMLQDGSWMAGLAMGEASRPAGVSLTVLLAAFTFPFIFS

SEQ ID NO: 21924 - protein, 202 aa, Arabidopsis thaliana
  peptide (1)..(202): Ceres Seq. ID no. 12328921
  misc_feature (1)..(102): Pfam Name: Thaumatin family Pfam Description: Thaumatin family
  misc_feature (1)..(103): Homolog of NCBI NO: 4105697 NR Description: thaumatin-like protein [Arabidopsis thaliana]
  misc_feature (1)..(134): Homolog of NCBI NO: 15222875 NR Description: thaumatin, putative
  misc_feature (1)..(150): Homolog of NCBI NO: 30686652 NR Description: thaumatin family [Arabidopsis thaliana]
  misc_feature (1)..(114): Homolog of NCBI NO: 37531042 NR Description: putative thaumatin-like protein
  misc_feature (1)..(150): Homolog of NCBI NO: 25296204 NR Description: hypothetical protein T20H2.19 [imported] -
  misc_feature (1)..(105): Homolog of NCBI NO: 2262099 NR Description: thaumatin isolog [Arabidopsis thaliana]
  misc_feature (1)..(105): Homolog of NCBI NO: 15233738 NR Description: thaumatin-like protein; protein id: At4g24180.1
  misc_feature (1)..(202): Homolog of NCBI NO: 7442168 NR Description: pathogenesis-related protein F20M13.220 -
  misc_feature (1)..(202): Homolog of NCBI NO: 21592749 NR Description: putative thaumatin-like protein [Arabidopsis
  misc_feature (1)..(202): Homolog of NCBI NO: 18420282 NR Description: putative thaumatin-like protein
MIVEVAGGSGQCASTGCTTDLNIQCPAELRFGDGDACKSACLAFRSPEYCCSGAYATPSSCRPSVYSEMFKAACPRSYSYAYDDATSTFTCAGGDYTVTFCPSSPSQKSTSYSPPVTDSSSTSQGSDPVPGSDTGYAGQGQQTPGQGNVYGSQGTGSEMGTGETMLQDGSWMAGLAMGEASRPAGVSLTVLLAAFTFPFIFS

SEQ ID NO: 21925 - DNA, 647 bp, Arabidopsis thaliana
  misc_feature (1)..(647): Ceres Seq. ID no. 13580661
  misc_feature: MA Experiment ID: 20000355 Result: Up-regulated in Transcription
  misc_feature: MA Experiment 20000355 PARAMETER Experiment Name: At_Siliques_Sub_P Parameter: Age (day) Value: 21
  misc_feature: MA Experiment 20000355 PARAMETER Experiment Name: At_Siliques_Sub_P Parameter: Organism Value: A. thaliana
  misc_feature: MA Experiment 20000355 PARAMETER Experiment Name: At_Siliques_Sub_P Parameter: Plant Line Value: WS
  misc_feature: MA Experiment 20000355 PARAMETER Experiment Name: At_Siliques_Sub_P Parameter: Tissue Value: Less Than 5mm Siliques vs. Whole Plant
aacatcctaatcgaaaaccggcgccaccattaaaatctctcgatctctatctgcgaaatttcacggtaggtatttgaaatggcgacagttccaggacaattgatctgggagatcgtgaagaacaacaactgtttcttggtgaagcagttcggtagaggaaactctaaggttcaattcagcaaggagactaacaacctcaccaacgttcactcttacaagcactctggtcttgcaaacaaaaagactgtgaccatccaggccgctgacaaggaccaagctgttgtgctcgccaccaccaagaccaagaagcagaacaagcctaagctctctgtcaacaagtctatcctcaagaaggaattccccaggatgtcaaaggctgttgctaaccaggtggtggacaactactacaggccggacttgaagaaagctgcacttgctagactcagcgccatcagcaaaggtctcagggttgccaagtccggtgccaagcaaagaaacagacaagcttaagcttcttctttcacaatctgttttttttgaagtaaaagattttgttgaacaggttttatttaagttgttgctttgaagttgaaccataatgctattctcctttttcattatccttattataaaggagttagaagttt

SEQ ID NO: 21926 - protein, 143 aa, Arabidopsis thaliana [sequence omitted]

SEQ ID NO: 21927 - DNA, 780 bp, Arabidopsis thaliana
  misc_feature (1)..(780): Ceres Seq. ID no. 12331618
  misc_feature: MA Experiment ID: 20000180 Result: Up-regulated in Transcription
  misc_feature: MA Experiment 20000180 PARAMETER Experiment Name: At_Germinating_Seeds_P Parameter: Age (hr) Value: 24 vs. 0
  misc_feature: MA Experiment 20000180 PARAMETER Experiment Name: At_Germinating_Seeds_P Parameter: Tissue Value: Germinating Seeds
  misc_feature: MA Experiment ID: 20000184 Result: Up-regulated in Transcription
  misc_feature: MA Experiment 20000184 PARAMETER Experiment Name: At_Shoots__P Parameter: Age (day) Value: 7
  misc_feature: MA Experiment 20000184 PARAMETER Experiment Name: At_Shoots__P Parameter: Tissue Value: Shoots vs. Whole Plant
  misc_feature: MA Experiment ID: 20000185 Result: Down-regulated in Transcription
  misc_feature: MA Experiment 20000185 PARAMETER Experiment Name: At_Roots__P Parameter: Age (day) Value: 7 vs. 21
  misc_feature: MA Experiment 20000185 PARAMETER Experiment Name: At_Roots__P Parameter: Organism Value: A. thaliana
  misc_feature: MA Experiment 20000185 PARAMETER Experiment Name: At_Roots__P Parameter: Tissue Value: Roots vs. Whole Plant
  misc_feature: MA Experiment ID: 20000286 Result: Down-regulated in Transcription
  misc_feature: MA Experiment 20000286 PARAMETER Experiment Name: At_Open_Flower_P Parameter: Age (day) Value: 21
  misc_feature: MA Experiment 20000286 PARAMETER Experiment Name: At_Open_Flower_P Parameter: Plant Line Value: WS
  misc_feature: MA Experiment 20000286 PARAMETER Experiment Name: At_Open_Flower_P Parameter: Tissue Value: Half Open vs. Whole Plant
  misc_feature: MA Experiment ID: 20000437 Result: Down-regulated in Transcription
  misc_feature: MA Experiment 20000437 PARAMETER Experiment Name: At_Drought_P Parameter: Age (day) Value: 8
  misc_feature: MA Experiment 20000437 PARAMETER Experiment Name: At_Drought_P Parameter: Organism Value: A. thaliana
  misc_feature: MA Experiment 20000437 PARAMETER Experiment Name: At_Drought_P Parameter: Plant Line Value: WS
  misc_feature: MA Experiment 20000437 PARAMETER Experiment Name: At_Drought_P Parameter: Timepoint (hr) Value: 24
  misc_feature: MA Experiment 20000437 PARAMETER Experiment Name: At_Drought_P Parameter: Tissue Value: Whole Plant
  misc_feature: MA Experiment 20000437 PARAMETER Experiment Name: At_Drought_P Parameter: Treatment Value: Drought vs. No Drought
  misc_feature: MA Experiment ID: 20000438 Result: Up-regulated in Transcription
  misc_feature: MA Experiment 20000438 PARAMETER Experiment Name: At_Shoots__P Parameter: Age (day) Value: 14
  misc_feature: MA Experiment 20000438 PARAMETER Experiment Name: At_Shoots__P Parameter: Tissue Value: Shoots vs. Whole Plant
  misc_feature: MA Experiment ID: 20000439 Result: Down-regulated in Transcription
  misc_feature: MA Experiment 20000439 PARAMETER Experiment Name: At_Roots__P Parameter: Age (day) Value: 14 vs. 21
  misc_feature: MA Experiment 20000439 PARAMETER Experiment Name: At_Roots__P Parameter: Organism Value: A. thaliana
  misc_feature: MA Experiment 20000439 PARAMETER Experiment Name: At_Roots__P Parameter: Tissue Value: Roots vs. Whole Plant
  misc_feature: MA Experiment ID: 20000527 Result: Down-regulated in Transcription
  misc_feature: MA Experiment 20000527 PARAMETER Experiment Name: At_10percent_PEG_P Parameter: Age (day) Value: 20
  misc_feature: MA Experiment 20000527 PARAMETER Experiment Name: At_10percent_PEG_P Parameter: Organism Value: A. thaliana
  misc_feature: MA Experiment 20000527 PARAMETER Experiment Name: At_10percent_PEG_P Parameter: Plant Line Value: WS
  misc_feature: MA Experiment 20000527 PARAMETER Experiment Name: At_10percent_PEG_P Parameter: Timepoint (day) Value: 20
  misc_feature: MA Experiment 20000527 PARAMETER Experiment Name: At_10percent_PEG_P Parameter: Tissue Value: Whole Plant
  misc_feature: MA Experiment 20000527 PARAMETER Experiment Name: At_10percent_PEG_P Parameter: Treatment Value: 10percent PEG vs. No Treatment
  misc_feature: MA Experiment ID: 20000573 Result: Down-regulated in Transcription
  misc_feature: MA Experiment 20000573 PARAMETER Experiment Name: At_100uM_ABA_Mutants__P Parameter: Organism Value: A. thaliana
  misc_feature: MA Experiment 20000573 PARAMETER Experiment Name: At_100uM_ABA_Mutants__P Parameter: Plant Line Value: CS22 vs. Ler wt
  misc_feature: MA Experiment 20000573 PARAMETER Experiment Name: At_100uM_ABA_Mutants__P Parameter: Timepoint (hr) Value: N/A
  misc_feature: MA Experiment 20000573 PARAMETER Experiment Name: At_100uM_ABA_Mutants__P Parameter: Tissue Value: Whole Plant
  misc_feature: MA Experiment 20000573 PARAMETER Experiment Name: At_100uM_ABA_Mutants__P Parameter: Treatment Value: None
  misc_feature: MA Experiment ID: 20000574 Result: Down-regulated in Transcription
  misc_feature: MA Experiment 20000574 PARAMETER Experiment Name: At_100uM_ABA_Mutants__P Parameter: Organism Value: A. thaliana
  misc_feature: MA Experiment 20000574 PARAMETER Experiment Name: At_100uM_ABA_Mutants__P Parameter: Plant Line Value: CS23 vs. Ler wt
  misc_feature: MA Experiment 20000574 PARAMETER Experiment Name: At_100uM_ABA_Mutants__P Parameter: Timepoint (hr) Value: N/A
  misc_feature: MA Experiment 20000574 PARAMETER Experiment Name: At_100uM_ABA_Mutants__P Parameter: Tissue Value: Whole Plant
  misc_feature: MA Experiment 20000574 PARAMETER Experiment Name: At_100uM_ABA_Mutants__P Parameter: Treatment Value: None
  misc_feature: MA Experiment ID: 20000794 Result: Down-regulated in Transcription
  misc_feature: MA Experiment 20000794 PARAMETER Experiment Name: At_Petals_P Parameter: Age (day) Value: 23-25 days
  misc_feature: MA Experiment 20000794 PARAMETER Experiment Name: At_Petals_P Parameter: Plant Line Value: WS
  misc_feature: MA Experiment 20000794 PARAMETER Experiment Name: At_Petals_P Parameter: Tissue Value: Petals vs. Whole plant
  misc_feature: MA Experiment ID: 20001248 Result: Down-regulated in Transcription
  misc_feature: MA Experiment 20001248 PARAMETER Experiment Name: At_Far-red-induction_P Parameter: Age (day) Value: 7
  misc_feature: MA Experiment 20001248 PARAMETER Experiment Name: At_Far-red-induction_P Parameter: Light Value: Far-red vs. White
  misc_feature: MA Experiment 20001248 PARAMETER Experiment Name: At_Far-red-induction_P Parameter: Organism Value: A. thaliana
  misc_feature: MA Experiment 20001248 PARAMETER Experiment Name: At_Far-red-induction_P Parameter: Plant Line Value: Columbia
  misc_feature: MA Experiment 20001248 PARAMETER Experiment Name: At_Far-red-induction_P Parameter: Timepoint (hr) Value: 4
  misc_feature: MA Experiment 20001248 PARAMETER Experiment Name: At_Far-red-induction_P Parameter: Tissue Value: Whole Plant
  misc_feature: MA Experiment ID: 20001555 Result: Down-regulated in Transcription
  misc_feature: MA Experiment 20001555 PARAMETER Experiment Name: At_Drought_Soil_Dry_P Parameter: Age (day) Value: 24
  misc_feature: MA Experiment 20001555 PARAMETER Experiment Name: At_Drought_Soil_Dry_P Parameter: Organism Value: A. thaliana
  misc_feature: MA Experiment 20001555 PARAMETER Experiment Name: At_Drought_Soil_Dry_P Parameter: Plant Line Value: WS
  misc_feature: MA Experiment 20001555 PARAMETER Experiment Name: At_Drought_Soil_Dry_P Parameter: Post Timepoint (hr) Value: None
  misc_feature: MA Experiment 20001555 PARAMETER Experiment Name: At_Drought_Soil_Dry_P Parameter: Post-Treatment Value: None
  misc_feature: MA Experiment 20001555 PARAMETER Experiment Name: At_Drought_Soil_Dry_P Parameter: Timepoint (day) Value: 10
  misc_feature: MA Experiment 20001555 PARAMETER Experiment Name: At_Drought_Soil_Dry_P Parameter: Treatment Value: Drought vs. No Drought
  misc_feature: MA Experiment ID: 20001556 Result: Down-regulated in Transcription
  misc_feature: MA Experiment 20001556 PARAMETER Experiment Name: At_Drought_Soil_Dry_P Parameter: Age (day) Value: 26
  misc_feature: MA Experiment 20001556 PARAMETER Experiment Name: At_Drought_Soil_Dry_P Parameter: Organism Value: A. thaliana
  misc_feature: MA Experiment 20001556 PARAMETER Experiment Name: At_Drought_Soil_Dry_P Parameter: Plant Line Value: WS
  misc_feature: MA Experiment 20001556 PARAMETER Experiment Name: At_Drought_Soil_Dry_P Parameter: Post Timepoint (hr) Value: None
  misc_feature: MA Experiment 20001556 PARAMETER Experiment Name: At_Drought_Soil_Dry_P Parameter: Post-Treatment Value: None
  misc_feature: MA Experiment 20001556 PARAMETER Experiment Name: At_Drought_Soil_Dry_P Parameter: Timepoint (day) Value: 12
  misc_feature: MA Experiment 20001556 PARAMETER Experiment Name: At_Drought_Soil_Dry_P Parameter: Treatment Value: Drought vs. No Drought
  misc_feature: MA Experiment ID: 20001557 Result: Down-regulated in Transcription
  misc_feature: MA Experiment 20001557 PARAMETER Experiment Name: At_Drought_Soil_Dry_P Parameter: Age (day) Value: 27
  misc_feature: MA Experiment 20001557 PARAMETER Experiment Name: At_Drought_Soil_Dry_P Parameter: Organism Value: A. thaliana
  misc_feature: MA Experiment 20001557 PARAMETER Experiment Name: At_Drought_Soil_Dry_P Parameter: Plant Line Value: WS
  misc_feature: MA Experiment 20001557 PARAMETER Experiment Name: At_Drought_Soil_Dry_P Parameter: Post Timepoint (hr) Value: 3
  misc_feature: MA Experiment 20001557 PARAMETER Experiment Name: At_Drought_Soil_Dry_P Parameter: Post-Treatment Value: Re-Water vs. No Drought
  misc_feature: MA Experiment 20001557 PARAMETER Experiment Name: At_Drought_Soil_Dry_P Parameter: Timepoint (day) Value: 13
  misc_feature: MA Experiment 20001557 PARAMETER Experiment Name: At_Drought_Soil_Dry_P Parameter: Treatment Value: Drought vs. No Drought
  misc_feature: MA Experiment ID: 20001558 Result: Down-regulated in Transcription
  misc_feature: MA Experiment 20001558 PARAMETER Experiment Name: At_Drought_Soil_Dry_P Parameter: Age (day) Value: 27
  misc_feature: MA Experiment 20001558 PARAMETER Experiment Name: At_Drought_Soil_Dry_P Parameter: Organism Value: A. thaliana
  misc_feature: MA Experiment 20001558 PARAMETER Experiment Name: At_Drought_Soil_Dry_P Parameter: Plant Line Value: WS
  misc_feature: MA Experiment 20001558 PARAMETER Experiment Name: At_Drought_Soil_Dry_P Parameter: Post Timepoint (hr) Value: 6
  misc_feature: MA Experiment 20001558 PARAMETER Experiment Name: At_Drought_Soil_Dry_P Parameter: Post-Treatment Value: Re-Water vs. No Drought
  misc_feature: MA Experiment 20001558 PARAMETER Experiment Name: At_Drought_Soil_Dry_P Parameter: Timepoint (day) Value: 13
  misc_feature: MA Experiment 20001558 PARAMETER Experiment Name: At_Drought_Soil_Dry_P Parameter: Treatment Value: Drought vs. No Drought
  misc_feature: MA Experiment ID: 20001757 Result: Up-regulated in Transcription
  misc_feature: MA Experiment 20001757 PARAMETER Experiment Name: At_50mM_NH4NO3_L-to-H_P Parameter: Timepoint (hr) Value: 6
  misc_feature: MA Experiment 20001757 PARAMETER Experiment Name: At_50mM_NH4NO3_L-to-H_P Parameter: Tissue Value: Leaf
  misc_feature: MA Experiment 20001757 PARAMETER Experiment Name: At_50mM_NH4NO3_L-to-H_P Parameter: Treatment Value: 50mM NH4NO3 vs 100mM Mannitol
  misc_feature: MA Experiment ID: 20001904 Result: Down-regulated in Transcription
  misc_feature: MA Experiment 20001904 PARAMETER Experiment Name: At_Drought_Reproduction_P Parameter: Age (day) Value: 37
  misc_feature: MA Experiment 20001904 PARAMETER Experiment Name: At_Drought_Reproduction_P Parameter: Organism Value: A. thaliana
  misc_feature: MA Experiment 20001904 PARAMETER Experiment Name: At_Drought_Reproduction_P Parameter: Plant Line Value: WS
  misc_feature: MA Experiment 20001904 PARAMETER Experiment Name: At_Drought_Reproduction_P Parameter: Timepoint (day) Value: 7
  misc_feature: MA Experiment 20001904 PARAMETER Experiment Name: At_Drought_Reproduction_P Parameter: Tissue Value: Rosettes
  misc_feature: MA Experiment 20001904 PARAMETER Experiment Name: At_Drought_Reproduction_P Parameter: Treatment Value: Drought vs. No Drought
  misc_feature: MA Experiment ID: 20001905 Result: Down-regulated in Transcription
  misc_feature: MA Experiment 20001905 PARAMETER Experiment Name: At_Drought_Reproduction_P Parameter: Age (day) Value: 40
  misc_feature: MA Experiment 20001905 PARAMETER Experiment Name: At_Drought_Reproduction_P Parameter: Organism Value: A. thaliana
  misc_feature: MA Experiment 20001905 PARAMETER Experiment Name: At_Drought_Reproduction_P Parameter: Plant Line Value: WS
  misc_feature: MA Experiment 20001905 PARAMETER Experiment Name: At_Drought_Reproduction_P Parameter: Timepoint (day) Value: 10
  misc_feature: MA Experiment 20001905 PARAMETER Experiment Name: At_Drought_Reproduction_P Parameter: Tissue Value: Rosettes
  misc_feature: MA Experiment 20001905 PARAMETER Experiment Name: At_Drought_Reproduction_P Parameter: Treatment Value: Drought vs. No Drought
  misc_feature: MA Experiment ID: 20001906 Result: Down-regulated in Transcription
  misc_feature: MA Experiment 20001906 PARAMETER Experiment Name: At_Drought_Reproduction_P Parameter: Age (day) Value: 35
  misc_feature: MA Experiment 20001906 PARAMETER Experiment Name: At_Drought_Reproduction_P Parameter: Organism Value: A. thaliana
  misc_feature: MA Experiment 20001906 PARAMETER Experiment Name: At_Drought_Reproduction_P Parameter: Plant Line Value: WS
  misc_feature: MA Experiment 20001906 PARAMETER Experiment Name: At_Drought_Reproduction_P Parameter: Timepoint (day) Value: 5
  misc_feature: MA Experiment 20001906 PARAMETER Experiment Name: At_Drought_Reproduction_P Parameter: Tissue Value: Siliques
  misc_feature: MA Experiment 20001906 PARAMETER Experiment Name: At_Drought_Reproduction_P Parameter: Treatment Value: Drought vs. No Drought
  misc_feature: MA Experiment ID: 20001908 Result: Down-regulated in Transcription
  misc_feature: MA Experiment 20001908 PARAMETER Experiment Name: At_Drought_Reproduction_P Parameter: Age (day) Value: 40
  misc_feature: MA Experiment 20001908 PARAMETER Experiment Name: At_Drought_Reproduction_P Parameter: Organism Value: A. thaliana
  misc_feature: MA Experiment 20001908 PARAMETER Experiment Name: At_Drought_Reproduction_P Parameter: Plant Line Value: WS
  misc_feature: MA Experiment 20001908 PARAMETER Experiment Name: At_Drought_Reproduction_P Parameter: Timepoint (day) Value: 10
  misc_feature: MA Experiment 20001908 PARAMETER Experiment Name: At_Drought_Reproduction_P Parameter: Tissue Value: Siliques
  misc_feature: MA Experiment 20001908 PARAMETER Experiment Name: At_Drought_Reproduction_P Parameter: Treatment Value: Drought vs. No Drought
tttcatctctatccatttactccacagagaaagattcagagaaaacagaagaaactatggcaactcaagccgccggaatcttcagccccgccataacaaccactacttccgccgtcaagaaactccacctcttctcatcaagccaccgtcccaagtctctctccttcaccaaaaccgccatccgcgccgagaaaacagagtcctcctctgctgccccagccgtgaaagaagctccagttggattcactcccccgcagctagacccaaacacaccatcaccaatcttcgccggaagcacaggaggtctcctccgtaaagcacaagtagaggaattttacgtgatcacatggaactcaccgaaagaacaaatctttgagatgccaacaggaggagctgcgataatgagagaaggaccgaatctattgaaactggcgaggaaagaacagtgtttggctttaggtacgaggttgaggtcaaagtacaagatcacttaccagttttacagagtgttccctaacggagaggttcaatatcttcacccgaaagatggagtttatccagagaaagcgaatccaggaagagaaggtgttggactaaacatgagatccatcggtaaaaatgttagtcccattgaggttaaattcactgggaaacaatcttatgatttgtaagattttaattcgtattttatataataatgctagacaaacaaaacaaatttaaaaagggatcacactacatgtaaaatcttgcggatgttataacaactctttgaacttt

SEQ ID NO: 21928 - protein, 222 aa, Arabidopsis thaliana
  peptide (1)..(222): Ceres Seq. ID no. 12331619
  misc_feature (84)..(221): Pfam Name: PsaD Pfam Description: PsaD
  misc_feature (84)..(221): Pfam Name: PsaD Pfam Description: PsaD
  misc_feature (84)..(221): Pfam Name: PsaD Pfam Description: PsaD
  misc_feature (19)..(222): Homolog of NCBI NO: 131166 NR Description: Photosystem I reaction center subunit II,
  misc_feature (19)..(222): Homolog of NCBI NO: 131167 NR Description: Photosystem I reaction center subunit II,
  misc_feature (19)..(222): Homolog of NCBI NO: 34787117 NR Description: putative photosystem I reaction centre PSI-D
  misc_feature (19)..(222): Homolog of NCBI NO: 21293 NR Description: 20 kDa protein (AA 1-212) [Spinacia oleracea]
  misc_feature (19)..(222): Homolog of NCBI NO: 19855891 NR Description: Photosystem I reaction center subunit II,
  misc_feature (19)..(222): Homolog of NCBI NO: 131166 NR Description: Photosystem I reaction center subunit II,
  misc_feature (19)..(222): Homolog of NCBI NO: 34787117 NR Description: putative photosystem I reaction centre PSI-D
  misc_feature (19)..(222): Homolog of NCBI NO: 19855891 NR Description: Photosystem I reaction center subunit II,
  misc_feature (19)..(222): Homolog of NCBI NO: 21293 NR Description: 20 kDa protein (AA 1-212) [Spinacia oleracea]
  misc_feature (19)..(222): Homolog of NCBI NO: 34787117 NR Description: putative photosystem I reaction centre PSI-D
  misc_feature (19)..(222): Homolog of NCBI NO: 131167 NR Description: Photosystem I reaction center subunit II,
  misc_feature (19)..(222): Homolog of NCBI NO: 131166 NR Description: Photosystem I reaction center subunit II,
  misc_feature (19)..(222): Homolog of NCBI NO: 15218708 NR Description: putative photosystem I reaction center subunit II
  misc_feature (19)..(222): Homolog of NCBI NO: 5732201 NR Description: photosystem I subunit II precursor [Arabidopsis
  misc_feature (19)..(222): Homolog of NCBI NO: 15235503 NR Description: putative photosystem I reaction center subunit II
  misc_feature (19)..(222): Homolog of NCBI NO: 21595031 NR Description: putative photosystem I reaction center subunit II
  misc_feature (19)..(222): Homolog of NCBI NO: 72680 NR Description: photosystem I chain II precursor - spinach
  misc_feature (19)..(222): Homolog of NCBI NO: 15218708 NR Description: putative photosystem I reaction center subunit II
  misc_feature (19)..(222): Homolog of NCBI NO: 5732201 NR Description: photosystem I subunit II precursor [Arabidopsis
  misc_feature (19)..(222): Homolog of NCBI NO: 15235503 NR Description: putative photosystem I reaction center subunit II
  misc_feature (19)..(222): Homolog of NCBI NO: 21595031 NR Description: putative photosystem I reaction center subunit II
  misc_feature (19)..(222): Homolog of NCBI NO: 72680 NR Description: photosystem I chain II precursor - spinach
  misc_feature (19)..(222): Homolog of NCBI NO: 19855891 NR Description: Photosystem I reaction center subunit II,
  misc_feature (19)..(222): Homolog of NCBI NO: 21293 NR Description: 20 kDa protein (AA 1-212) [Spinacia oleracea]
  misc_feature (19)..(222): Homolog of NCBI NO: 131167 NR Description: Photosystem I reaction center subunit II,
  misc_feature (19)..(222): Homolog of NCBI NO: 72680 NR Description: photosystem I chain II precursor - spinach
  misc_feature (19)..(222): Homolog of NCBI NO: 21595031 NR Description: putative photosystem I reaction center subunit II
  misc_feature (19)..(222): Homolog of NCBI NO: 15235503 NR Description: putative photosystem I reaction center subunit II
  misc_feature (19)..(222): Homolog of NCBI NO: 5732201 NR Description: photosystem I subunit II precursor [Arabidopsis
  misc_feature (19)..(222): Homolog of NCBI NO: 15218708 NR Description: putative photosystem I reaction center subunit II
SSLSIYSTEKDSEKTEETMATQAAGIFSPAITTTTSAVKKLHLFSSSHRPKSLSFTKTAIRAEKTESSSAAPAVKEAPVGFTPPQLDPNTPSPIFAGSTGGLLRKAQVEEFYVITWNSPKEQIFEMPTGGAAIMREGPNLLKLARKEQCLALGTRLRSKYKITYQFYRVFPNGEVQYLHPKDGVYPEKANPGREGVGLNMRSIGKNVSPIEVKFTGKQSYDL

SEQ ID NO: 21929 - protein, 204 aa, Arabidopsis thaliana
  peptide (1)..(204): Ceres Seq. ID no. 12331620
  misc_feature (66)..(203): Pfam Name: PsaD Pfam Description: PsaD
  misc_feature (66)..(203): Pfam Name: PsaD Pfam Description: PsaD
  misc_feature (66)..(203): Pfam Name: PsaD Pfam Description: PsaD
  misc_feature (1)..(204): Homolog of NCBI NO: 131166 NR Description: Photosystem I reaction center subunit II,
  misc_feature (1)..(204): Homolog of NCBI NO: 131167 NR Description: Photosystem I reaction center subunit II,
  misc_feature (1)..(204): Homolog of NCBI NO: 34787117 NR Description: putative photosystem I reaction centre PSI-D
  misc_feature (1)..(204): Homolog of NCBI NO: 21293 NR Description: 20 kDa protein (AA 1-212) [Spinacia oleracea]
  misc_feature (1)..(204): Homolog of NCBI NO: 19855891 NR Description: Photosystem I reaction center subunit II,
  misc_feature (1)..(204): Homolog of NCBI NO: 5732201 NR Description: photosystem I subunit II precursor [Arabidopsis
  misc_feature (1)..(204): Homolog of NCBI NO: 131167 NR Description: Photosystem I reaction center subunit II,
  misc_feature (1)..(204): Homolog of NCBI NO: 34787117 NR Description: putative photosystem I reaction centre PSI-D
  misc_feature (1)..(204): Homolog of NCBI NO: 131167 NR Description: Photosystem I reaction center subunit II,
  misc_feature (1)..(204): Homolog of NCBI NO: 131166 NR Description: Photosystem I reaction center subunit II,
  misc_feature (1)..(204): Homolog of NCBI NO: 15235503 NR Description: putative photosystem I reaction center subunit II
  misc_feature (1)..(204): Homolog of NCBI NO: 21595031 NR Description: putative photosystem I reaction center subunit II
  misc_feature (1)..(204): Homolog of NCBI NO: 72680 NR Description: photosystem I chain II precursor - spinach
  misc_feature (1)..(204): Homolog of NCBI NO: 19855891 NR Description: Photosystem I reaction center subunit II,
  misc_feature (1)..(204): Homolog of NCBI NO: 21293 NR Description: 20 kDa protein (AA 1-212) [Spinacia oleracea]
  misc_feature (1)..(204): Homolog of NCBI NO: 34787117 NR Description: putative photosystem I reaction centre PSI-D
  misc_feature (1)..(204): Homolog of NCBI NO: 15218708 NR Description: putative photosystem I reaction center subunit II
  misc_feature (1)..(204): Homolog of NCBI NO: 5732201 NR Description: photosystem I subunit II precursor [Arabidopsis
  misc_feature (1)..(204): Homolog of NCBI NO: 15235503 NR Description: putative photosystem I reaction center subunit II
  misc_feature (1)..(204): Homolog of NCBI NO: 21595031 NR Description: putative photosystem I reaction center subunit II
  misc_feature (1)..(204): Homolog of NCBI NO: 72680 NR Description: photosystem I chain II precursor - spinach
  misc_feature (1)..(204): Homolog of NCBI NO: 19855891 NR Description: Photosystem I reaction center subunit II,
  misc_feature (1)..(204): Homolog of NCBI NO: 21293 NR Description: 20 kDa protein (AA 1-212) [Spinacia oleracea]
  misc_feature (1)..(204): Homolog of NCBI NO: 131166 NR Description: Photosystem I reaction center subunit II,
  misc_feature (1)..(204): Homolog of NCBI NO: 15218708 NR Description: putative photosystem I reaction center subunit II
  misc_feature (1)..(204): Homolog of NCBI NO: 72680 NR Description: photosystem I chain II precursor - spinach
  misc_feature (1)..(204): Homolog of NCBI NO: 21595031 NR Description: putative photosystem I reaction center subunit II
  misc_feature (1)..(204): Homolog of NCBI NO: 15235503 NR Description: putative photosystem I reaction center subunit II
  misc_feature (1)..(204): Homolog of NCBI NO: 5732201 NR Description: photosystem I subunit II precursor [Arabidopsis
  misc_feature (1)..(204): Homolog of NCBI NO: 15218708 NR Description: putative photosystem I reaction center subunit II
MATQAAGIFSPAITTTTSAVKKLHLFSSSHRPKSLSFTKTAIRAEKTESSSAAPAVKEAPVGFTPPQLDPNTPSPIFAGSTGGLLRKAQVEEFYVITWNSPKEQIFEMPTGGAAIMREGPNLLKLARKEQCLALGTRLRSKYKITYQFYRVFPNGEVQYLHPKDGVYPEKANPGREGVGLNMRSIGKNVSPIEVKFTGKQSYDL

SEQ ID NO: 21930 - DNA, 952 bp, Arabidopsis thaliana
  misc_feature (1)..(952): Ceres Seq. ID no. 12394134
  misc_feature: MA Experiment ID: 108434 Result: Up-regulated in Transcription
  misc_feature: MA Experiment 108434 PARAMETER Experiment Name: At_Root_Tips_cDNA_P Parameter: Tissue Value: Root Tips
  misc_feature: MA Experiment ID: 108461 Result: Down-regulated in Transcription
  misc_feature: MA Experiment 108461 PARAMETER Experiment Name: At_Germinating_Seeds_cDNA_P Parameter: Age (day) Value: 1 vs. 0
  misc_feature: MA Experiment 108461 PARAMETER Experiment Name: At_Germinating_Seeds_cDNA_P Parameter: Tissue Value: Germinating Seeds
  misc_feature: MA Experiment ID: 108462 Result: Down-regulated in Transcription
  misc_feature: MA Experiment 108462 PARAMETER Experiment Name: At_Germinating_Seeds_cDNA_P Parameter: Age (day) Value: 2 vs. 0
  misc_feature: MA Experiment 108462 PARAMETER Experiment Name: At_Germinating_Seeds_cDNA_P Parameter: Tissue Value: Germinating Seeds
  misc_feature: MA Experiment ID: 108463 Result: Down-regulated in Transcription
  misc_feature: MA Experiment 108463 PARAMETER Experiment Name: At_Germinating_Seeds_cDNA_P Parameter: Age (day) Value: 3 vs. 0
  misc_feature: MA Experiment 108463 PARAMETER Experiment Name: At_Germinating_Seeds_cDNA_P Parameter: Tissue Value: Germinating Seeds
  misc_feature: MA Experiment ID: 108464 Result: Down-regulated in Transcription
  misc_feature: MA Experiment 108464 PARAMETER Experiment Name: At_Germinating_Seeds_cDNA_P Parameter: Age (day) Value: 4 vs. 0
  misc_feature: MA Experiment 108464 PARAMETER Experiment Name: At_Germinating_Seeds_cDNA_P Parameter: Tissue Value: Germinating Seeds
  misc_feature: MA Experiment ID: 20000173 Result: Down-regulated in Transcription
  misc_feature: MA Experiment 20000173 PARAMETER Experiment Name: At_42deg_Heat_P Parameter: Age (day) Value: 14
  misc_feature: MA Experiment 20000173 PARAMETER Experiment Name: At_42deg_Heat_P Parameter: Organism Value: A. thaliana
  misc_feature: MA Experiment 20000173 PARAMETER Experiment Name: At_42deg_Heat_P Parameter: Plant Line Value: WS
  misc_feature: MA Experiment 20000173 PARAMETER Experiment Name: At_42deg_Heat_P Parameter: Temperature (deg C) Value: 42 vs. 22
  misc_feature: MA Experiment 20000173 PARAMETER Experiment Name: At_42deg_Heat_P Parameter: Timepoint (hr) Value: 6
  misc_feature: MA Experiment 20000173 PARAMETER Experiment Name: At_42deg_Heat_P Parameter: Tissue Value: Aerial
  misc_feature: MA Experiment ID: 20000184 Result: Down-regulated in Transcription
  misc_feature: MA Experiment 20000184 PARAMETER Experiment Name: At_Shoots__P Parameter: Age (day) Value: 7
  misc_feature: MA Experiment 20000184 PARAMETER Experiment Name: At_Shoots__P Parameter: Tissue Value: Shoots vs. Whole Plant
aagtttctgagatttccggatttagatttagggttttgtaactttggagagctcaagttctgtttcgttcatctccctcttaattcactttaattcagggtttagggtttcatttattttgttttccccaattcgatatgtattctgatctagtggtggctgaaactaaaagcagcaaaacggtaaagaaccgtctcaatggtggttccggtgacttctcttctcgcgggaaacaacaacaagtcacgaggaagagaggaaggcaagatgatgataagtgggagcatgatcttttcgaagacgatgacgagcctcggctttcaaaacgtagagttgaccctaaagatcttcgcttgaagctccaaaagaaacgtcatggctcgcaaattggtggacgagtatttagtgtaagcgtggcggatctacgagataagttatccaggacagtgaatccacaaacaaagaacagtaaaagggaggctgttagaccagccataaagaaggtttcagtgggaaccaaacccgagactagagcggctccgaatagagctaccaagaaggatccacagcagactgatgcatcggttgatagcttcctggaatcattgggtctcgagaaatattcgactgcatttcaagtggaagaagttgatatggatgctctcaggcatatgacagatgatgacctcaaagctttgctcataccaatgggacctaggaagaagatacttcttgctttgggagataaccgtggatagtccagcttcgagcttaggggcatgatgatacacatctcggatattgtcagaaagatgatgcattttgacttttcattgtctttttatctttctcatatgtatctcaagagacaacaagtagttagagttttgagattaaacagttgtaaccttttaacatagagagacaagaggagcaatgttggaatgtgttt

SEQ ID NO: 21931 - protein, 206 aa, Arabidopsis thaliana
  peptide (1)..(206): Ceres Seq. ID no. 12394135
  misc_feature (143)..(205): Pfam Name: SAM domain (Sterile alpha motif) Pfam Description: SAM domain (Sterile alpha motif)
  misc_feature (101)..(201): Homolog of NCBI NO: 38345636 NR Description: OSJNBb0048E02.6 [Oryza sativa (japonica
  misc_feature (149)..(201): Homolog of NCBI NO: 22330538 NR Description: hypothetical protein
  misc_feature (1)..(191): Homolog of NCBI NO: 39546279 NR Description: OSJNBa0083D01.12 [Oryza sativa (japonica
  misc_feature (1)..(202): Homolog of NCBI NO: 18397861 NR Description: expressed protein
  misc_feature (1)..(206): Homolog of NCBI NO: 30695517 NR Description: expressed protein [Arabidopsis thaliana]
MYSDLVVAETKSSKTVKNRLNGGSGDFSSRGKQQQVTRKRGRQDDDKWEHDLFEDDDEPRLSKRRVDPKDLRLKLQKKRHGSQIGGRVFSVSVADLRDKLSRTVNPQTKNSKREAVRPAIKKVSVGTKPETRAAPNRATKKDPQQTDASVDSFLESLGLEKYSTAFQVEEVDMDALRHMTDDDLKALLIPMGPRKKILLALGDNRG

SEQ ID NO: 21932 - DNA, 1085 bp, Arabidopsis thaliana
  misc_feature (1)..(1085): Ceres Seq. ID no. 13622051
  misc_feature: MA Experiment ID: 108434 Result: Down-regulated in Transcription
  misc_feature: MA Experiment 108434 PARAMETER Experiment Name: At_Root_Tips_cDNA_P Parameter: Tissue Value: Root Tips
  misc_feature: MA Experiment ID: 108435 Result: Down-regulated in Transcription
  misc_feature: MA Experiment 108435 PARAMETER Experiment Name: At_stm_Mutants_cDNA_P Parameter: Plant Line Value: wt Landsburg vs stm
  misc_feature: MA Experiment 108435 PARAMETER Experiment Name: At_stm_Mutants_cDNA_P Parameter: Tissue Value: Shoot Apical Meristem Region
  misc_feature: MA Experiment ID: 108461 Result: Up-regulated in Transcription
  misc_feature: MA Experiment 108461 PARAMETER Experiment Name: At_Germinating_Seeds_cDNA_P Parameter: Age (day) Value: 1 vs. 0
  misc_feature: MA Experiment 108461 PARAMETER Experiment Name: At_Germinating_Seeds_cDNA_P Parameter: Tissue Value: Germinating Seeds
  misc_feature: MA Experiment ID: 108462 Result: Up-regulated in Transcription
  misc_feature: MA Experiment 108462 PARAMETER Experiment Name: At_Germinating_Seeds_cDNA_P Parameter: Age (day) Value: 2 vs. 0
  misc_feature: MA Experiment 108462 PARAMETER Experiment Name: At_Germinating_Seeds_cDNA_P Parameter: Tissue Value: Germinating Seeds
  misc_feature: MA Experiment ID: 108463 Result: Up-regulated in Transcription
  misc_feature: MA Experiment 108463 PARAMETER Experiment Name: At_Germinating_Seeds_cDNA_P Parameter: Age (day) Value: 3 vs. 0
  misc_feature: MA Experiment 108463 PARAMETER Experiment Name: At_Germinating_Seeds_cDNA_P Parameter: Tissue Value: Germinating Seeds
  misc_feature: MA Experiment ID: 108464 Result: Up-regulated in Transcription
  misc_feature: MA Experiment 108464 PARAMETER Experiment Name: At_Germinating_Seeds_cDNA_P Parameter: Age (day) Value: 4 vs. 0
  misc_feature: MA Experiment 108464 PARAMETER Experiment Name: At_Germinating_Seeds_cDNA_P Parameter: Tissue Value: Germinating Seeds
  misc_feature: MA Experiment ID: 108488 Result: Up-regulated in Transcription
  misc_feature: MA Experiment ID: 108595 Result: Down-regulated in Transcription
  misc_feature: MA Experiment 108595 PARAMETER Experiment Name: At_Ler-pi_Ovule_cDNA_P Parameter: Plant Line Value: null
  misc_feature: MA Experiment ID: 20000179 Result: Up-regulated in Transcription
  misc_feature: MA Experiment 20000179 PARAMETER Experiment Name: At_Germinating_Seeds_P Parameter: Age (hr) Value: 6 vs. 0
  misc_feature: MA Experiment 20000179 PARAMETER Experiment Name: At_Germinating_Seeds_P Parameter: Tissue Value: Germinating Seeds
  misc_feature: MA Experiment ID: 20000180 Result: Up-regulated in Transcription
  misc_feature: MA Experiment 20000180 PARAMETER Experiment Name: At_Germinating_Seeds_P Parameter: Age (hr) Value: 24 vs. 0
  misc_feature: MA Experiment 20000180 PARAMETER Experiment Name: At_Germinating_Seeds_P Parameter: Tissue Value: Germinating Seeds
  misc_feature: MA Experiment ID: 20000185 Result: Down-regulated in Transcription
  misc_feature: MA Experiment 20000185 PARAMETER Experiment Name: At_Roots__P Parameter: Age (day) Value: 7 vs. 21
  misc_feature: MA Experiment 20000185 PARAMETER Experiment Name: At_Roots__P Parameter: Organism Value: A. thaliana
  misc_feature: MA Experiment 20000185 PARAMETER Experiment Name: At_Roots__P Parameter: Tissue Value: Roots vs. Whole Plant
  misc_feature: MA Experiment ID: 20000234 Result: Down-regulated in Transcription
  misc_feature: MA Experiment 20000234 PARAMETER Experiment Name: At_Siliques_P Parameter: Age (day) Value: 21
  misc_feature: MA Experiment 20000234 PARAMETER Experiment Name: At_Siliques_P Parameter: Organism Value: A. thaliana
  misc_feature: MA Experiment 20000234 PARAMETER Experiment Name: At_Siliques_P Parameter: Plant Line Value: WS
  misc_feature: MA Experiment 20000234 PARAMETER Experiment Name: At_Siliques_P Parameter: Tissue Value: Less Than 5mm Siliques vs. Whole Plant
  misc_feature: MA Experiment ID: 20000235 Result: Down-regulated in Transcription
  misc_feature: MA Experiment 20000235 PARAMETER Experiment Name: At_Siliques_P Parameter: Age (day) Value: 21
  misc_feature: MA Experiment 20000235 PARAMETER Experiment Name: At_Siliques_P Parameter: Organism Value: A. thaliana
  misc_feature: MA Experiment 20000235 PARAMETER Experiment Name: At_Siliques_P Parameter: Plant Line Value: WS
  misc_feature: MA Experiment 20000235 PARAMETER Experiment Name: At_Siliques_P Parameter: Tissue Value: 5-10mm Siliques vs. Whole Plant
  misc_feature: MA Experiment ID: 20000264 Result: Down-regulated in Transcription
  misc_feature: MA Experiment 20000264 PARAMETER Experiment Name: At_Open_Flower_P Parameter: Age (day) Value: 21
  misc_feature: MA Experiment 20000264 PARAMETER Experiment Name: At_Open_Flower_P Parameter: Plant Line Value: WS
  misc_feature: MA Experiment 20000264 PARAMETER Experiment Name: At_Open_Flower_P Parameter: Tissue Value: Open Flower vs. Whole Plant
  misc_feature: MA Experiment ID: 20000265 Result: Down-regulated in Transcription
  misc_feature: MA Experiment 20000265 PARAMETER Experiment Name: At_Open_Flower_P Parameter: Age (day) Value: 21
  misc_feature: MA Experiment 20000265 PARAMETER Experiment Name: At_Open_Flower_P Parameter: Plant Line Value: WS
  misc_feature: MA Experiment 20000265 PARAMETER Experiment Name: At_Open_Flower_P Parameter: Tissue Value: Closed Flower vs. Whole Plant
  misc_feature: MA Experiment ID: 20000286 Result: Down-regulated in Transcription
  misc_feature: MA Experiment 20000286 PARAMETER Experiment Name: At_Open_Flower_P Parameter: Age (day) Value: 21
  misc_feature: MA Experiment 20000286 PARAMETER Experiment Name: At_Open_Flower_P Parameter: Plant Line Value: WS
  misc_feature: MA Experiment 20000286 PARAMETER Experiment Name: At_Open_Flower_P Parameter: Tissue Value: Half Open vs. Whole Plant
  misc_feature: MA Experiment ID: 20000437 Result: Down-regulated in Transcription
  misc_feature: MA Experiment 20000437 PARAMETER Experiment Name: At_Drought_P Parameter: Age (day) Value: 8
  misc_feature: MA Experiment 20000437 PARAMETER Experiment Name: At_Drought_P Parameter: Organism Value: A. thaliana
  misc_feature: MA Experiment 20000437 PARAMETER Experiment Name: At_Drought_P Parameter: Plant Line Value: WS
  misc_feature: MA Experiment 20000437 PARAMETER Experiment Name: At_Drought_P Parameter: Timepoint (hr) Value: 24
  misc_feature: MA Experiment 20000437 PARAMETER Experiment Name: At_Drought_P Parameter: Tissue Value: Whole Plant
  misc_feature: MA Experiment 20000437 PARAMETER Experiment Name: At_Drought_P Parameter: Treatment Value: Drought vs. No Drought
  misc_feature: MA Experiment ID: 20000438 Result: Up-regulated in Transcription
  misc_feature: MA Experiment 20000438 PARAMETER Experiment Name: At_Shoots__P Parameter: Age (day) Value: 14
  misc_feature: MA Experiment 20000438 PARAMETER Experiment Name: At_Shoots__P Parameter: Tissue Value: Shoots vs. Whole Plant
  misc_feature: MA Experiment ID: 20000439 Result: Down-regulated in Transcription
  misc_feature: MA Experiment 20000439 PARAMETER Experiment Name: At_Roots__P Parameter: Age (day) Value: 14 vs. 21
  misc_feature: MA Experiment 20000439 PARAMETER Experiment Name: At_Roots__P Parameter: Organism Value: A. thaliana
  misc_feature: MA Experiment 20000439 PARAMETER Experiment Name: At_Roots__P Parameter: Tissue Value: Roots vs. Whole Plant
  misc_feature: MA Experiment ID: 20000573 Result: Down-regulated in Transcription
  misc_feature: MA Experiment 20000573 PARAMETER Experiment Name: At_100uM_ABA_Mutants__P Parameter: Organism Value: A. thaliana
  misc_feature: MA Experiment 20000573 PARAMETER Experiment Name: At_100uM_ABA_Mutants__P Parameter: Plant Line Value: CS22 vs. Ler wt
  misc_feature: MA Experiment 20000573 PARAMETER Experiment Name: At_100uM_ABA_Mutants__P Parameter: Timepoint (hr) Value: N/A
  misc_feature: MA Experiment 20000573 PARAMETER Experiment Name: At_100uM_ABA_Mutants__P Parameter: Tissue Value: Whole Plant
  misc_feature: MA Experiment 20000573 PARAMETER Experiment Name: At_100uM_ABA_Mutants__P Parameter: Treatment Value: None
  misc_feature: MA Experiment ID: 20000574 Result: Down-regulated in Transcription
  misc_feature: MA Experiment 20000574 PARAMETER Experiment Name: At_100uM_ABA_Mutants__P Parameter: Organism Value: A. thaliana
  misc_feature: MA Experiment 20000574 PARAMETER Experiment Name: At_100uM_ABA_Mutants__P Parameter: Plant Line Value: CS23 vs. Ler wt
  misc_feature: MA Experiment 20000574 PARAMETER Experiment Name: At_100uM_ABA_Mutants__P Parameter: Timepoint (hr) Value: N/A
  misc_feature: MA Experiment 20000574 PARAMETER Experiment Name: At_100uM_ABA_Mutants__P Parameter: Tissue Value: Whole Plant
  misc_feature: MA Experiment 20000574 PARAMETER Experiment Name: At_100uM_ABA_Mutants__P Parameter: Treatment Value: None
  misc_feature: MA Experiment ID: 20000794 Result: Down-regulated in Transcription
  misc_feature: MA Experiment 20000794 PARAMETER Experiment Name: At_Petals_P Parameter: Age (day) Value: 23-25 days
  misc_feature: MA Experiment 20000794 PARAMETER Experiment Name: At_Petals_P Parameter: Plant Line Value: WS
  misc_feature: MA Experiment 20000794 PARAMETER Experiment Name: At_Petals_P Parameter: Tissue Value: Petals vs. Whole plant
  misc_feature: MA Experiment ID: 20001557 Result: Down-regulated in Transcription
  misc_feature: MA Experiment 20001557 PARAMETER Experiment Name: At_Drought_Soil_Dry_P Parameter: Age (day) Value: 27
  misc_feature: MA Experiment 20001557 PARAMETER Experiment Name: At_Drought_Soil_Dry_P Parameter: Organism Value: A. thaliana
  misc_feature: MA Experiment 20001557 PARAMETER Experiment Name: At_Drought_Soil_Dry_P Parameter: Plant Line Value: WS
  misc_feature: MA Experiment 20001557 PARAMETER Experiment Name: At_Drought_Soil_Dry_P Parameter: Post Timepoint (hr) Value: 3
  misc_feature: MA Experiment 20001557 PARAMETER Experiment Name: At_Drought_Soil_Dry_P Parameter: Post-Treatment Value: Re-Water vs. No Drought
  misc_feature: MA Experiment 20001557 PARAMETER Experiment Name: At_Drought_Soil_Dry_P Parameter: Timepoint (day) Value: 13
  misc_feature: MA Experiment 20001557 PARAMETER Experiment Name: At_Drought_Soil_Dry_P Parameter: Treatment Value: Drought vs. No Drought
  misc_feature: MA Experiment ID: 20001757 Result: Up-regulated in Transcription
  misc_feature: MA Experiment 20001757 PARAMETER Experiment Name: At_50mM_NH4NO3_L-to-H_P Parameter: Timepoint (hr) Value: 6
  misc_feature: MA Experiment 20001757 PARAMETER Experiment Name: At_50mM_NH4NO3_L-to-H_P Parameter: Tissue Value: Leaf
  misc_feature: MA Experiment 20001757 PARAMETER Experiment Name: At_50mM_NH4NO3_L-to-H_P Parameter: Treatment Value: 50mM NH4NO3 vs 100mM Mannitol
  misc_feature: MA Experiment ID: 20001904 Result: Down-regulated in Transcription
  misc_feature: MA Experiment 20001904 PARAMETER Experiment Name: At_Drought_Reproduction_P Parameter: Age (day) Value: 37
  misc_feature: MA Experiment 20001904 PARAMETER Experiment Name: At_Drought_Reproduction_P Parameter: Organism Value: A. thaliana
  misc_feature: MA Experiment 20001904 PARAMETER Experiment Name: At_Drought_Reproduction_P Parameter: Plant Line Value: WS
  misc_feature: MA Experiment 20001904 PARAMETER Experiment Name: At_Drought_Reproduction_P Parameter: Timepoint (day) Value: 7
  misc_feature: MA Experiment 20001904 PARAMETER Experiment Name: At_Drought_Reproduction_P Parameter: Tissue Value: Rosettes
  misc_feature: MA Experiment 20001904 PARAMETER Experiment Name: At_Drought_Reproduction_P Parameter: Treatment Value: Drought vs. No Drought
  misc_feature: MA Experiment ID: 20001905 Result: Down-regulated in Transcription
  misc_feature: MA Experiment 20001905 PARAMETER Experiment Name: At_Drought_Reproduction_P Parameter: Age (day) Value: 40
  misc_feature: MA Experiment 20001905 PARAMETER Experiment Name: At_Drought_Reproduction_P Parameter: Organism Value: A. thaliana
  misc_feature: MA Experiment 20001905 PARAMETER Experiment Name: At_Drought_Reproduction_P Parameter: Plant Line Value: WS
  misc_feature: MA Experiment 20001905 PARAMETER Experiment Name: At_Drought_Reproduction_P Parameter: Timepoint (day) Value: 10
  misc_feature: MA Experiment 20001905 PARAMETER Experiment Name: At_Drought_Reproduction_P Parameter: Tissue Value: Rosettes
  misc_feature: MA Experiment 20001905 PARAMETER Experiment Name: At_Drought_Reproduction_P Parameter: Treatment Value: Drought vs. No Drought
  misc_feature: MA Experiment ID: 20001906 Result: Down-regulated in Transcription
  misc_feature: MA Experiment 20001906 PARAMETER Experiment Name: At_Drought_Reproduction_P Parameter: Age (day) Value: 35
  misc_feature: MA Experiment 20001906 PARAMETER Experiment Name: At_Drought_Reproduction_P Parameter: Organism Value: A. thaliana
  misc_feature: MA Experiment 20001906 PARAMETER Experiment Name: At_Drought_Reproduction_P Parameter: Plant Line Value: WS
  misc_feature: MA Experiment 20001906 PARAMETER Experiment Name: At_Drought_Reproduction_P Parameter: Timepoint (day) Value: 5
  misc_feature: MA Experiment 20001906 PARAMETER Experiment Name: At_Drought_Reproduction_P Parameter: Tissue Value: Siliques
  misc_feature: MA Experiment 20001906 PARAMETER Experiment Name: At_Drought_Reproduction_P Parameter: Treatment Value: Drought vs. No Drought
aatatccgtattccctctctctctccctttctatctgagcttctctctcttactctctccagagcaacaatggctgcgactgcttcttctcttacaatcgcgtcgtcattctccgaaccacggactcagatccattcctcgagacgtttgaatctccctcttcaatattcaatcccgtacaaggtgttacggagtaggagtagaagattaggactcgtcgtcagttctgtttcagctcccaacgttgagctccgtactggacctgatgatctcatttctaccctcctctctaaggttgcgaatagtgatggaggtgtgacgctaagccctgagcagcacaaggaggtggcacaagtggccggagagcttcaaaagtactgtgtcaaggagcctgtcaaaaatcctctcatttttggagattgggaagtggtgtactgttctagaccaacctctcctggtggaggctacagaagcgtgataggccgtctcttcttcaaaacgaaagagatgatacaagccatcgatgctcctgatatcgttaggaacaaagtttccattaatgcttttggttttctagacggagacgtctccttgacagggaagctgaaagcgttggacagtgagtgggtgcaggtgatatttgagcctccggaaatcaaggttggatctttggagttcaaatacgggttcgaaagcgaagtgaagcttcggatcacatacgttgatgagaaacttaggttgggattgggatctaaaggatcattgttcgtctttagaaggcgtcaataatatatacgtttctccctcgtgcatcaaccaatgcaaatcactacagaaaaaaaggaaacaacatatggggtcctgcgagagtatgatggtcaatatccacaatgctgtgtacacaaatggtgttttagatataactttgttgtaatgtaaacttcattttaagagtgtctcacttcagatgagttgttgaggaagctactggtgaacttcaacatcttttcgcaaagaattactatagcaacaaagaaagataaatgacttagcagcctttatgttcaaattcaaaacctctcacc

SEQ ID NO: 21933 - protein, 262 aa, Arabidopsis thaliana
  peptide (1)..(262): Ceres Seq. ID no. 13622052
  misc_feature (89)..(259): Pfam Name: PAP_fibrillin Pfam Description: PAP_fibrillin
  misc_feature (56)..(259): Homolog of NCBI NO: 30688146 NR Description: plastid-lipid associated protein PAP/fibrillin
  misc_feature (56)..(259): Homolog of NCBI NO: 17065226 NR Description: Unknown protein [Arabidopsis thaliana]
  misc_feature (63)..(261): Homolog of NCBI NO: 38346556 NR Description: OSJNBa0035M09.17 [Oryza sativa (japonica
  misc_feature (24)..(262): Homolog of NCBI NO: 15241221 NR Description: expressed protein [Arabidopsis thaliana]
NIRIPSLSPFLSELLSLTLSRATMAATASSLTIASSFSEPRTQIHSSRRLNLPLQYSIPYKVLRSRSRRLGLVVSSVSAPNVELRTGPDDLISTLLSKVANSDGGVTLSPEQHKEVAQVAGELQKYCVKEPVKNPLIFGDWEVVYCSRPTSPGGGYRSVIGRLFFKTKEMIQAIDAPDIVRNKVSINAFGFLDGDVSLTGKLKALDSEWVQVIFEPPEIKVGSLEFKYGFESEVKLRITYVDEKLRLGLGSKGSLFVFRRRQ

SEQ ID NO: 21934 - protein, 239 aa, Arabidopsis thaliana
  peptide (1)..(239): Ceres Seq. ID no. 13622053
  misc_feature (66)..(236): Pfam Name: PAP_fibrillin Pfam Description: PAP_fibrillin
  misc_feature (33)..(236): Homolog of NCBI NO: 30688146 NR Description: plastid-lipid associated protein PAP/fibrillin
  misc_feature (33)..(236): Homolog of NCBI NO: 17065226 NR Description: Unknown protein [Arabidopsis thaliana]
  misc_feature (40)..(238): Homolog of NCBI NO: 38346556 NR Description: OSJNBa0035M09.17 [Oryza sativa (japonica
  misc_feature (1)..(239): Homolog of NCBI NO: 15241221 NR Description: expressed protein [Arabidopsis thaliana]
MAATASSLTIASSFSEPRTQIHSSRRLNLPLQYSIPYKVLRSRSRRLGLVVSSVSAPNVELRTGPDDLISTLLSKVANSDGGVTLSPEQHKEVAQVAGELQKYCVKEPVKNPLIFGDWEVVYCSRPTSPGGGYRSVIGRLFFKTKEMIQAIDAPDIVRNKVSINAFGFLDGDVSLTGKLKALDSEWVQVIFEPPEIKVGSLEFKYGFESEVKLRITYVDEKLRLGLGSKGSLFVFRRRQ

SEQ ID NO: 21935 - DNA, 776 bp, Arabidopsis thaliana
  misc_feature (1)..(776): Ceres Seq. ID no. 12420902
  misc_feature: MA Experiment ID: 108434 Result: Up-regulated in Transcription
  misc_feature: MA Experiment 108434 PARAMETER Experiment Name: At_Root_Tips_cDNA_P Parameter: Tissue Value: Root Tips
  misc_feature: MA Experiment ID: 108668 Result: Down-regulated in Transcription
  misc_feature: MA Experiment 108668 PARAMETER Experiment Name: At_2mM_SA_cDNA_P Parameter: Plant Line Value: WS
  misc_feature: MA Experiment 108668 PARAMETER Experiment Name: At_2mM_SA_cDNA_P Parameter: Timepoint (hr) Value: 6
  misc_feature: MA Experiment 108668 PARAMETER Experiment Name: At_2mM_SA_cDNA_P Parameter: Treatment Value: 2mM SA vs. No Treatment
  misc_feature: MA Experiment ID: 20000069 Result: Down-regulated in Transcription
  misc_feature: MA Experiment 20000069 PARAMETER Experiment Name: At_100uM_ABA_Mutants_cDNA_P Parameter: Plant Line Value: CS23
  misc_feature: MA Experiment 20000069 PARAMETER Experiment Name: At_100uM_ABA_Mutants_cDNA_P Parameter: Timepoint (hr) Value: 6
  misc_feature: MA Experiment 20000069 PARAMETER Experiment Name: At_100uM_ABA_Mutants_cDNA_P Parameter: Tissue Value: Aerial
  misc_feature: MA Experiment 20000069 PARAMETER Experiment Name: At_100uM_ABA_Mutants_cDNA_P Parameter: Treatment Value: 100uM ABA vs. No Treatment
  misc_feature: MA Experiment ID: 20000070 Result: Down-regulated in Transcription
  misc_feature: MA Experiment 20000070 PARAMETER Experiment Name: At_100uM_ABA_Mutants_cDNA_P Parameter: Plant Line Value: CS24
  misc_feature: MA Experiment 20000070 PARAMETER Experiment Name: At_100uM_ABA_Mutants_cDNA_P Parameter: Timepoint (hr) Value: 6
  misc_feature: MA Experiment 20000070 PARAMETER Experiment Name: At_100uM_ABA_Mutants_cDNA_P Parameter: Tissue Value: Aerial
  misc_feature: MA Experiment 20000070 PARAMETER Experiment Name: At_100uM_ABA_Mutants_cDNA_P Parameter: Treatment Value: 100uM ABA vs. No Treatment
  misc_feature: MA Experiment ID: 20000072 Result: Down-regulated in Transcription
  misc_feature: MA Experiment 20000072 PARAMETER Experiment Name: At_100uM_ABA_Mutants_cDNA_P Parameter: Plant Line Value: CS8105
  misc_feature: MA Experiment 20000072 PARAMETER Experiment Name: At_100uM_ABA_Mutants_cDNA_P Parameter: Timepoint (hr) Value: 6
  misc_feature: MA Experiment 20000072 PARAMETER Experiment Name: At_100uM_ABA_Mutants_cDNA_P Parameter: Tissue Value: Aerial
  misc_feature: MA Experiment 20000072 PARAMETER Experiment Name: At_100uM_ABA_Mutants_cDNA_P Parameter: Treatment Value: 100uM ABA vs. No Treatment
  misc_feature: MA Experiment ID: 20000087 Result: Down-regulated in Transcription
  misc_feature: MA Experiment 20000087 PARAMETER Experiment Name: At_100uM_ABA_Mutants_cDNA_P Parameter: Plant Line Value: WS
  misc_feature: MA Experiment 20000087 PARAMETER Experiment Name: At_100uM_ABA_Mutants_cDNA_P Parameter: Timepoint (hr) Value: 6
  misc_feature: MA Experiment 20000087 PARAMETER Experiment Name: At_100uM_ABA_Mutants_cDNA_P Parameter: Tissue Value: Aerial
  misc_feature: MA Experiment 20000087 PARAMETER Experiment Name: At_100uM_ABA_Mutants_cDNA_P Parameter: Treatment Value: 100uM ABA vs. No Treatment
  misc_feature: MA Experiment ID: 20000090 Result: Down-regulated in Transcription
  misc_feature: MA Experiment ID: 20000169 Result: Up-regulated in Transcription
  misc_feature: MA Experiment 20000169 PARAMETER Experiment Name: At_100uM_ABA_P Parameter: Age (day) Value: 14
  misc_feature: MA Experiment 20000169 PARAMETER Experiment Name: At_100uM_ABA_P Parameter: Organism Value: A. thaliana
  misc_feature: MA Experiment 20000169 PARAMETER Experiment Name: At_100uM_ABA_P Parameter: Plant Line Value: WS
  misc_feature: MA Experiment 20000169 PARAMETER Experiment Name: At_100uM_ABA_P Parameter: Timepoint (hr) Value: 6
  misc_feature: MA Experiment 20000169 PARAMETER Experiment Name: At_100uM_ABA_P Parameter: Tissue Value: Aerial
  misc_feature: MA Experiment 20000169 PARAMETER Experiment Name: At_100uM_ABA_P Parameter: Treatment Value: 100uM ABA vs. No Treatment
  misc_feature: MA Experiment ID: 20000180 Result: Up-regulated in Transcription
  misc_feature: MA Experiment 20000180 PARAMETER Experiment Name: At_Germinating_Seeds_P Parameter: Age (hr) Value: 24 vs. 0
  misc_feature: MA Experiment 20000180 PARAMETER Experiment Name: At_Germinating_Seeds_P Parameter: Tissue Value: Germinating Seeds
  misc_feature: MA Experiment ID: 20000184 Result: Up-regulated in Transcription
  misc_feature: MA Experiment 20000184 PARAMETER Experiment Name: At_Shoots__P Parameter: Age (day) Value: 7
  misc_feature: MA Experiment 20000184 PARAMETER Experiment Name: At_Shoots__P Parameter: Tissue Value: Shoots vs. Whole Plant
  misc_feature: MA Experiment ID: 20000227 Result: Down-regulated in Transcription
  misc_feature: MA Experiment 20000227 PARAMETER Experiment Name: At_Root-Tips-vs-Tops_P Parameter: Tissue Value: Root Tips vs. Root Tops
  misc_feature: MA Experiment ID: 20000438 Result: Up-regulated in Transcription
  misc_feature: MA Experiment 20000438 PARAMETER Experiment Name: At_Shoots__P Parameter: Age (day) Value: 14
  misc_feature: MA Experiment 20000438 PARAMETER Experiment Name: At_Shoots__P Parameter: Tissue Value: Shoots vs. Whole Plant
  misc_feature: MA Experiment ID: 20000495 Result: Up-regulated in Transcription
  misc_feature: MA Experiment 20000495 PARAMETER Experiment Name: At_Guard_Cells_P Parameter: Harvest Date Value: 8/2/2002
  misc_feature: MA Experiment 20000495 PARAMETER Experiment Name: At_Guard_Cells_P Parameter: Organism Value: A. thaliana
  misc_feature: MA Experiment 20000495 PARAMETER Experiment Name: At_Guard_Cells_P Parameter: Tissue Value: Guard Cells vs. Leaves
  misc_feature: MA Experiment ID: 20000496 Result: Up-regulated in Transcription
  misc_feature: MA Experiment 20000496 PARAMETER Experiment Name: At_Guard_Cells_P Parameter: Harvest Date Value: 7/19/2002
  misc_feature: MA Experiment 20000496 PARAMETER Experiment Name: At_Guard_Cells_P Parameter: Organism Value: Canola
  misc_feature: MA Experiment 20000496 PARAMETER Experiment Name: At_Guard_Cells_P Parameter: Tissue Value: Guard Cells vs. Leaves
  misc_feature: MA Experiment ID: 20000794 Result: Down-regulated in Transcription
  misc_feature: MA Experiment 20000794 PARAMETER Experiment Name: At_Petals_P Parameter: Age (day) Value: 23-25 days
  misc_feature: MA Experiment 20000794 PARAMETER Experiment Name: At_Petals_P Parameter: Plant Line Value: WS
  misc_feature: MA Experiment 20000794 PARAMETER Experiment Name: At_Petals_P Parameter: Tissue Value: Petals vs. Whole plant
  misc_feature: MA Experiment ID: 20001248 Result: Down-regulated in Transcription
  misc_feature: MA Experiment 20001248 PARAMETER Experiment Name: At_Far-red-induction_P Parameter: Age (day) Value: 7
  misc_feature: MA Experiment 20001248 PARAMETER Experiment Name: At_Far-red-induction_P Parameter: Light Value: Far-red vs. White
  misc_feature: MA Experiment 20001248 PARAMETER Experiment Name: At_Far-red-induction_P Parameter: Organism Value: A. thaliana
  misc_feature: MA Experiment 20001248 PARAMETER Experiment Name: At_Far-red-induction_P Parameter: Plant Line Value: Columbia
  misc_feature: MA Experiment 20001248 PARAMETER Experiment Name: At_Far-red-induction_P Parameter: Timepoint (hr) Value: 4
  misc_feature: MA Experiment 20001248 PARAMETER Experiment Name: At_Far-red-induction_P Parameter: Tissue Value: Whole Plant
attcacacctcttgttaccttcaaaaccttctctcaatctcctccattatccttctctttttctctctccctgcaactggctccatcccaaagtgcttcgttctggtacagcgaccatggcagtttttgttcttgtgatgattttgttggccatggctggtcactcaagtgggacatggtgtgtatgcaaagaagggttaagcgaggcaatgctgcagaagacattggactacgcatgtggtgcaggagctgattgtggacccattcaccagaccgggccttgctttaaccctaacaccgtcaagtctcactgctcctacgccgtcaacagcttctttcagaagaaaggtcagtctctgggcacttgtgactttgctggcacagccaccttctcagcctctgatcccagctacactacttgtcctttccctgcaagtgccagtggaagtgggacaacgactccagtgacgacaacaccttcgacaagagtccctacaacaactaatacaagaccctacacaatcacaccatcaacaggaggaggtttgggaataccgtctggtattaacccggattacacagatccatcctttggattcaaactccaaagcccaagatttggattcatagtcttgttcactctcttcctacccttttacttgtttagctaactaagtgatcatgtgagtagtgtgtgtgggtctcaatctaatgtaatgatggaatctatggagatagagacatttttttgttccatctttgtctgtttttccagc

SEQ ID NO: 21936 - protein, 222 aa, Arabidopsis thaliana
  peptide (1)..(222): Ceres Seq. ID no. 12420903
  misc_feature (53)..(204): Homolog of NCBI NO: 34912962 NR Description: beta-1,3 glucanase-like protein
  misc_feature (39)..(204): Homolog of NCBI NO: 25404810 NR Description: unknown protein, 45065-49536 [imported] -
  misc_feature (39)..(189): Homolog of NCBI NO: 22325443 NR Description: similar to glycosyl hydrolase family 17; protein
  misc_feature (39)..(204): Homolog of NCBI NO: 21553768 NR Description: unknown [Arabidopsis thaliana]
  misc_feature (39)..(204): Homolog of NCBI NO: 18409239 NR Description: unknown protein
  misc_feature (40)..(218): Homolog of NCBI NO: 22775658 NR Description: contains ESTs
  misc_feature (39)..(214): Homolog of NCBI NO: 30697478 NR Description: glycosyl hydrolase family 17 [Arabidopsis
  misc_feature (39)..(201): Homolog of NCBI NO: 15241485 NR Description: glycosyl hydrolase family 17
  misc_feature (39)..(201): Homolog of NCBI NO: 21592859 NR Description: unknown [Arabidopsis thaliana]
  misc_feature (39)..(222): Homolog of NCBI NO: 18394637 NR Description: glycosyl hydrolase family 17
SHLLLPSKPSLNLLHYPSLFLSPCNWLHPKVLRSGTATMAVFVLVMILLAMAGHSSGTWCVCKEGLSEAMLQKTLDYACGAGADCGPIHQTGPCFNPNTVKSHCSYAVNSFFQKKGQSLGTCDFAGTATFSASDPSYTTCPFPASASGSGTTTPVTTTPSTRVPTTTNTRPYTITPSTGGGLGIPSGINPDYTDPSFGFKLQSPRFGFIVLFTLFLPFYLFS

SEQ ID NO: 21937 - protein, 184 aa, Arabidopsis thaliana
  peptide (1)..(184): Ceres Seq. ID no. 12420904
  misc_feature (15)..(166): Homolog of NCBI NO: 34912962 NR Description: beta-1,3 glucanase-like protein
  misc_feature (1)..(166): Homolog of NCBI NO: 25404810 NR Description: unknown protein, 45065-49536 [imported] -
  misc_feature (1)..(151): Homolog of NCBI NO: 22325443 NR Description: similar to glycosyl hydrolase family 17; protein
  misc_feature (1)..(166): Homolog of NCBI NO: 21553768 NR Description: unknown [Arabidopsis thaliana]
  misc_feature (1)..(166): Homolog of NCBI NO: 18409239 NR Description: unknown protein
  misc_feature (2)..(180): Homolog of NCBI NO: 22775658 NR Description: contains ESTs
  misc_feature (1)..(176): Homolog of NCBI NO: 30697478 NR Description: glycosyl hydrolase family 17 [Arabidopsis
  misc_feature (1)..(163): Homolog of NCBI NO: 15241485 NR Description: glycosyl hydrolase family 17
  misc_feature (1)..(163): Homolog of NCBI NO: 21592859 NR Description: unknown [Arabidopsis thaliana]
  misc_feature (1)..(184): Homolog of NCBI NO: 18394637 NR Description: glycosyl hydrolase family 17
MAVFVLVMILLAMAGHSSGTWCVCKEGLSEAMLQKTLDYACGAGADCGPIHQTGPCFNPNTVKSHCSYAVNSFFQKKGQSLGTCDFAGTATFSASDPSYTTCPFPASASGSGTTTPVTTTPSTRVPTTTNTRPYTITPSTGGGLGIPSGINPDYTDPSFGFKLQSPRFGFIVLFTLFLPFYLFS

SEQ ID NO: 21938 - protein, 177 aa, Arabidopsis thaliana
  peptide (1)..(177): Ceres Seq. ID no. 12420905
  misc_feature (8)..(159): Homolog of NCBI NO: 34912962 NR Description: beta-1,3 glucanase-like protein
  misc_feature (1)..(159): Homolog of NCBI NO: 25404810 NR Description: unknown protein, 45065-49536 [imported] -
  misc_feature (1)..(144): Homolog of NCBI NO: 22325443 NR Description: similar to glycosyl hydrolase family 17; protein
  misc_feature (1)..(159): Homolog of NCBI NO: 21553768 NR Description: unknown [Arabidopsis thaliana]
  misc_feature (1)..(159): Homolog of NCBI NO: 18409239 NR Description: unknown protein
  misc_feature (1)..(173): Homolog of NCBI NO: 22775658 NR Description: contains ESTs
  misc_feature (1)..(169): Homolog of NCBI NO: 30697478 NR Description: glycosyl hydrolase family 17 [Arabidopsis
  misc_feature (1)..(156): Homolog of NCBI NO: 15241485 NR Description: glycosyl hydrolase family 17
  misc_feature (1)..(156): Homolog of NCBI NO: 21592859 NR Description: unknown [Arabidopsis thaliana]
  misc_feature (1)..(177): Homolog of NCBI NO: 18394637 NR Description: glycosyl hydrolase family 17
MILLAMAGHSSGTWCVCKEGLSEAMLQKTLDYACGAGADCGPIHQTGPCFNPNTVKSHCSYAVNSFFQKKGQSLGTCDFAGTATFSASDPSYTTCPFPASASGSGTTTPVTTTPSTRVPTTTNTRPYTITPSTGGGLGIPSGINPDYTDPSFGFKLQSPRFGFIVLFTLFLPFYLFS

SEQ ID NO: 21939 - DNA, 1408 bp, Arabidopsis thaliana
  misc_feature (1)..(1408): Ceres Seq. ID no. 13495671
  misc_feature: MA Experiment ID: 108463 Result: Up-regulated in Transcription
  misc_feature: MA Experiment 108463 PARAMETER Experiment Name: At_Germinating_Seeds_cDNA_P Parameter: Age (day) Value: 3 vs. 0
  misc_feature: MA Experiment 108463 PARAMETER Experiment Name: At_Germinating_Seeds_cDNA_P Parameter: Tissue Value: Germinating Seeds
  misc_feature: MA Experiment ID: 108488 Result: Down-regulated in Transcription
  misc_feature: MA Experiment ID: 108561 Result: Up-regulated in Transcription
  misc_feature: MA Experiment 108561 PARAMETER Experiment Name: At_100uM_ABA_cDNA_P Parameter: Timepoint (hr) Value: 6
  misc_feature: MA Experiment 108561 PARAMETER Experiment Name: At_100uM_ABA_cDNA_P Parameter: Tissue Value: Aerial
  misc_feature: MA Experiment 108561 PARAMETER Experiment Name: At_100uM_ABA_cDNA_P Parameter: Treatment Value: 100uM ABA vs. No Treatment
  misc_feature: MA Experiment ID: 108572 Result: Up-regulated in Transcription
  misc_feature: MA Experiment 108572 PARAMETER Experiment Name: At_Drought_cDNA_P Parameter: Timepoint (hr) Value: 1
  misc_feature: MA Experiment 108572 PARAMETER Experiment Name: At_Drought_cDNA_P Parameter: Tissue Value: Aerial
  misc_feature: MA Experiment 108572 PARAMETER Experiment Name: At_Drought_cDNA_P Parameter: Treatment Value: Drought vs. No Drought
  misc_feature: MA Experiment ID: 108573 Result: Up-regulated in Transcription
  misc_feature: MA Experiment 108573 PARAMETER Experiment Name: At_Drought_cDNA_P Parameter: Timepoint (hr) Value: 6
  misc_feature: MA Experiment 108573 PARAMETER Experiment Name: At_Drought_cDNA_P Parameter: Tissue Value: Aerial
  misc_feature: MA Experiment 108573 PARAMETER Experiment Name: At_Drought_cDNA_P Parameter: Treatment Value: Drought vs. No Drought
  misc_feature: MA Experiment ID: 108576 Result: Up-regulated in Transcription
  misc_feature: MA Experiment 108576 PARAMETER Experiment Name: At_42deg_Heat_cDNA_P Parameter: Temperature (deg C) Value: 42 vs. 22
  misc_feature: MA Experiment 108576 PARAMETER Experiment Name: At_42deg_Heat_cDNA_P Parameter: Timepoint (hr) Value: 1
  misc_feature: MA Experiment 108576 PARAMETER Experiment Name: At_42deg_Heat_cDNA_P Parameter: Tissue Value: Aerial
  misc_feature: MA Experiment ID: 108595 Result: Up-regulated in Transcription
  misc_feature: MA Experiment 108595 PARAMETER Experiment Name: At_Ler-pi_Ovule_cDNA_P Parameter: Plant Line Value: null
  misc_feature: MA Experiment ID: 108607 Result: Up-regulated in Transcription
  misc_feature: MA Experiment 108607 PARAMETER Experiment Name: At_100uM_ABA_cDNA_P Parameter: Timepoint (hr) Value: 4
  misc_feature: MA Experiment 108607 PARAMETER Experiment Name: At_100uM_ABA_cDNA_P Parameter: Tissue Value: Aerial
  misc_feature: MA Experiment 108607 PARAMETER Experiment Name: At_100uM_ABA_cDNA_P Parameter: Treatment Value: 100uM ABA vs. No Treatment
  misc_feature: MA Experiment ID: 20000093 Result: Up-regulated in Transcription
  misc_feature: MA Experiment 20000093 PARAMETER Experiment Name: At_42deg_Heat_cDNA_P Parameter: Temperature (deg C) Value: 42 vs. 22
  misc_feature: MA Experiment 20000093 PARAMETER Experiment Name: At_42deg_Heat_cDNA_P Parameter: Timepoint (hr) Value: 0.5
  misc_feature: MA Experiment 20000093 PARAMETER Experiment Name: At_42deg_Heat_cDNA_P Parameter: Tissue Value: Aerial
  misc_feature: MA Experiment ID: 20000111 Result: Up-regulated in Transcription
  misc_feature: MA Experiment 20000111 PARAMETER Experiment Name: At_42deg_Heat_cDNA_P Parameter: Temperature (deg C) Value: 42 vs. 22
  misc_feature: MA Experiment 20000111 PARAMETER Experiment Name: At_42deg_Heat_cDNA_P Parameter: Timepoint (hr) Value: 6
  misc_feature: MA Experiment 20000111 PARAMETER Experiment Name: At_42deg_Heat_cDNA_P Parameter: Tissue Value: Aerial
  misc_feature: MA Experiment ID: 20000112 Result: Up-regulated in Transcription
  misc_feature: MA Experiment 20000112 PARAMETER Experiment Name: At_42deg_Heat_cDNA_P Parameter: Temperature (deg C) Value: 42 vs. 22
  misc_feature: MA Experiment 20000112 PARAMETER Experiment Name: At_42deg_Heat_cDNA_P Parameter: Timepoint (hr) Value: 2
  misc_feature: MA Experiment 20000112 PARAMETER Experiment Name: At_42deg_Heat_cDNA_P Parameter: Tissue Value: Aerial
  misc_feature: MA Experiment ID: 20000113 Result: Up-regulated in Transcription
  misc_feature: MA Experiment 20000113 PARAMETER Experiment Name: At_42deg_Heat_cDNA_P Parameter: Temperature (deg C) Value: 42 vs. 22
  misc_feature: MA Experiment 20000113 PARAMETER Experiment Name: At_42deg_Heat_cDNA_P Parameter: Timepoint (hr) Value: 8
  misc_feature: MA Experiment 20000113 PARAMETER Experiment Name: At_42deg_Heat_cDNA_P Parameter: Tissue Value: Aerial
  misc_feature: MA Experiment ID: 20000171 Result: Up-regulated in Transcription
  misc_feature: MA Experiment 20000171 PARAMETER Experiment Name: At_42deg_Heat_P Parameter: Age (day) Value: 14
  misc_feature: MA Experiment 20000171 PARAMETER Experiment Name: At_42deg_Heat_P Parameter: Organism Value: A. thaliana
  misc_feature: MA Experiment 20000171 PARAMETER Experiment Name: At_42deg_Heat_P Parameter: Plant Line Value: WS
  misc_feature: MA Experiment 20000171 PARAMETER Experiment Name: At_42deg_Heat_P Parameter: Temperature (deg C) Value: 42 vs. 22
  misc_feature: MA Experiment 20000171 PARAMETER Experiment Name: At_42deg_Heat_P Parameter: Timepoint (hr) Value: 1
  misc_feature: MA Experiment 20000171 PARAMETER Experiment Name: At_42deg_Heat_P Parameter: Tissue Value: Aerial
  misc_feature: MA Experiment ID: 20000173 Result: Up-regulated in Transcription
  misc_feature: MA Experiment 20000173 PARAMETER Experiment Name: At_42deg_Heat_P Parameter: Age (day) Value: 14
  misc_feature: MA Experiment 20000173 PARAMETER Experiment Name: At_42deg_Heat_P Parameter: Organism Value: A. thaliana
  misc_feature: MA Experiment 20000173 PARAMETER Experiment Name: At_42deg_Heat_P Parameter: Plant Line Value: WS
  misc_feature: MA Experiment 20000173 PARAMETER Experiment Name: At_42deg_Heat_P Parameter: Temperature (deg C) Value: 42 vs. 22
  misc_feature: MA Experiment 20000173 PARAMETER Experiment Name: At_42deg_Heat_P Parameter: Timepoint (hr) Value: 6
  misc_feature: MA Experiment 20000173 PARAMETER Experiment Name: At_42deg_Heat_P Parameter: Tissue Value: Aerial
  misc_feature: MA Experiment ID: 20000179 Result: Up-regulated in Transcription
  misc_feature: MA Experiment 20000179 PARAMETER Experiment Name: At_Germinating_Seeds_P Parameter: Age (hr) Value: 6 vs. 0
  misc_feature: MA Experiment 20000179 PARAMETER Experiment Name: At_Germinating_Seeds_P Parameter: Tissue Value: Germinating Seeds
  misc_feature: MA Experiment ID: 20000234 Result: Down-regulated in Transcription
  misc_feature: MA Experiment 20000234 PARAMETER Experiment Name: At_Siliques_P Parameter: Age (day) Value: 21
  misc_feature: MA Experiment 20000234 PARAMETER Experiment Name: At_Siliques_P Parameter: Organism Value: A. thaliana
  misc_feature: MA Experiment 20000234 PARAMETER Experiment Name: At_Siliques_P Parameter: Plant Line Value: WS
  misc_feature: MA Experiment 20000234 PARAMETER Experiment Name: At_Siliques_P Parameter: Tissue Value: Less Than 5mm Siliques vs. Whole Plant
  misc_feature: MA Experiment ID: 20000235 Result: Down-regulated in Transcription
  misc_feature: MA Experiment 20000235 PARAMETER Experiment Name: At_Siliques_P Parameter: Age (day) Value: 21
  misc_feature: MA Experiment 20000235 PARAMETER Experiment Name: At_Siliques_P Parameter: Organism Value: A. thaliana
  misc_feature: MA Experiment 20000235 PARAMETER Experiment Name: At_Siliques_P Parameter: Plant Line Value: WS
  misc_feature: MA Experiment 20000235 PARAMETER Experiment Name: At_Siliques_P Parameter: Tissue Value: 5-10mm Siliques vs. Whole Plant
  misc_feature: MA Experiment ID: 20000436 Result: Up-regulated in Transcription
  misc_feature: MA Experiment 20000436 PARAMETER Experiment Name: At_Drought_P Parameter: Age (day) Value: 7
  misc_feature: MA Experiment 20000436 PARAMETER Experiment Name: At_Drought_P Parameter: Organism Value: A. thaliana
  misc_feature: MA Experiment 20000436 PARAMETER Experiment Name: At_Drought_P Parameter: Plant Line Value: WS
  misc_feature: MA Experiment 20000436 PARAMETER Experiment Name: At_Drought_P Parameter: Timepoint (hr) Value: 12
  misc_feature: MA Experiment 20000436 PARAMETER Experiment Name: At_Drought_P Parameter: Tissue Value: Whole Plant
  misc_feature: MA Experiment 20000436 PARAMETER Experiment Name: At_Drought_P Parameter: Treatment Value: Drought vs. No Drought
  misc_feature: MA Experiment ID: 20000437 Result: Up-regulated in Transcription
  misc_feature: MA Experiment 20000437 PARAMETER Experiment Name: At_Drought_P Parameter: Age (day) Value: 8
  misc_feature: MA Experiment 20000437 PARAMETER Experiment Name: At_Drought_P Parameter: Organism Value: A. thaliana
  misc_feature: MA Experiment 20000437 PARAMETER Experiment Name: At_Drought_P Parameter: Plant Line Value: WS
  misc_feature: MA Experiment 20000437 PARAMETER Experiment Name: At_Drought_P Parameter: Timepoint (hr) Value: 24
  misc_feature: MA Experiment 20000437 PARAMETER Experiment Name: At_Drought_P Parameter: Tissue Value: Whole Plant
  misc_feature: MA Experiment 20000437 PARAMETER Experiment Name: At_Drought_P Parameter: Treatment Value: Drought vs. No Drought
  misc_feature: MA Experiment ID: 20000441 Result: Up-regulated in Transcription
  misc_feature: MA Experiment 20000441 PARAMETER Experiment Name: At_1uM_BR-BRZ__P Parameter: Tissue Value: Shoot Apices
  misc_feature: MA Experiment 20000441 PARAMETER Experiment Name: At_1uM_BR-BRZ__P Parameter: Treatment Value: 1uM BR vs. No Treatment
  misc_feature: MA Experiment ID: 20000460 Result: Up-regulated in Transcription
  misc_feature: MA Experiment 20000460 PARAMETER Experiment Name: At_10percent_PEG_P Parameter: Age (day) Value: 12
  misc_feature: MA Experiment 20000460 PARAMETER Experiment Name: At_10percent_PEG_P Parameter: Organism Value: A. thaliana
  misc_feature: MA Experiment 20000460 PARAMETER Experiment Name: At_10percent_PEG_P Parameter: Plant Line Value: WS
  misc_feature: MA Experiment 20000460 PARAMETER Experiment Name: At_10percent_PEG_P Parameter: Timepoint (day) Value: 12
  misc_feature: MA Experiment 20000460 PARAMETER Experiment Name: At_10percent_PEG_P Parameter: Tissue Value: Whole Plant
  misc_feature: MA Experiment 20000460 PARAMETER Experiment Name: At_10percent_PEG_P Parameter: Treatment Value: 10percent PEG vs. No Treatment
  misc_feature: MA Experiment ID: 20000573 Result: Down-regulated in Transcription
  misc_feature: MA Experiment 20000573 PARAMETER Experiment Name: At_100uM_ABA_Mutants__P Parameter: Organism Value: A. thaliana
  misc_feature: MA Experiment 20000573 PARAMETER Experiment Name: At_100uM_ABA_Mutants__P Parameter: Plant Line Value: CS22 vs. Ler wt
  misc_feature: MA Experiment 20000573 PARAMETER Experiment Name: At_100uM_ABA_Mutants__P Parameter: Timepoint (hr) Value: N/A
  misc_feature: MA Experiment 20000573 PARAMETER Experiment Name: At_100uM_ABA_Mutants__P Parameter: Tissue Value: Whole Plant
  misc_feature: MA Experiment 20000573 PARAMETER Experiment Name: At_100uM_ABA_Mutants__P Parameter: Treatment Value: None
  misc_feature: MA Experiment ID: 20000574 Result: Down-regulated in Transcription
  misc_feature: MA Experiment 20000574 PARAMETER Experiment Name: At_100uM_ABA_Mutants__P Parameter: Organism Value: A. thaliana
  misc_feature: MA Experiment 20000574 PARAMETER Experiment Name: At_100uM_ABA_Mutants__P Parameter: Plant Line Value: CS23 vs. Ler wt
  misc_feature: MA Experiment 20000574 PARAMETER Experiment Name: At_100uM_ABA_Mutants__P Parameter: Timepoint (hr) Value: N/A
  misc_feature: MA Experiment 20000574 PARAMETER Experiment Name: At_100uM_ABA_Mutants__P Parameter: Tissue Value: Whole Plant
  misc_feature: MA Experiment 20000574 PARAMETER Experiment Name: At_100uM_ABA_Mutants__P Parameter: Treatment Value: None
  misc_feature: MA Experiment ID: 20001248 Result: Down-regulated in Transcription
  misc_feature: MA Experiment 20001248 PARAMETER Experiment Name: At_Far-red-induction_P Parameter: Age (day) Value: 7
  misc_feature: MA Experiment 20001248 PARAMETER Experiment Name: At_Far-red-induction_P Parameter: Light Value: Far-red vs. White
  misc_feature: MA Experiment 20001248 PARAMETER Experiment Name: At_Far-red-induction_P Parameter: Organism Value: A. thaliana
  misc_feature: MA Experiment 20001248 PARAMETER Experiment Name: At_Far-red-induction_P Parameter: Plant Line Value: Columbia
  misc_feature: MA Experiment 20001248 PARAMETER Experiment Name: At_Far-red-induction_P Parameter: Timepoint (hr) Value: 4
  misc_feature: MA Experiment 20001248 PARAMETER Experiment Name: At_Far-red-induction_P Parameter: Tissue Value: Whole Plant
  misc_feature: MA Experiment ID: 20001451 Result: Up-regulated in Transcription
  misc_feature: MA Experiment 20001451 PARAMETER Experiment Name: At_Far-red-induction_P Parameter: Age (day) Value: 7
  misc_feature: MA Experiment 20001451 PARAMETER Experiment Name: At_Far-red-induction_P Parameter: Light Value: Far-red vs. White
  misc_feature: MA Experiment 20001451 PARAMETER Experiment Name: At_Far-red-induction_P Parameter: Organism Value: A. thaliana
  misc_feature: MA Experiment 20001451 PARAMETER Experiment Name: At_Far-red-induction_P Parameter: Plant Line Value: Columbia
  misc_feature: MA Experiment 20001451 PARAMETER Experiment Name: At_Far-red-induction_P Parameter: Timepoint (hr) Value: 24
  misc_feature: MA Experiment 20001451 PARAMETER Experiment Name: At_Far-red-induction_P Parameter: Tissue Value: Whole Plant
  misc_feature: MA Experiment ID: 20001554 Result: Up-regulated in Transcription
  misc_feature: MA Experiment 20001554 PARAMETER Experiment Name: At_Drought_Soil_Dry_P Parameter: Age (day) Value: 21
  misc_feature: MA Experiment 20001554 PARAMETER Experiment Name: At_Drought_Soil_Dry_P Parameter: Organism Value: A. thaliana
  misc_feature: MA Experiment 20001554 PARAMETER Experiment Name: At_Drought_Soil_Dry_P Parameter: Plant Line Value: WS
  misc_feature: MA Experiment 20001554 PARAMETER Experiment Name: At_Drought_Soil_Dry_P Parameter: Post Timepoint (hr) Value: None
  misc_feature: MA Experiment 20001554 PARAMETER Experiment Name: At_Drought_Soil_Dry_P Parameter: Post-Treatment Value: None
  misc_feature: MA Experiment 20001554 PARAMETER Experiment Name: At_Drought_Soil_Dry_P Parameter: Timepoint (day) Value: 7
  misc_feature: MA Experiment 20001554 PARAMETER Experiment Name: At_Drought_Soil_Dry_P Parameter: Treatment Value: Drought vs. No Drought
  misc_feature: MA Experiment ID: 20001905 Result: Up-regulated in Transcription
  misc_feature: MA Experiment 20001905 PARAMETER Experiment Name: At_Drought_Reproduction_P Parameter: Age (day) Value: 40
  misc_feature: MA Experiment 20001905 PARAMETER Experiment Name: At_Drought_Reproduction_P Parameter: Organism Value: A. thaliana
  misc_feature: MA Experiment 20001905 PARAMETER Experiment Name: At_Drought_Reproduction_P Parameter: Plant Line Value: WS
  misc_feature: MA Experiment 20001905 PARAMETER Experiment Name: At_Drought_Reproduction_P Parameter: Timepoint (day) Value: 10
  misc_feature: MA Experiment 20001905 PARAMETER Experiment Name: At_Drought_Reproduction_P Parameter: Tissue Value: Rosettes
  misc_feature: MA Experiment 20001905 PARAMETER Experiment Name: At_Drought_Reproduction_P Parameter: Treatment Value: Drought vs. No Drought
  misc_feature: MA Experiment ID: 20001906 Result: Up-regulated in Transcription
  misc_feature: MA Experiment 20001906 PARAMETER Experiment Name: At_Drought_Reproduction_P Parameter: Age (day) Value: 35
  misc_feature: MA Experiment 20001906 PARAMETER Experiment Name: At_Drought_Reproduction_P Parameter: Organism Value: A. thaliana
  misc_feature: MA Experiment 20001906 PARAMETER Experiment Name: At_Drought_Reproduction_P Parameter: Plant Line Value: WS
  misc_feature: MA Experiment 20001906 PARAMETER Experiment Name: At_Drought_Reproduction_P Parameter: Timepoint (day) Value: 5
  misc_feature: MA Experiment 20001906 PARAMETER Experiment Name: At_Drought_Reproduction_P Parameter: Tissue Value: Siliques
  misc_feature: MA Experiment 20001906 PARAMETER Experiment Name: At_Drought_Reproduction_P Parameter: Treatment Value: Drought vs. No Drought
  misc_feature: MA Experiment ID: 20001911 Result: Up-regulated in Transcription
  misc_feature: MA Experiment 20001911 PARAMETER Experiment Name: At_Drought_Reproduction_P Parameter: Age (day) Value: 40
  misc_feature: MA Experiment 20001911 PARAMETER Experiment Name: At_Drought_Reproduction_P Parameter: Organism Value: A. thaliana
  misc_feature: MA Experiment 20001911 PARAMETER Experiment Name: At_Drought_Reproduction_P Parameter: Plant Line Value: WS
  misc_feature: MA Experiment 20001911 PARAMETER Experiment Name: At_Drought_Reproduction_P Parameter: Timepoint (day) Value: 10
  misc_feature: MA Experiment 20001911 PARAMETER Experiment Name: At_Drought_Reproduction_P Parameter: Tissue Value: Flowers
  misc_feature: MA Experiment 20001911 PARAMETER Experiment Name: At_Drought_Reproduction_P Parameter: Treatment Value: Drought vs. No Drought
tttttttttttttttcttctgctttcgtgactttcaggggacacttttgtttttataacttacgcttaaaatcctatgaattcgccgccggttgacgcaatgattaccggagaatcatcgtcacaaagatctatcccaacgccgtttctcacaaaaacgtttaacctcgttgaagatagttccatcgacgatgttatctcatggaacgaagatggttcctctttcatcgtatggaatccgacagatttcgctaaagatttgcttcctaaacacttcaaacacaacaatttctctagtttcgttcgtcagctcaacacttacggattcaaaaaagttgtaccggatcgatgggagttttcaaacgatttctttaagagaggagaaaaacgtcttctccgtgagatccaacgtcggaaaataacaacgacgcatcaaacagttgttgctccttcgtcggaacaacgaaaccagacgatggttgtatcaccgtcaaattccggggaagataataataataatcaggtgatgtcttcgtctccgtcgtcgtggtattgtcatcaaacgaagacgactgggaatggtggtttatcagtggagttattggaagagaacgagaagcttcggagtcaaaacattcagctaaaccgtgagcttactcagatgaaatctatctgcgataatatctatagtctcatgtcgaattacgtcggatctcagcccactgatcggagttattctcccggaggtagtagtagtcaaccgatggagtttttaccggcgaagcggttttcggagatggagattgaagaagaagaagaagcgagtccgaggttgtttggtgttccgattgggttaaaacggacgagaagtgaaggtgttcaggtgaagacgacggcggtggttggggaaaattccgatgaggagacgccgtggttgagacattataatcgaaccaatcagagagtttgtaattaaaaacgaacggtttagatttgtggtgtagatatgtgcgcgaagtagacgattacagctttttaagacaagcagagcacgtgtcccatctgtttcaagaagtttctgcaatcttgacttcttcttttaacactttgtgttttttattatttaattaataacaataaatgttctttttcagttttgttttcttcaaaaatagttcggctgtttctagactttccttttttgacctttttttattcttcacatctttttgtgtgttttacaaatataataaacgagaaatgaggtagggatttcttattataaggataagaaattaaaatttgtaatgtaatgaagcatctggaatctcccgtttggtgggcgcgattcagggaacgtgttgtggacccagtttcgtcgactatcacaagtacatttttagattttc

SEQ ID NO: 21940 - protein, 299 aa, Arabidopsis thaliana
  peptide (1)..(299): Ceres Seq. ID no. 13495672
  misc_feature (22)..(233): Pfam Name: HSF-type DNA-binding Pfam Description: HSF-type DNA-binding
  misc_feature (16)..(299): Homolog of NCBI NO: 123684 NR Description: HEAT SHOCK FACTOR PROTEIN HSF24 (HEAT SHOCK
  misc_feature (16)..(299): Homolog of NCBI NO: 5821136 NR Description: heat shock factor [Nicotiana tabacum]
  misc_feature (1)..(217): Homolog of NCBI NO: 33591098 NR Description: heat shock factor RHSF2 [Oryza sativa (japonica
  misc_feature (1)..(299): Homolog of NCBI NO: 30697614 NR Description: heat shock transcription factor 6 (HSF6)
MNSPPVDAMITGESSSQRSIPTPFLTKTFNLVEDSSIDDVISWNEDGSSFIVWNPTDFAKDLLPKHFKHNNFSSFVRQLNTYGFKKVVPDRWEFSNDFFKRGEKRLLREIQRRKITTTHQTVVAPSSEQRNQTMVVSPSNSGEDNNNNQVMSSSPSSWYCHQTKTTGNGGLSVELLEENEKLRSQNIQLNRELTQMKSICDNIYSLMSNYVGSQPTDRSYSPGGSSSQPMEFLPAKRFSEMEIEEEEEASPRLFGVPIGLKRTRSEGVQVKTTAVVGENSDEETPWLRHYNRTNQRVCN

SEQ ID NO: 21941 - protein, 291 aa, Arabidopsis thaliana
  peptide (1)..(291): Ceres Seq. ID no. 13495673
  misc_feature (14)..(225): Pfam Name: HSF-type DNA-binding Pfam Description: HSF-type DNA-binding
  misc_feature (8)..(291): Homolog of NCBI NO: 123684 NR Description: HEAT SHOCK FACTOR PROTEIN HSF24 (HEAT SHOCK
  misc_feature (8)..(291): Homolog of NCBI NO: 5821136 NR Description: heat shock factor [Nicotiana tabacum]
  misc_feature (1)..(209): Homolog of NCBI NO: 33591098 NR Description: heat shock factor RHSF2 [Oryza sativa (japonica
  misc_feature (1)..(291): Homolog of NCBI NO: 30697614 NR Description: heat shock transcription factor 6 (HSF6)
MITGESSSQRSIPTPFLTKTFNLVEDSSIDDVISWNEDGSSFIVWNPTDFAKDLLPKHFKHNNFSSFVRQLNTYGFKKVVPDRWEFSNDFFKRGEKRLLREIQRRKITTTHQTVVAPSSEQRNQTMVVSPSNSGEDNNNNQVMSSSPSSWYCHQTKTTGNGGLSVELLEENEKLRSQNIQLNRELTQMKSICDNIYSLMSNYVGSQPTDRSYSPGGSSSQPMEFLPAKRFSEMEIEEEEEASPRLFGVPIGLKRTRSEGVQVKTTAVVGENSDEETPWLRHYNRTNQRVCN

SEQ ID NO: 21942 - protein, 166 aa, Arabidopsis thaliana
  peptide (1)..(166): Ceres Seq. ID no. 13495674
  misc_feature (1)..(100): Pfam Name: HSF-type DNA-binding Pfam Description: HSF-type DNA-binding
  misc_feature (1)..(166): Homolog of NCBI NO: 123684 NR Description: HEAT SHOCK FACTOR PROTEIN HSF24 (HEAT SHOCK
  misc_feature (1)..(166): Homolog of NCBI NO: 5821136 NR Description: heat shock factor [Nicotiana tabacum]
  misc_feature (1)..(84): Homolog of NCBI NO: 33591098 NR Description: heat shock factor RHSF2 [Oryza sativa (japonica
  misc_feature (1)..(166): Homolog of NCBI NO: 30697614 NR Description: heat shock transcription factor 6 (HSF6)
MVVSPSNSGEDNNNNQVMSSSPSSWYCHQTKTTGNGGLSVELLEENEKLRSQNIQLNRELTQMKSICDNIYSLMSNYVGSQPTDRSYSPGGSSSQPMEFLPAKRFSEMEIEEEEEASPRLFGVPIGLKRTRSEGVQVKTTAVVGENSDEETPWLRHYNRTNQRVCN

SEQ ID NO: 21943 - DNA, 974 bp, Arabidopsis thaliana
  misc_feature (1)..(974): Ceres Seq. ID no. 12337925
  misc_feature: MA Experiment ID: 20000227 Result: Up-regulated in Transcription
  misc_feature: MA Experiment 20000227 PARAMETER Experiment Name: At_Root-Tips-vs-Tops_P Parameter: Tissue Value: Root Tips vs. Root Tops
  misc_feature: MA Experiment ID: 20000437 Result: Down-regulated in Transcription
  misc_feature: MA Experiment 20000437 PARAMETER Experiment Name: At_Drought_P Parameter: Age (day) Value: 8
  misc_feature: MA Experiment 20000437 PARAMETER Experiment Name: At_Drought_P Parameter: Organism Value: A. thaliana
  misc_feature: MA Experiment 20000437 PARAMETER Experiment Name: At_Drought_P Parameter: Plant Line Value: WS
  misc_feature: MA Experiment 20000437 PARAMETER Experiment Name: At_Drought_P Parameter: Timepoint (hr) Value: 24
  misc_feature: MA Experiment 20000437 PARAMETER Experiment Name: At_Drought_P Parameter: Tissue Value: Whole Plant
  misc_feature: MA Experiment 20000437 PARAMETER Experiment Name: At_Drought_P Parameter: Treatment Value: Drought vs. No Drought
  misc_feature: MA Experiment ID: 20000438 Result: Up-regulated in Transcription
  misc_feature: MA Experiment 20000438 PARAMETER Experiment Name: At_Shoots__P Parameter: Age (day) Value: 14
  misc_feature: MA Experiment 20000438 PARAMETER Experiment Name: At_Shoots__P Parameter: Tissue Value: Shoots vs. Whole Plant
  misc_feature: MA Experiment ID: 20001904 Result: Down-regulated in Transcription
  misc_feature: MA Experiment 20001904 PARAMETER Experiment Name: At_Drought_Reproduction_P Parameter: Age (day) Value: 37
  misc_feature: MA Experiment 20001904 PARAMETER Experiment Name: At_Drought_Reproduction_P Parameter: Organism Value: A. thaliana
  misc_feature: MA Experiment 20001904 PARAMETER Experiment Name: At_Drought_Reproduction_P Parameter: Plant Line Value: WS
  misc_feature: MA Experiment 20001904 PARAMETER Experiment Name: At_Drought_Reproduction_P Parameter: Timepoint (day) Value: 7
  misc_feature: MA Experiment 20001904 PARAMETER Experiment Name: At_Drought_Reproduction_P Parameter: Tissue Value: Rosettes
  misc_feature: MA Experiment 20001904 PARAMETER Experiment Name: At_Drought_Reproduction_P Parameter: Treatment Value: Drought vs. No Drought
  misc_feature: MA Experiment ID: 20001905 Result: Down-regulated in Transcription
  misc_feature: MA Experiment 20001905 PARAMETER Experiment Name: At_Drought_Reproduction_P Parameter: Age (day) Value: 40
  misc_feature: MA Experiment 20001905 PARAMETER Experiment Name: At_Drought_Reproduction_P Parameter: Organism Value: A. thaliana
  misc_feature: MA Experiment 20001905 PARAMETER Experiment Name: At_Drought_Reproduction_P Parameter: Plant Line Value: WS
  misc_feature: MA Experiment 20001905 PARAMETER Experiment Name: At_Drought_Reproduction_P Parameter: Timepoint (day) Value: 10
  misc_feature: MA Experiment 20001905 PARAMETER Experiment Name: At_Drought_Reproduction_P Parameter: Tissue Value: Rosettes
  misc_feature: MA Experiment 20001905 PARAMETER Experiment Name: At_Drought_Reproduction_P Parameter: Treatment Value: Drought vs. No Drought
caatatgattgaggctgctaggatcaatgggattaagaggttcttttatgcttcgagtgcttgtatctatccagagtttaagcagttggagactactaatgtgagcttgaaggagtcagatgcttggcctgcagagcctcaagatgcttatggtttggagaagcttgctacggaggagttgtgtaagcattacaacaaagattttggtattgagtgtcgaattggaaggttccataacatttatggtccttttggaacatggaaaggtggaagggagaaggctccagctgctttctgtaggaaggctcagacttccactgataggtttgagatgtggggagacgggcttcagacccgttcttttacctttatcgatgagtgtgttgaaggtgtactcaggttgacaaaatcagatttccgtgagccggtgaacatcggaagcgatgagatggtgagcatgaatgagatggctgagatggttctcagctttgaggaaaagaagcttccaattcaccacattcctggcccggaaggtgttcgtggtcgtaactcagacaacaatctgatcaaagaaaagcttggttgggctcctaatatgagattgaaggaggggcttagaataacctacttctggataaaggaacagatcgagaaagagaaagcaaagggaagcgatgtgtcgctttacgggtcatcaaaggtggttggaactcaagcaccggttcagctaggctcactccgcgcggctgatggaaaagagtgaagttcaccaaagtataagtcaagctcaaatatggccttttaagttcagcaaaatgtttagatatatttttaggtagcttcctattaaaaaagcaataataagtgttttggattttggttccttctcttctgctaatccttgtttatgtttagttgaaaaagtttgcttgcattgttaagtctgttataatattattgtggtcctttcatcc

SEQ ID NO: 21944 - protein, 253 aa, Arabidopsis thaliana
  peptide (1)..(253): Ceres Seq. ID no. 12337926
  misc_feature (1)..(216): Pfam Name: NAD dependent epimerase/dehydratase family Pfam Description: NAD dependent epimerase/dehydratase family
  misc_feature (123)..(222): Homolog of NCBI NO: 23005179 NR Description: hypothetical protein [Magnetospirillum
  misc_feature (1)..(208): Homolog of NCBI NO: 22959173 NR Description: hypothetical protein [Rhodobacter sphaeroides]
  misc_feature (43)..(219): Homolog of NCBI NO: 23138039 NR Description: hypothetical protein [Cytophaga hutchinsonii]
  misc_feature (43)..(219): Homolog of NCBI NO: 23137167 NR Description: hypothetical protein [Cytophaga hutchinsonii]
  misc_feature (2)..(213): Homolog of NCBI NO: 15897713 NR Description: UDP-glucose 4-epimerase (galE-2) [Sulfolobus
  misc_feature (1)..(216): Homolog of NCBI NO: 28394152 NR Description: 4-ketoreductase [Micromonospora griseorubida]
  misc_feature (3)..(222): Homolog of NCBI NO: 9937230 NR Description: sugar epimerase BlmG [Streptomyces verticillus]
  misc_feature (1)..(218): Homolog of NCBI NO: 28170704 NR Description: Ata17 protein [Saccharothrix mutabilis subsp.
  misc_feature (1)..(253): Homolog of NCBI NO: 37534380 NR Description: putative epimerase/dehydratase
  misc_feature (1)..(253): Homolog of NCBI NO: 15241945 NR Description: epimerase/dehydratase - like protein
NMIEAARINGIKRFFYASSACIYPEFKQLETTNVSLKESDAWPAEPQDAYGLEKLATEELCKHYNKDFGIECRIGRFHNIYGPFGTWKGGREKAPAAFCRKAQTSTDRFEMWGDGLQTRSFTFIDECVEGVLRLTKSDFREPVNIGSDEMVSMNEMAEMVLSFEEKKLPIHHIPGPEGVRGRNSDNNLIKEKLGWAPNMRLKEGLRITYFWIKEQIEKEKAKGSDVSLYGSSKVVGTQAPVQLGSLRAADGKE

SEQ ID NO: 21945 - protein, 252 aa, Arabidopsis thaliana
  peptide (1)..(252): Ceres Seq. ID no. 12337927
  misc_feature (1)..(215): Pfam Name: NAD dependent epimerase/dehydratase family Pfam Description: NAD dependent epimerase/dehydratase family
  misc_feature (1)..(217): Homolog of NCBI NO: 28170704 NR Description: Ata17 protein [Saccharothrix mutabilis subsp.
  misc_feature (1)..(252): Homolog of NCBI NO: 37534380 NR Description: putative epimerase/dehydratase
  misc_feature (1)..(207): Homolog of NCBI NO: 22959173 NR Description: hypothetical protein [Rhodobacter sphaeroides]
  misc_feature (42)..(218): Homolog of NCBI NO: 23137167 NR Description: hypothetical protein [Cytophaga hutchinsonii]
  misc_feature (1)..(215): Homolog of NCBI NO: 28394152 NR Description: 4-ketoreductase [Micromonospora griseorubida]
  misc_feature (2)..(221): Homolog of NCBI NO: 9937230 NR Description: sugar epimerase BlmG [Streptomyces verticillus]
  misc_feature (1)..(212): Homolog of NCBI NO: 15897713 NR Description: UDP-glucose 4-epimerase (galE-2) [Sulfolobus
  misc_feature (42)..(218): Homolog of NCBI NO: 23138039 NR Description: hypothetical protein [Cytophaga hutchinsonii]
  misc_feature (122)..(221): Homolog of NCBI NO: 23005179 NR Description: hypothetical protein [Magnetospirillum
  misc_feature (1)..(252): Homolog of NCBI NO: 15241945 NR Description: epimerase/dehydratase - like protein
MIEAARINGIKRFFYASSACIYPEFKQLETTNVSLKESDAWPAEPQDAYGLEKLATEELCKHYNKDFGIECRIGRFHNIYGPFGTWKGGREKAPAAFCRKAQTSTDRFEMWGDGLQTRSFTFIDECVEGVLRLTKSDFREPVNIGSDEMVSMNEMAEMVLSFEEKKLPIHHIPGPEGVRGRNSDNNLIKEKLGWAPNMRLKEGLRITYFWIKEQIEKEKAKGSDVSLYGSSKVVGTQAPVQLGSLRAADGKE

SEQ ID NO: 21946 - protein, 143 aa, Arabidopsis thaliana
  peptide (1)..(143): Ceres Seq. ID no. 12337928
  misc_feature (1)..(106): Pfam Name: NAD dependent epimerase/dehydratase family Pfam Description: NAD dependent epimerase/dehydratase family
  misc_feature (13)..(112): Homolog of NCBI NO: 23005179 NR Description: hypothetical protein [Magnetospirillum
  misc_feature (1)..(98): Homolog of NCBI NO: 22959173 NR Description: hypothetical protein [Rhodobacter sphaeroides]
  misc_feature (1)..(109): Homolog of NCBI NO: 23138039 NR Description: hypothetical protein [Cytophaga hutchinsonii]
  misc_feature (1)..(109): Homolog of NCBI NO: 23137167 NR Description: hypothetical protein [Cytophaga hutchinsonii]
  misc_feature (1)..(103): Homolog of NCBI NO: 15897713 NR Description: UDP-glucose 4-epimerase (galE-2) [Sulfolobus
  misc_feature (1)..(106): Homolog of NCBI NO: 28394152 NR Description: 4-ketoreductase [Micromonospora griseorubida]
  misc_feature (1)..(112): Homolog of NCBI NO: 9937230 NR Description: sugar epimerase BlmG [Streptomyces verticillus]
  misc_feature (1)..(108): Homolog of NCBI NO: 28170704 NR Description: Ata17 protein [Saccharothrix mutabilis subsp.
  misc_feature (1)..(143): Homolog of NCBI NO: 37534380 NR Description: putative epimerase/dehydratase
  misc_feature (1)..(143): Homolog of NCBI NO: 15241945 NR Description: epimerase/dehydratase - like protein
MWGDGLQTRSFTFIDECVEGVLRLTKSDFREPVNIGSDEMVSMNEMAEMVLSFEEKKLPIHHIPGPEGVRGRNSDNNLIKEKLGWAPNMRLKEGLRITYFWIKEQIEKEKAKGSDVSLYGSSKVVGTQAPVQLGSLRAADGKE

SEQ ID NO: 21947 - DNA, 905 bp, Arabidopsis thaliana
  misc_feature (1)..(905): Ceres Seq. ID no. 12329740
  misc_feature: MA Experiment ID: 108577 Result: Down-regulated in Transcription
  misc_feature: MA Experiment 108577 PARAMETER Experiment Name: At_42deg_Heat_cDNA_P Parameter: Temperature (deg C) Value: 42 vs. 22
  misc_feature: MA Experiment 108577 PARAMETER Experiment Name: At_42deg_Heat_cDNA_P Parameter: Timepoint (hr) Value: 6
  misc_feature: MA Experiment 108577 PARAMETER Experiment Name: At_42deg_Heat_cDNA_P Parameter: Tissue Value: Aerial
  misc_feature: MA Experiment ID: 20000111 Result: Down-regulated in Transcription
  misc_feature: MA Experiment 20000111 PARAMETER Experiment Name: At_42deg_Heat_cDNA_P Parameter: Temperature (deg C) Value: 42 vs. 22
  misc_feature: MA Experiment 20000111 PARAMETER Experiment Name: At_42deg_Heat_cDNA_P Parameter: Timepoint (hr) Value: 6
  misc_feature: MA Experiment 20000111 PARAMETER Experiment Name: At_42deg_Heat_cDNA_P Parameter: Tissue Value: Aerial
  misc_feature: MA Experiment ID: 20000113 Result: Down-regulated in Transcription
  misc_feature: MA Experiment 20000113 PARAMETER Experiment Name: At_42deg_Heat_cDNA_P Parameter: Temperature (deg C) Value: 42 vs. 22
  misc_feature: MA Experiment 20000113 PARAMETER Experiment Name: At_42deg_Heat_cDNA_P Parameter: Timepoint (hr) Value: 8
  misc_feature: MA Experiment 20000113 PARAMETER Experiment Name: At_42deg_Heat_cDNA_P Parameter: Tissue Value: Aerial
  misc_feature: MA Experiment ID: 20000224 Result: Down-regulated in Transcription
aatcgttcgtaaaattggggccgatagagaaacaaaaatttcccaggaaaaaggcagtgattgaagattgtattagatccgattaatcgtcttcctggtcgcttgaactgagaatcaaataattgagctcaactggatttggatatgggagagacagcaacagattcagaacatcgcatgatgatcggattatcggatcctatgaaaattgatcccaaaagagaccggtttccatgctgcattgtttggacacctcttcccttcatttcatggctggttcccttcatcggccacgtcggtatctgcagagaagacggtgtcatcctcgactttgcaggacctaattttgtctgtgttgataattttgcatttggagctgtttctcgatatattcaaatcaacaaagaaatggagtcatctcgttcttccagttctggtatgttcaatggtgagaggagatatgagcaagaagaagatagtcatgagaaagagccaacatgggatgatgcactgagaaaaagcacgcaagagtaccaacatcactcatataacatactcacatgcaactgtcattcctttgtagccaacaacctgaaccgtctatctataaagtcaggcggatggaacgtggtgaatctcgcgacactagtgcttttcaagggacgttgggtgaacaaaacggctatagtaaagtccttgttgcctccactcatagtctacactataggaatcttactcggtggttggactttcattgcctcctgctcgattctagtggttttgcttaccgggtggttcatcattggaacgtattgtttcaagaaactgattcagctgtagatttgaatcataatgtacaaatgatgtctacaaaatgttttttactttttacgatggatatttac

SEQ ID NO: 21948 - protein, 231 aa, Arabidopsis thaliana
  peptide (1)..(231): Ceres Seq. ID no. 12329741
  misc_feature (21)..(204): Pfam Name: Protein of unknown function (DUF778) Pfam Description: Protein of unknown function (DUF778)
  misc_feature (4)..(86): Homolog of NCBI NO: 27732675 NR Description: similar to hypothetical protein DKFZp564D0478
  misc_feature (119)..(198): Homolog of NCBI NO: 14149779 NR Description: hypothetical protein DKFZp564D0478 [Homo sapiens]
  misc_feature (4)..(86): Homolog of NCBI NO: 14149779 NR Description: hypothetical protein DKFZp564D0478 [Homo sapiens]
  misc_feature (101)..(231): Homolog of NCBI NO: 34897172 NR Description: hypothetical protein [Oryza sativa (japonica
  misc_feature (38)..(229): Homolog of NCBI NO: 26449550 NR Description: unknown protein [Arabidopsis thaliana]
  misc_feature (1)..(229): Homolog of NCBI NO: 34910502 NR Description: P0456F08.26 [Oryza sativa (japonica
  misc_feature (21)..(229): Homolog of NCBI NO: 30682996 NR Description: expressed protein [Arabidopsis thaliana]
  misc_feature (21)..(229): Homolog of NCBI NO: 7452462 NR Description: hypothetical protein At2g26070 [imported] -
  misc_feature (20)..(231): Homolog of NCBI NO: 21592754 NR Description: unknown [Arabidopsis thaliana]
  misc_feature (1)..(231): Homolog of NCBI NO: 15230386 NR Description: putative protein
MGETATDSEHRMMIGLSDPMKIDPKRDRFPCCIVWTPLPFISWLVPFIGHVGICREDGVILDFAGPNFVCVDNFAFGAVSRYIQINKEMESSRSSSSGMFNGERRYEQEEDSHEKEPTWDDALRKSTQEYQHHSYNILTCNCHSFVANNLNRLSIKSGGWNVVNLATLVLFKGRWVNKTAIVKSLLPPLIVYTIGILLGGWTFIASCSILVVLLTGWFIIGTYCFKKLIQL

SEQ ID NO: 21949 - protein, 220 aa, Arabidopsis thaliana
  peptide (1)..(220): Ceres Seq. ID no. 12329742
  misc_feature (10)..(193): Pfam Name: Protein of unknown function (DUF778) Pfam Description: Protein of unknown function (DUF778)
  misc_feature (1)..(75): Homolog of NCBI NO: 27732675 NR Description: similar to hypothetical protein DKFZp564D0478
  misc_feature (108)..(187): Homolog of NCBI NO: 14149779 NR Description: hypothetical protein DKFZp564D0478 [Homo sapiens]
  misc_feature (1)..(75): Homolog of NCBI NO: 14149779 NR Description: hypothetical protein DKFZp564D0478 [Homo sapiens]
  misc_feature (90)..(220): Homolog of NCBI NO: 34897172 NR Description: hypothetical protein [Oryza sativa (japonica
  misc_feature (27)..(218): Homolog of NCBI NO: 26449550 NR Description: unknown protein [Arabidopsis thaliana]
  misc_feature (1)..(218): Homolog of NCBI NO: 34910502 NR Description: P0456F08.26 [Oryza sativa (japonica
  misc_feature (10)..(218): Homolog of NCBI NO: 30682996 NR Description: expressed protein [Arabidopsis thaliana]
  misc_feature (10)..(218): Homolog of NCBI NO: 7452462 NR Description: hypothetical protein At2g26070 [imported] -
  misc_feature (9)..(220): Homolog of NCBI NO: 21592754 NR Description: unknown [Arabidopsis thaliana]
  misc_feature (1)..(220): Homolog of NCBI NO: 15230386 NR Description: putative protein
MMIGLSDPMKIDPKRDRFPCCIVWTPLPFISWLVPFIGHVGICREDGVILDFAGPNFVCVDNFAFGAVSRYIQINKEMESSRSSSSGMFNGERRYEQEEDSHEKEPTWDDALRKSTQEYQHHSYNILTCNCHSFVANNLNRLSIKSGGWNVVNLATLVLFKGRWVNKTAIVKSLLPPLIVYTIGILLGGWTFIASCSILVVLLTGWFIIGTYCFKKLIQL

SEQ ID NO: 21950 - protein, 219 aa, Arabidopsis thaliana
  peptide (1)..(219): Ceres Seq. ID no. 12329743
  misc_feature (9)..(192): Pfam Name: Protein of unknown function (DUF778) Pfam Description: Protein of unknown function (DUF778)
  misc_feature (1)..(74): Homolog of NCBI NO: 27732675 NR Description: similar to hypothetical protein DKFZp564D0478
  misc_feature (107)..(186): Homolog of NCBI NO: 14149779 NR Description: hypothetical protein DKFZp564D0478 [Homo sapiens]
  misc_feature (1)..(74): Homolog of NCBI NO: 14149779 NR Description: hypothetical protein DKFZp564D0478 [Homo sapiens]
  misc_feature (89)..(219): Homolog of NCBI NO: 34897172 NR Description: hypothetical protein [Oryza sativa (japonica
  misc_feature (26)..(217): Homolog of NCBI NO: 26449550 NR Description: unknown protein [Arabidopsis thaliana]
  misc_feature (1)..(217): Homolog of NCBI NO: 34910502 NR Description: P0456F08.26 [Oryza sativa (japonica
  misc_feature (9)..(217): Homolog of NCBI NO: 30682996 NR Description: expressed protein [Arabidopsis thaliana]
  misc_feature (9)..(217): Homolog of NCBI NO: 7452462 NR Description: hypothetical protein At2g26070 [imported] -
  misc_feature (8)..(219): Homolog of NCBI NO: 21592754 NR Description: unknown [Arabidopsis thaliana]
  misc_feature (1)..(219): Homolog of NCBI NO: 15230386 NR Description: putative protein
MIGLSDPMKIDPKRDRFPCCIVWTPLPFISWLVPFIGHVGICREDGVILDFAGPNFVCVDNFAFGAVSRYIQINKEMESSRSSSSGMFNGERRYEQEEDSHEKEPTWDDALRKSTQEYQHHSYNILTCNCHSFVANNLNRLSIKSGGWNVVNLATLVLFKGRWVNKTAIVKSLLPPLIVYTIGILLGGWTFIASCSILVVLLTGWFIIGTYCFKKLIQL
